United States Patent Application Publication US 2008/0114160 A1 - sequence listing, part 7

SEQ ID NO: 4524 - DNA, 53834 bp, Oryza sativa
aatctctttttgattaggcctcatttgggagtcccatactcccgtacgtgtacatgtcgactagggtttaattaagtactccgcacagtcaccgcgcggcttaactaacatttggatgaatccctttcaaagaagccctttttagtgtattcttgttaccggcctcatgcagctcaccacgaatctagacgcataggtagtacggagtgataaatactagtaatacgtgctccctccatcccttaatatttaacgccgttgacatttttacatcatatttgaccattcgtcttattcaaaaaatttaagtaaatgttttttttttgtggtttgatttatcactaaatgaaatttaagcactatttatatttttaagatttatataatttttggttaacggcgtcaaatattaaaggacggagggagtatatacataccgcaatctttgagtaggaagctatagggtgaagtcattttgtcgcgctacttacttattgtgaagtccatatgtagtaataattaataatacatatatacacgtacgtacatcatatctcacacttctgagaaaaccctcttttgtccggtttataaccctttagtcccggttatagcaaccctgctgggaaaaccctcttttgtcccggtttataatcccctttagtcccgtttaaagcaatcgggaaaaaaaggcgggacttaagatgccccggtttataaccccttttagtccaggttatagcaaccgggacaaagaaagtgggactaaagatggcgatctttagtcccgattacctgtgatctttaatcccggttatataaccaggactaaagatgtataataagaaccaggacaaagtaagcgggactaaagatgacgatctttagttccggttatataaccggaccctgctgggaaaaccctcttttgtatcggtttataaccctctttagtcctggttatagcaaccgggaaaaaaaagcgggactaaaaatgtcccagtttataacccctttagtcccggttatagcaaccgggatagagaaaacgggactaaagatagcaatctttaatcccggttatataactaggacttaagtgaaccgggacaaagaaagcggtactaaagatggcgccatctttagtaccgggactatgtataataagttgcaaaaatatgtcaggtgtgggattcaaactcaaggcctttcacttcagccctcacgcacgcaaccatcccaccaactacactcatctgacatagataggggtgctttctttttaactagcactgaaggcatctttagtcccggttggtgactaaaaatcaatttttaatctcggttcgtaataccaattgggactaaaaatgttttgaaagattttgtgcatctttagtaatggttactattcaaaccaggacaaatgtggttttatccaaccgatcaaagatcatttctccacaaaccaggacaaatgtggttttatccaaccgatcaaagatcatttctccactagtgtcactactctcgtgtatgtttccaaatgtcaccaacaccggtaatgtacgaactaaaactgagcaaaatccccaaaataacatgcgccacaaacaaacaccgtaccctataacctgtgtgagttccaatatacttgaaatatagcattcccactataaacacatttgaaatatagtgtaggagtgcgtgcgcttgaacactgtttacgtgcacacacacacccaggcacactttaatactctctgcattgtgtggcgacattgacttttcatataacgtttaatcattcgttttatttaaaagagtataatttattttgttatgacttgttttatcataaaagaaactacatataattttaacttgtatattattatgctaaatttttagataagataaatggttaaatgttattaaaaaatcaacaacatcatacattttaagatggaggtaatatatattagtgctatgtctgtctatgcaacaagatctaaagaggggtttagttttttctatcttttttttttcgtgggattacctgttttttggtgcgttaggattttgaggtagctagtgtgggctttttatatgggaaaatgcgatggttgggaaggagaacgaagagttggtttttaaaaatattagagatatgtataactaattaaatctcgtatacgctatccctccatcccaaagtatatatttcttttgtcaataatattgagaagtaattaacttatccatcatgtgatgaaaccaagaaacatgtgtgtgtctatatatatatagtcaatgagtattaatatgattttttggattctgattgtaggatcgaatcataagaactaagccaaccagaggggagggtgaatggttggtatacacaaaaacccaaaacttttagtggaaataaaagttacctcaaattcgacggattgcggtctgaccgaagtagtcgtaacggtttgactgcccaaagatcgttggtctgaccgaggtagtaatacaggtcgaaccgccgagatcaaaccctgcctcctgaagccgtcgccggtctgaccgcaggtatgccgccgatcggaccaccgcgataccgccggtctgaccaccggtgtcccgtcagttggaccgctgcacccgagaaaacacgaatcgaagaactctcaaagtagatgacaactttattatttctctctgtgtttacaaagtgcaacaacaacactcctcacgaaattctcgactaaactcgaaaccctaactaaaactatcaactcaatgctctcaaaagtgataccgggaagcctcacgctccctctctatttatacatgaggtaggcatcctaaagccgcgaaccaaactcatactagaagtcctaaatcacttaggaaaccttctcgtataagaaacaaactttacaaactccaatcataccaaatttgaactccttccaaattcgactccacatcccatacgcacacaatacctccatcgtatgccatatggaatctttaccaaccacgtgcattgaactctagcaaaagtatcccgcatgatatctgaccgtcacggacatcgccttatccccaagtcgactcccgatccatcactgcaaatactctcctgaggcatcaaatcacctacacatgaatcaaacaaagaaaccatattccgaaaccaaactatctccaacttgactcattgttagcaaacaacagtattacatacatatagtatccatctagaagccataaacatgaaacaatcacggatatccaaataaacaacccgaaaccgaaaccgacacagcgtcggccggtcagaccgccgcgcgatacacgccggtctgaccggcaaccactgcccggtctgaccggacccaaatcatagcattacctgcatatcacctgtaaatccaatcatctccaaaaccacttcgccaataatctccaaatatcaaaaccgttaatcacagatgctaattgttcatcacagaataataatcaaaacacgctttgattttacactgatcaataatttagtttagtacatagagagactacaaatatatccatctcatttagaaaaatcagaaaataaaatataccttacatttgttttgatggaggattttacatgcataattaattaatagacagagagagcagcagataaataattaaagagacactagtagaattgcaggcagcagagcagcaggtaatagcaatcgctagactgtttccggcccagctgcgacgcaatcggctgtattattatgattgaatgatacggtagggcgtttgaacaagtcgaggccgaggtagcaggagacggcgatgtggtaggacctggtgcaggccttcccgatgaggaatcggacggtggccgtcacctgcgcggtgatcgggatgtcgttgcctctcatcatgttttggacccagtagtcgccgctgacgaacacccgcaccgggatggccgtcgtgttccgcggcggctgcacgaacggcgtccgcaccgacgaggcgtcgtcttcgttgagcagcgtgggctcgccgtcgaacggcgtgtaatgcagcttcacgtcgaacccgcggtactccacggcggcgcgccacccggggttggcggcggcgactgtgaggttcagctccacacctccatccagaggcaggatcatgcgcgaggccttggtgacggagaagtcgatctccccggggctcagcagcgcggagatgccgatcacaatgacggtcgccgcgagggttccaacgacagcgacgaggatgtactgcttcgtgctccaatatgatttgtgtgtgtttggtgatgatgaagccacctgcagcttcttcgtcgtcgtcgtcgccgccgccgccattgctgccatgcctgcttaattatctagctacctacgtgtacctccttactagttagctagctagctagtgatgcgtgtgtgatcgacttgtttaattaattgaagaaagctactctctccatcatatcgaagcatttccaaatggtttaagtagagattaaggtttataaagaatatactttcgtgccgatgaggacggatgcaagggtagcttgagatagaagacagcataagaaattcaaatgagagataattgataggagtacttctatatagtacttcatctgtttcacgatataaatcattctatcattgtctatattcatctagatatataacatctatatgaatgtgtgtaatgatagaatgacttgtagtgtgaaacggaggaagtatatatgaatggagctgaatttttgactggaggcttcctctcgtttgtgcatgttataaaaaacattgttattatttaagaaaattggtgaaaataaattaatatgtaatacgttatttcacgaacatgcaatctcgaaattgtttctagctagttgtataaattgaatttgaacacaaatacttatggaataatatatgacattttaatctatctcgtttgtttttcatattgaaccagatagctcgtgtgcgaattcgaataaagtatttgtttttctctagaaaaagaattcgaataaagtagaaataattaattcttggctatcttgcatgcgccaattcgaataaagtgagtataaataattgatgactagctacgtacgatcgagctgcatgactgcgatatgcatggtcgaattcgaataaagtagcttgtatttctacgctagctaggtgggtgagcgggaattggaataattaacttttagttaagctgttttttttgttaattaagctactacgttactagctttaactaatttgtatacgatcctcgcgtcgtgagctagctagctgtagctaggtagacaccacaccacagcatgcgcaacgagaaaaaggaggcggcggaggaggaggaggaggaggagaagaaattccggtggctggacgtggtgcgatacgcggcggccggggttgtggcgttgctcgccgtgggggtgctggtcggggccatcgtggtggtgctccggccggacgcgctggtcatgaaggtcatccacggctccatgttggtaaacctgccgccgccgagcttgacgttcacgttccagctggaggtcgacaacccaagcgggcgcgacaccatgagcttcaccgacatgtccgtcgccgtcttggccgtctccgtcttcggcggcggcgtgatcagcatggctaacctcttctacttgcccaacatcacggacttgcagccggggaagatgatgcaggtggtgacgacgcagtggacgaccaacccggaggcggaggtcggcgactacttcgtgaggaggctatcccgtggggaaaccatggccgtcaccctgcgagtccagggcatcctcatcaccaggttggacaccctcaacggcgacgggccggtccacaccagcaaggccaacgtcacctacacttgcttcaacgttaaactcggcgtcgacaagtccttgaactccaccgacgacgtttcttgcaatagcaagcagtggcggatctagaaaaaaatagtagtgggggctgaataaactacatcagcataaatcgaaccttcagtccccacatcctatagatctatggaaaaaaaatttagtgggggcttaggggggtctccactatccctgggtaggtagtggggtctcaaaacccctccgcccccattgtgaatccgcccctgccagcaagtagctacgtacctatcacttactgtacttacctacgtacgctatatacatatacttatatatctgcatatagatacatacatatgtatgtatgtatgtatgcgtgccgcgcgtgtgtagatatatatatacatacacacgtaaaataaacaaaaaataattaatgagctactctctaagaattcaattttgagtttgaatctggctatatatccaggatttgatttttttttttttgacgaagggagtactagctagcactgtgttgtcacactcgtcactacttacagatccggccaacattgatgtcccatctatgaaaaggttacaggtcaccgaggccatcatctcttatgggtgcaaatatagtccatttagaatgtggatatgaaatatgacatgccgtaaatgtgatgtcatccataatgagttatggttgtgacacgttaaagactattttgtaatgtttgttttgatttcgatgatgagtgaagtttcaagttctgttacaaggtataaggtgcggttttattttgttgacaaatgtatgcacttgcacctatataaatatggaattgcatattttagtagggaaggtctatatacaattcgactgaaataaaaacctccatcgttcttatagttgttagtaggctggtgtgagagtgttgttggtggagttgttgtggtagtcatgatttcgcttagttgttctaattaattatgtactataaggtttggtcttgtttcttcttaaaatgggacacatttcttcctttatataaaacgtcagcaaatgtctaaccgttcaaaaaaaatgatagaaacaaaaaccactaaatcattttgaatgttgtgtcgtcggatgcgctttaagatttgtgcatatggtaaaaccttctccttttcttcaccctcccccttctttaggttgagaggagaaaagataaaattttaaaaatatatgttctttttaatttgaaggtagagaggagaaaacctgttttttcaattttattttttccccatgtgattgacattggatcccactgatatgtagacgccaacgcggcataccacatcagttcacatagcgtattagagctcatttggacaagttcgaggatccgaaaatacattttgagagttcagcgagtggattgaaaccgtttagacaagtttagagacccaaaaatacattttgaaagccaccattgcatgccacatcagtacgtggagcggattagagcccatttaatttggatatattttaatttggattgatcaatttgttcgaccacaatatatatatatatatatatatatatatatatatatatatatgatactcatatggggcaccatggtattaaatacataaattcactcaaatttttcaaaatttttaaattgtgagtatatacctagttataagaattcgattcatatctatacctatcaacaaagcaactcaaatttagctttatttcacaatccataattgcatacctaactaattatatgttttatatgtttggatgctatatacctagaatcaaaatctaacaaaaacaagttcaaatttagttcaaacttgctttgaactagttagtaaagtagttaatgttaatacccaaacatttataaaagtttcatacccatttaaattgagtatatactcaattttaatcatggtgcccgggcaccatggagcagcaaacaaatttaatatatatatatatatatatatatatatatatatatataacacattacgcttttgtacttgcttcaaacaaaaagtttaaacttggtatcgatcggtaaaagttggtcaagcgctatatcctgtttgcaagctgctgcctagctgcttcgctgcctctggcttgctggcctgctactgctgcatgcatgcggctgattgatctgctagttagctgccactgctggccaagcacacgcatgggccaacggcccaaagccagtttgctgctgcttactgagcccaaagcaaatcaaaggcagccactagctagcttttttttttacttcctccatccaaaaataagttaatcaagtacggaatgtagcatttatccttagtgctcgtcatagattaacttattttaacaaaaggagtaattattttgggcgtcgctgttcgggcacttcactctagaaggaaaaaaaatagcatcatcccctccaaaaccccaactgcagttgaggtgatgataagtattctcgctagatccttcacaccacgtatactcttaacaccattcacaatgcgtctatatggcatacgtcccaaaccagcctcgtagaagattccccacatatgcaagttccatgcacacacaaagtgttggtgctaattatcttgctaagtgcgaaccatgactgggttggcgagccactctggatggagaacttctctgatgaagccagctttgagaagtctgtcaagctcttctcttatagcttgtttccgatcaggtgttaatctccgcagtttttgcttaactggcttggcgtcgggtcgcaccatgagtttgtactcaatcatctccctggggacccccggcatgtcggacggttgccaagcaaacacgtctgcattgtcgcggaggaaggtgatgagctcgatttcctatttgctggtcagtgtcgccccgatcttgacagtcttgtcggggttagtgctggtcagcgggacgattttgatcgccccgtcgggtcttgacgtcttgttgggcttgctcactttcgtaggtggcacagctgtggtgggtaggttgggagtttgctcgaccatgtcaaggctccgcttgtcgcattgtgctgctagctttgcatttctttgaatagtgattttcccttttggtcctagcatcttgagcaattgatacgcgtagtgggatgccgccatgaacttcgtgagcgcagtccttcctaagatggcgttgtacgccgtgtcgaactcggcgacatcgaaggtgacctgctatgtttggaagttatcggcctgtccgaaagtgacaggtagcgtgattttgcccagtggcttggacgatgattctggagtgatcccgtggaaaggttgacctgatagtgtgtcacgcccagaaatttagcccaaatttccatactattttgtgtattaaatccctatccaggaccagccagggtacacaaaacgacaagtaatatacagttccaaacgtaaataaagcgtaaaatacttacagaagaggctcttagtcctcgcaccgaaaagaaacgacagcagcggaaaaaggtgatcctaacggggcttcagctccactccacaggcaaaactcaactggggtctgagccttggtcttctaacttcatcttcagctcagaagcactacacttctgaaaagggggaaataatagcaaggctgagtacaaccaccgtactcagcaagccacaccaatgatgcagacgtgcaaggggatacaaggacggtttgtggctatttgcataaaggcggttgtaaaacattttattgagcaaaacagtaaaactgttgagtaattaaagtaatattaaatctccactgattaacgctacactacgttacacaggcccaaccaacccacctgaactacagtgcattgggtcgatttattaggatgggactaatcacggtgaatcaggtcgaccgcccataaccgtgggcatggctattcgaatagttttactctgatcagaggtgtacaactgtacccacaagacacagccccacgacacgtttccgtgcgccgacatgccaccacgacataccggaaagaggccgtgacaagacctttcgcataaccccatctaaccaagcacaccacacctcaggtttcacctccactcctcgcaaggcagcgagcagtcccctctcgtgcctaggtgaatccggaagctgcataggccgtcgcagggcctatccaaactccatcacgcccacccttgcctggatgcgtcagctagaggaaagctacactacaagctcagccgttgcccacgctggcttgtggtaagtacgataagttcttccagggcatcccgcgaaccggtccttaattgccatgggtgcgactagcaaaaccatgcacccacagcccaccattcagtcgcattttagttggataattacggccatgaagcatggccagatgtctcgagcacgcagcccattctgatactaaaaaggtctaatactgcaattatcccatcaactgagctagtggtaattaagcatggctaagcatatagttctagctaggtcacataagtaacatgagctagtcgatttattacccaaggttgacaaagaacagatatcaagtaaacatggcacaagtgagcagataggtaatatccagatcccatgtaattagcaaaacatgcatatttatttgcaaacggtaaaacatttataaattgggataaacatgctcaaggggaatgtgtgacttgccttgcttcttcaaaacaatcttccgaactcttttcctcgtgaccgcggacttccgaaacgacggattctacacgctggcacgcaaaacgaggaaaaacactaataaaaaccaagaaaacagtacataaaaagtaaacaaacttgtagagcttaattttagatgaattttgcaagttgaacggcccaatttggagttcgaatgaattagatatgaattttagaagttttgagccattttaatggatttatacaattattaccgatttatgacgcaattaataattattttctcaaaggaaaaggcattcgctgacgtcagcaaggggcgccggcgccgacaggcgggccgaacgcgtcagcgggtcaaggaggcaggcacacggtggacacggcccaccgtggccgaggcggcaccgtggaccgagaccacgggtggtccacgggcagcacccaaaagttggcaacggagggagggggctggctcgccggccgacccgaccaggcggcggcggctcccggccggacactcgccgctgatggcggcacgtcgtggcgccggacacgggaggcagaggggaaaaggaaaggaggagggaggcctcaccgtgcgccgggtggcgaggggcgacgagtgcggcggcgagctcctcgggacgacggcgggacggcgctcccgctgcggctccacgggcgggaagcggcggacggagactgggatgacctggggagggcggtggaaggattaggggaaaaggaggaggcgcgaggcggcggaaaaaaaaaggccggaggccggcgacatggggagtagctcatctcaacgggaaggagaggactccggcggtggatggcgagggcgatggggtggccgaggtgcggcaccagacggagaagccgacggaggtaatggcgaccgacgacagcggctagggcggcgatgattgttggccggaggcggcaaaagcagcggcaacctcgggcttgcggtggggaggtggttccatctatggagaagggaaatagagcggaggccaaggtgcggtggggtgcggtgagcgcggtggaggcagtggcgcagctgggcgaagcggcgcttgccggcgggaagcggctggagttggcgacggtggcggagagagatggtgaatgtggcggcggcgtttcggcaatggtttggggaaggggagcggtggacggggtgcggcaacgcgcggtgaagccggcggcgcaaacggcgcggcgcggggacggcggcagcagcgacagaggcgactggagggtcgccggcaagcggcggcgcttgggctcacgtggggagagcgggagagagcgcggggagctcggggaggagggggaaacggaagaggagagcccggggatcccttttataggctcgggaaggcgggatcgagcccagtagaggcgacaaccgacgatggggtgggctccggcgacgtgggtgaagtggggcggtttggcgctggttttggaggggagaagagggggaaggggtggagaacgtgaaggggatcgtgcccacggccggtggactcgcgcgcggggtggagaaggagggcggaaacagcggcgtcatggggaggctcggccggccatggcggcggttggagccggaggaaggggatgacaggtggggccttgggtcccacctgtcggggagatagagagagggaaaaacgggctaaggaggcgaaatagactttcgcgagggagatgggaatcgggccgacggcccaagaggagagggggaaggcggccgggccggaggaaggaaggggaagggagggagttgggccgaggcggcccaaggacaaagaaagggagattttatttgttttctttttattttaattggttaaatgaactttgtgcttttaaaattatttcttgagctccgaaaattgacggaaaaatccggagagtatattagggcacaaagaatattacaaaatattctcggccaatgatttttaagggaaaatttaatttccttataatttcacttgattaaattgatttaacttttatttaatttctagaaaatgcattatttaatgatttttattcccgaacgaaaattggggcgttacatagtgtcaactcgcttcgcgggattcccattgcgtccagagtgccagcaaaaaggagattgcttgaactgccgccatcgatgagaacccttgcgaccttgatgttccgtacagtgggttcaaccacgatcagatatcttcctgggatagttgtagtcttcgggtggtccgcctccaagaactcgatcttgtgctgcgaccacttaatcttggcggtaattccttgtgatgtagagcaaacttcgcgttctatctttttgtactctctttttgaggagtacgacatagaaccgccgaagatgtgcgtgacgtggaggtcaaactctgagaacgcgaagtcggaattcggggtactcgcatcagcaggtgcctcgactactcgtactcgctttctcttctcgaccgccaattgtcttgcaagtgccttcttaaagacgttgcaatcctccatggtatgcgtgttagtcttgtgtatcgggcaccattgtcgccgtgaatcgtcgcgctgtcttcagctccctcgatcacgttcacatctcgcggtgaactcggagaagattcctggtctgccagaagtgtagaaccgagggttcgtgggggtcgacatcaacgaatcccacaaaccgatcgggtgttgtctctgtgtcccgttcctctgcaacacatcgaggttgagctcgtggttgtcggatctgaggtcgctgaggcttgaccgtaccgagaaagactttgcagcttgagagatcatgcttctttgatttatgtatcggacaccaggtgatatcggttggtgaagcatgttgaattccgcactctttgcatgccttgagttcagccgccacatgacgtaccaccgagcaatccgacagagagtgcttggatgtcttatgaatgtgacaccaagtgctcgatttctgcgtagctatccttgtcggcgcctgattctgatttcttgaattttgccgcgggaggaatcatcgttggggggtcgtttctcgaagtcacgactgctccgttctcgttcccgacagagattgggttcgatgagatcggtacgacagtatagatcggaaagacaattgatccgacttgagtccacatcagcgatgtcatggtcggaactcctggagcagtattgatgttgacattgttgtcgaaacgttttgaagtcatgtcggcagaaccttgagcaccaagtccccctacctggcacgccactgtcgacgggtgatacccgtagaccagctgaatagggtatttgggtacgttggtatgagaatctatacgatacgacatcaagcaaacaagaaaacaaggattatactggttcagaccccttatcaagaataaccctacgtccagtttatatgatattgatatggaaaaccacagattacaaatagaacaaccaaacttgatgaaaccagcgagatcgtagtcgatggtttcgactagatgccccggcgagaaggcttgacgtgctccggcttcgtaaactatggtgtatttgttggtgggaagattcgatgcctgtaacccctcggggggtactccttttataccgtatatcaccttgatctccaagtaagactcggagatatcagaccccgtacgatatagaaagagccaaaccctctccgagtaggactctgttgtcttcagactcgttgaggtattttccataatatctatagatttccttaacaaatacgggaacaatacccgtccatcatggtataccgtatccgtatattctatgagtcgtaggataggaggtatgccttatccgtaaccctgacagagatcacttggaataggactcggctgtgttcggtaggtcgaacgggatcgagtcggaagagctccccgactggttcgaatccaagtcggagagagaaagcttgccgaagtcatcggtgacgagctcaaggctaccaaagacgtatgtctgcccgggtgggaagacgaagtcatcgacgcttgatggagatcccattccactagtcggtgaagaaatcgacactgccctacctggcgcgccaactgtcgaaactagttttcggcaatatgaattgggggttgcgtatgagctcgaaaagtgcgattgggacagacacaaagctttagacaggttcaggccctctctcttgagaggtaataccctacgtcctgtttcggggattgtgtccgccgggtgtattgattgtggaaaaagtcttatgccccttgggggcgtcctgccctccttatatagtcggaggagctaggattacaatgaaaatacctcacctcatacggttcggtattgtattgcctatgttacaatagtataggactcggactcctaagttattaccttaatacataaggaatcacgtaacttgggcctttatccgtataatatctatacatgaactacccctacttgtaatcagacaatccatgccatgtaggtatgtggtatccataatctcctgtttccattttcagagggcctctgaaaatcaaatattttaggtgttttcttaagaaaaccactctttagaatcacccaaatttataggcggtgtttgacagcagtcttagccatcttcataggcggttaaaaatttaaaccgcctataaaatgaaaggactgcacaaattattttttaatgttttgcacggtattttcttcgtgtgattgtgcactaatttcatgctgccttagttggttattttggtttcgtcgagatgaacaaatatatctgaaactctgaattggtctgtccggacctagaaaagtgagatggtacaatcattgtttaacgatgcaaaacttatttcaaaaaataaaaagatccgatggtgccgatcgatccaaagctgattatctaaaagaaaaacagatccaaagtagatgtaagctttggaggtgtattaaagtagactaactaaagttttgtgagatgctttggaaaagatagtaaaggaagcagtggtcctaagcgaaaagttgataaaggtctatttatatattcctttaaatcttttcttttgagcttgccaggtgttcttttttttctgctacatcacatttgcatttaccaatgttaacacatcatacatcaatagtgagtaatgaagtgatgaaggggcctcacgaagattcatgcttttgtatttaattactatctgcttatttttccatatatgattgtacttctgtgttagtttgggatttgttaaatgtgtctatcagatacaataagttactctctctcaatcctaaaatatatatacctttagactttttaaattaaaagaatatggtgaaattaaatgattgtcatgattaaaagttttaggtggtgtctaatttagtaactaggtttatatattttgaaatagatagtccaatgacattcatcaaaaagctattccatacagacacacgacttcgttaaatatgacgcattgtgtcacatgtacttcatgtgggaagaaaatttggtaagacggaggtcctacgctaataggaaagacttcatttccaagcgtgacacgtgtgagcaccaatcctaaagcaatttcatcctcttcttcaacctcacgcctcacgacatgtgtgggcaccaatcttgcagtccttgtctgcccccatgttcctagcgagcttgcacagaggagcacgcacatgggagcttgcccttccttggtctgcgagcggctcacagcaggccattgggggagcagtggcgaacctccagcagtccagatgaagtaatttgtagcaagcttgagtagttgagtaaattgatgggcaattgagtctgaccgtagggtgaggagattgctgacctctcgcaggccaccgcttcgcctccaccagtgtggcgttgctgctacgctgaacaagaaggtgtgtgagctcgttgagacgctgaatgggagtgaggaatcgcctcccgctgatctcctgttctctatgagcgagagcttgccgccggactgaactggatgaaggaatcactgctgtgccatttcatatgtgccaacagaggagaactgagagattgctttgagattgtcacgttttgaaacaaagtctttatgataagcataagactttagtcctaccaaattttcttccattcatgtgggcttggtgggccaccgttgaaaacagacaagaatcaaaatcatgattggcgctaattaccgattctgcgtgattttaataaccctccatgcaacttttttttcctcaaatggttgttaccattttttgctaaataaattgaaatctatatgaaaatttgaaacttattcgaatcaaatttgatattttcaagcggacttaaattctgtaactttcaacttaatttttgaaactttcaagtcaaatatcaaaaccttcatctcaaatttcaaaaactgttaacatgaaattcgaaaatctcaactcaaatttaaaactttatactcaaaatttaaaactttcaactcaaaatttagaaaaacagtccccatattttgaaactttgaactctaatttaaaactttgaatgcaaaacttaaaactttaaatcttaaatttgaaactttcatcttatattttaaaactttcaagcattaagcgcgtgaatagcgctaaacatattaacctgcacctaacagatatgcatgcattaggaattaacccgtcatttatactactacatggtactccttccatattttaatacatgacgccgttgattttttaatcaacgtttgaccattcgtcttattcaatttttttttaaatataaaaatatttatatcatgcttaaagaacatttgatgataaattaagtcacaataaataaataataataatattttttaataaaatgaatagtcaaacgttagtaaaaaaattaacggtgtcaacattaaaatacggaggcagtactacgtttggatgtagcgagtatcaatgtaaggcaccgtccctgtgtcggtgcgtatagccctataaaatatagccacatccctagggcaaggctcaaatcgtagggtaacccacagcttagctagcaagcagcagcaagccaacatagtagctagcacgtacaaatgatcgccatgactcctcttggactactgctagtgcttctcgtcctctgtagctccattcttgttgcccatggaggagacgctgcagccggcgcctatatggtcatagcaaccagcaccatgaaaccgaaaactttctgctccggccacaagggtattattgaatttctaactttatatatatatatatatatatatatatatatatatatatatatatatatgggggaccagaataaaatatacacttttgtataaatatcatatgctcctaaaatattggtcaaagtaattctcatctctaatttttctctactattataaatattgaaaatgttttcgcagaattttggtacgtcatcagtgtttgataaggtatttgagatccaacgagaaatttagacagatgtttttattatgtgaattgtattttctcaaaggtaaattacaaattcatgtaaaattaatctcattatagctcctaaatagttgttgtatcattgaaaaacgtctttacccgttacaacgtacgggtattttttttaagtaaatatataaagccaacatattttttaatggaattaataaacgtagctttgctgtcaacgtcatttgatgtgtatgaacatgtatatactatacccaacgtactgagaggtcggagttatgtgacatacgggtatgtttggatggcatctacacattgccacacttcgatctttttccaaatcttgtcacaagaatgactgacaatttacaatttaacatatagccacacttgtggtaggtttggaaaaatgaagtgtttgatacgtacgccagataaaagtatgaaatggcaggtcatagttgtgacactgaatcaaacatactacattgatacttatctagaaaactatatatgacgtacctaacatttgacataataaataaataattaaaaattgtggcatccaaacaattgcgcatatatatatatatatatatatatatatatatatatatatatatatatatgcgcaaaatctccgcataaattatggtctttttttatcacttggatctccatacggttttattaattacaagggaacctctcatcaccggccgcatgcttgtaccacagttgctccaggggacgtgccgtcgccgaacagcacttgggcaccgttgcatcacctgtatgggccatgctcgccggcgccgtcgtcggccaacagcaccgccgccgacgtcgccgcttccatggccgacatggtcgacgacgaccaacgccgcgcggactacatccaaaagaggctcaccggcgccaccgacgacaagcagccgatggccttttcgagcagaacctcgcaatacgagaagaacggccagtacgccactaatggtggcttaggcagtgtgcctcacctcaaagtaagcaacgtctctccttaattagcttgcttgatctgtcaatatagtaggagtactaaattaagtgtgtatattatactaattgatttgttaataaataatgaagagtttatcaacgacggcgacgacgaattcggcgccggatggcacgtcggcggtgacccagacggtgataatcgactccggcagcgacgtttcatgggtgcaatgcaagccatgccccttgccgatgtgccaccggcaacgggaccccctgttcgacccggccatgtcgaccacgtacgccgccgtcccctgcacctccgccgcctgcgcgcagctcggcccctaccgccgcggctgctccgccaacgcgcagtgccagttcggcatcaactacggcgacgggtcgacggcgaccgggacgtacagcttcgacgacctcacgctgggcccctacgacgtcatcaggggcttccgcttcggctgtgcgcatgccgatagggggagtgcgttcgactacgacgtcgccgggtcactggcgctcggcggcggctcgcagtcgctggtgcagcagacggcgacgcggtacggcagggtcttctcctactgcctcccgccgacggcgagctccctcggcttcctcgttctcggcgtgccgccggaacgcgcccagctcatcccgagcttcgtctccacgccactgctgagcagcagcatggcgcccacgttctacagggtgctcctccgcgccatcatcgtggcggggcgcccactcgccgtgccaccggccgtgttttccgccagctcggtcatcgactcctccacgatcatctcgcgcctgccgccgacggcgtaccaggcgctgcgcgcggcgttcaggagcgccatgaccatgtaccgggcggcgccgccggtgtccatcctcgacacctgctacgacttcaccggcgtccgcagcatcaccctgcccagcatcgccctcgtcttcgacggcggcgccaccgtcaacctcgacgccgccgggatcctgttaggcagctgcctcgccttcgcgcccacagccagcgaccgcatgcccggcttcatcggcaacgtgcagcagaagacgctggaggtggtgtacgacgttcccgccaaggccatgcgattcaggaccgccgcctgctaagtgctaattcaaatttgcttgcttgccaaactagcgtattgttagcttattattcgaatataagctagctagttgatgaaataattagtcaaagtgattgttgtttatgttttgatgccatgtttatcctacatggcgtactagtagagcatctatctctatggaaagggattaaagtagctagcttaattgcagcattgtctgctaaagtttaggctagctactaaagctcttttatttatcttgtctgcaataatttgttatcttgatgtgatttcggtcgtgtgagattgtaatatcgagttatgcatctccatcttgcatgtcaagtgatgtactactttttccatatctagcattttatgcataatctgttgactatttgtgcgcacacaattaactagagatagattctaatctcccgggtggacgtccacctagggctgctccgccaacgcgcagtgccagttcggcatcaactacggcgatggctcgacggcgaccgggacgtacagcttcgatgacctcacgctgggtccctacgacgtcgatcgtcagggtcttcctcttcgggtgcgcgcacgccgaccggggaagcaccttcaacttcgacgtctccggcaccctggcgctcggcggcggtgcgcagtccttcgtttagcagacggcgacacagtacggcagggtgttctcgtactgcatcccgccgtcgccgagctccctcgggttcatcacgctcggcgtgccgccgcagcgcgccgcgctcgtcccgaccttcgtctccacgccattgctgagcagcagcagcatgccgccgacgttctacagggtgctcctccgcgccatcatcgtggcggggcgcccgctgcccgtgccacccaccgtcttctccaccagctctgtgatcgcctccaccaccgtcatctcgcggctgccgccgacggcgtaccaggcgctgcgcgcggcgttcaggagggcgatgaccatgtaccggacggcgccgccggtgtccatcctcgacacgtgctacgacttcaccggcgtccgcagcatcaccctgcccagcatcgccctggtattcgacggcggggccaccgtcaacctcgacgcggcggggatcctgctccaaggctgcctcgccttcgcgcccaccgccaccgaccgcatgccagggttcatcggcaacgttcagcagcgcacgctggaggtggtgtacgacgtccccggcaaggccattcgattccggagcgccgcctgctaatcgatcgatctagctgcttctaatttgcttgcctgccaaactagctatcttggtttattcgaatataattaagctacctagctagttgatgaaataattagtcaacttatcaatcgctgtttaatttgtttttcttctgatgccatgtttatcctacagtactactccagtagagagagcatctatctctatggaaagggattaaagtagctagctagcttgcagcattgtctgctaaagtttagggtagctagcaaagctcttttgttgtctgcaataattagttatcttgatgtgatttgtgctcgtacgtacgtgtgagattgtaatatcgagttatgtccatcttatcaagtcatgtactttactacttttcccatatctagcctttttacactcatttttaggttttaatgcatgatttcattaatttaattttatcatacattaaaccatttttgttatttaaaattttatgtaaaatatacaagtcatgtttatagtatctttaataatgaaataaatcacaacaaaatgaatgataataacataatttattaatggtaaattttcctacatagcacctaaaatttatgtaatttgtttacagacatcgtaaaaaatgtatcatggctaaacgatatttttaaaaaatggtaatttaccgaggatattttcgacataattagagagagaaattcttaaaaagacgagaataatcaaatatgtctccgaggatatatcctggactaaaaactgaagggagtatttttagtgtcggttacacggcctaggaccctgaattcagacagtgctttgcatttatatatgaccagctttggtgctctacaccctgcccctttaaaatgcgtccgaacaaagtgtacgtctatggaccaacatacatagttacaaaagaggatctcactccgtctctttctccgaaaagcgaaagaacgtgcacatggctcaatgataagccaattaactcgccttcatgcttatggctagttttggagagctgcacctgacactgtatctctatcgatctcaccatttttatgcctatgattgatcaagtttttttagataatggaatataatatcccggcctttactcaaaagagctacagccaattattatatagtagttttcatgaacatagtgtaaatctaaatgaatagaacgcaccgaagagaaaaacaaagaaaccagcctaacgtaaggagatcacaattattgaagtctatttgtaaatctccaaccataattggcaaatagttgcataaccgtggtctccaactttcagcacgcaactttcagaaactcttcatcttcatcacacctttgtagttgtgcccaaaaccggagccaatgagttgccctgaaaatgacctgcatataggaaaatgatggtgatttgtcaaaaaccatatcgttcctactcagccatattgcccaacaaatggcagaagctccaacaagtatcagtttactcattttcttatcaactcccaaaagccacacattaaaaatatgagatatactaactggaagattaaaaccaaaagagaatagaactgctctccataaaaacttcgcaaaatgacaatccataaagagatgttgaatagactctttcttcaaacaaaaagaacacctcaagctaccattccagttacgccttgccaaattatccttagttaacacaacccctttaagcaggtaccacatgaaaattttaatcttaagtggcaacttaagcttcgaaatacacttgtttctctcgatatagccattattaattaaagctaggtatatagacctcaccgagaacaagcaattctgatggaaattccatctaaaactatcagacgaatcattcaactgaatatgtactatagaggcacacaactcatgccaacaaacaagattctgaccaactaaagctctcctgaaagaaacattaagcggaacagatcccataacagtggcaatagaagatgttttcgtccgaacaattgcgtacaaagatggatatttatccttaaaagccaagttaccaatccatctatcttcccaaaatctaatttgttccccattattgacaatccaagaacccatatttaagaaagtacttttgacattcataagaccagactaaaaatgggaatcaccttgtttcctgtcaacttgggttatagatttattataaagatatttcctcttcaataaatcatgccaaaccccttcctcattaattatcttaaacaaccatttacttaaaagacatttattttgtatctccaaattatgaatcccaagacccccctggtccttgggttgacaaacaacatcccacctagtgagcctgtattttttcttatggtcatccccttgccaaaaaaaccgcgatctataataatcaattttatgaagaaccactttcggcacctcaaaaaaagatatcataaacatggctaaacttgaaagaacataattaatcaacaccagtctaccaccaacagataaatgcttgcctttccaactactaagctttttctcaattctctcttcaataagtttccaatctttattagaaagcttcctaaaatgcatcggaattccaaggtatttaaaaggaaaggtacctaacttacaaccaaaaatatcataatattgttcataacattcctttgtctgaccaaagcaaaataattcactcttgtgaaaatttatttttaggccagataacttttcaaataccgataaaatcagtttcaaattctttgcctgttgcaagtcatgttccaagaagataatagtatcatttgcgtattgcaagatagacaaaccatcatcaacaaaatgaggaataaccccattcaagagtcccgcctctttagccctcttaatcaatagagtaagcatgtcagctactatattaaaaagaataggagataaaggatccccttgcctaagacctttgtaagtttgaaaacaattaccaatttgatcgttaacttttataccaacatgaccaccttgaacaaaagaagctatccattcacaccatctaggagaaaagcctttcattctcaaagtttgttgtacaaaaggccatttaactttatcataagctttctcaaaatcaatcttaaaaattacaccacttttatctttgcgatgtaattcatgtaaagtctcatgtaaaataaccaccccttccataatatttctcccaggaatgaacgctgtttgagaaggactaattaccttttgggcaacatccattattctatttgtagcaactttggtaaaaatcttaaagctaacattaagtaggcatataggtctatattgttgaatctttaaagccttagcacacttaggcaaaagaatgatagtaccaaagttaagcgaatataaaggcaaactcccagaatgaaagtccttaaatagttctaaaaggtcaaatttaatgacattccagaaaacatggtaaaactcagcaggaaatccatctggacccggagctttgttatgttccatctggaaaatagcatccttaacctcattttcagaaaattctttagttaaggcttcattctctaaatatgaaacttgaggaatgtcagcaacataattctcatcaaactgaaggtcagactcatcaggagggccaaaaagacctttataataagtggtaatatgcgactttaaattggcatcaccccttattaaatgatcaccctcctgtagttgataaattctagttttcctatgttttccatttgccactaaatgaaaatactttgtattagagtcaccctccaaaatatccttagtcttagcccgctgataccatttaatttcttcttcccttagaatgacagataacctactcctgaaaaaccatctaatatcaacttcctcttgagacaggagaacagtctctgcctttttatccagtgcctccaacttatctaaaatctgctttttctcttttttgtataaaccgctggtatgtttagcccatcccctaagatgctgtcttaggcggcgaattttcgcttgccaacgctccataggagtattgccctcatcaaccccagaccaaacttcttttaccatatcaacaaatccatcacgtaacagccaaccaagttcaaacttaaaactatgttgagcgttactaaaagaggaagattttgtatttaggagcaaaggagtatggtctgaaatatctctatcgagagcaacaacagaggataaagggtatttttgctcccattccgtggacactaaaactctatccagtttctcataggttgggtgtgccaaattatttgcccaagtaaaattcctaccagtcatttgtatctccctaaggcacaactcatcaataatagcattaaacaagaagggccatctatcatcataattatcattatttttttcattaggactacgaataatgttaaaatcaccaccaataagaattggtaaggtctcatgactgcacatgttaactaattatgcaaggaattggtccttaaactcattttgtgcaggtccatacaccaacactaaggcccacttaaaattatcagctttatttcgcaaatgaaacttaatgtaaaaatccccctcatcaatcaaaccaatgtcagaatttaataaattaatacccaacagaagaccactagatctgcctctaggaggtttacaatgccacaaaaaatctttaccagcacaaagattattaagagcagctgtagaaaattctttcttaacagtctcagataaagcaataaaatcaagttgatgttctttagttaaatcagaaacaaacttatgttttttcgggtccttgaacccatcacaattccaaaagattcctttcatttaaaactaattttattattcttcttcttctttttacccttcttaccattagaaatactattagaagaaggtaccatggaatccaaagtggactgaatattaccactattcccacttaaatccatcacctcctccataatttcaccacataaatgttgtagtagagtattatcatcgaactgatcgtctaactcaccttcaacaattacatcaggaatttggttaacagaggaactaatctattcactcaacctatttttctctacacactttaaatcttctataacattattgagaataacatttttatttgaagtaatcacacctagattattaagggaagcagaaatttgatcatttgtaaattgtaaaaaagaaacattaacatccatattacctttagcatggggtttctccaagttcttttccgccttcaacctttcagctctttcaaggacaagctgatcactgtcagaagctctcctctggcttttcctggatggagaaattaacgcctcgggaatagcagagattttttcaaccagattttcttgctcaaccaacacggtctcctcatccaacccgtcaaaatcttcgtcagacgcagtcaaaccttctgactacggtatcaaactcaactgagaagaggtaaaagaaggaccacccctctcagtaagattactatcagtagccatactcacatcagagacacccggtccagacttatttcccatgtccttctcattttccccatcgtcatttctcttcccatcaccatccccaaaattatccatatccaaaggaacaggatccccagcaccaatatctgactccactttaaaagacagctaatacaaatgatcaccaatggccacatcaacaacatcagggattagagatgggtcaaggaccaaaacttgtaaacgagctatctcataccttctagtaaataacatatcaataactttagtaatcccaagaatagaaccaactgcacaaataattaaatattccctcaactcagaaggaagccccttacactgaacccaaacttttggaatgacatatttcacctcattcccaacacctctttatatgatctccatctcagcctcaccaactttagtgtgcacctttccccattccaccatgcgattcagctcagcagcagaaggaaagatagtacgaaaagtgttatcaccattgtcatgtaccacccacctccatttaccaggaattaacctctccaattcagatacaacagccttaactgtcatctgaccattagatattttaaccaaggccgccctagggtcatgcctaatcctttgtccagctgggaggggaatatgaaaaaaactcaaaccatcacccccataaccacataactgagcagtcaagaatatgataataagttctttcttaattagtatcctacatttttatacgttaaattaaatataaacagtatgaaagaggatgaatcatgagtaagggatggttgtcatgttctctcgtgaatttactacttcctccgtcctaatatataaagcacaatcaccactaaaatgaatttagaaaggggcgagcaagttcgagcgtgacaatgtactttgtttgcggcgttcgaccagcacggcgatggcaaaatctccgtggcggacaggtacaatatttttaattatccaaatagttcagttgaaaagaatttaaagctaggtactgcaggtaccataggccaatagaaagtcacgggttgctatctctttattatttgcagtataattggtgtggtgttgtagttgtggttttcgctcaattttctctgattaactaggcactataaggtttagtcatgttttctttttaaaatggaataccttcttcttaatataaaacgtcagcaatggcctgaccgttcgaaaaaaaattatttgcagtatatatatttagatcacgtcgaaaccaagtagtgaactgtttacttttgtgtatggaattatcagcagacaacaggcaaggagtgaactgagcaaatttaatcttgtatgtacttcctccgtttcataatgtaaattattctagcattgtccatattcatatagatgttaataaatctaaacatatatgtctgcctagactcattaatatctatatgaatgtggacaatgttagaaagtcttacattatgaaatggagggagtatatgttatttaaaacacactctggcctcgcctgtatggtggtagctaggcaagtacttataaattaaattaaagcaaccactcactagtacatgttggatcatacatatttgtagtttggtatagagataaaccacttgatctctgtctaattgtagttgtactttcaaaggagtttctttttgttatttagcttaattatcgatttacaggaaatcaatgccatttaaagggtcaaatacttcaacctttcagccaactgttttaccataaggctctgtacatgtcataattaatccaaaaatcctatcggtcgagtgcccgacggattaggaaaatatcgggcgctcttccaactacccccacccatttccgtgactctctctcgtttctctcgctctctcttctatctctcgtttctctcgtcgcagtgctcgaaccgcttgagcatggcgagcagcatcgccttgaggagatgcgacagcaccctgtggccggcccccgtgcctcctccggcgacgccgccgaacgccgccacctccccaagccggcagccgccgccaattgctcctcctctgcgacggcgacgccgccgaatgccgccacctccccgagcaagcggccaccgtggcagaggccacagccaccctcgcagcgcgacgcccctgccaccgacgtcggcgacggtctgacgaagctccgcggcgtcgacgacggcggctatatggatgtggtggagctcagcatggcatggacgcagatgtggttgctaaccataagagtggtggaagaggtagatctaggttttcctcttgaatttgttatgtttcaatccatgtaccgtgatgttttatcagttaaatttgaaacgttgcagtgggtttttcgatggtgtttcatctttttttggatgtacttggatttgtttcatgtttcggtacattcggaaccgttgttttatacgttgtagaaaaatgtttcattgtgtgatttgattgtgtttcacaattttcagcactgaaatatttttaatttgatggtgtttcattcttttcctcgatgtattcggatttgtttcatgtttcaatatattcaaaaccgttgttttatacgttatagcaaaatattttataatgtgatttgattgtgtttcattctacccgatttgtatgcgcttcctaattaatctcaacaaggtgtgggcaaatagtttttggacatatgaatttaattaatttctggctttctggagtacattttatttctgataagctgaacttccacttgagattgcattgcgcatgcactgagccatctatccatgcttggacctgtactgattggaaaagttttttttttgtttgaacaagttgtaatcttataattagttctgatttctgaattaacttttatctcctcgcattactgccatagaaagaacatacagaagaaatagattgccctgatgctgtgctgcttgtttcagccatagaaacagaaatacgacattgtcttatttcttcccctgtttcctctcaaaaatgtttatattgtagaaaagtgaatttttatcattcttaagaaggtaccaacatataccattcaaatttaaccgttgatttgctagatacacaatgggccaagagtaaaaatagcgatgctcggtatctttctctgttccttgcggcagacgtgggaacgggatgagcggataggaggctacccaggtacctacaggtgcgttatggcaacgcaagaacgagtatagagtgattaattgacttttaattattacaaacttaaaaaatagattaatctgatattttagaacaactttcatatagagtttctttcctacatgtgagattagattgatcaaggtgtaggatgccttgcaaggggaactcacatgacggcacacaatttgagtttaatgctttgatctgaaaaggggaggaattgggaggagggtgaaaggaaataatgcctaattcaaagaacgaaactctcatgaaacgatattatttacattagaccaaaatttttgggtaattttaccatccttgagaaggtatctagatgtatcatattttctagtataaaatttggtacctctagataaccttaaggtaaggtattttctcaagtatcgtaaaattcctcaattttttaccttgtttttagttcatcaataccaagctgccaattcagcttgtagctggtagcatacaaccatttacgtttaattcagcaaaccccacaacacaaatcgtagcagcaagaagggccggcggaaaaaagaacaattcaaggtgtccgccacggaagagatcagccagagattgagggcggcggggatcagctcggtactgaaccagcagcgggaggagcggagcaggcggagggaagttgagctggtccggccactgctgcatctgccatgctcagctcgtcactgtggccatctcctcgtcgctcttgttgcctggccgcttgcaaactcgaggaggcctcccagccgccgccctcaaccagatctcggcgtggtgaggtgcgaagaggaagggaatgggctgcccaggcggcgccgctaactacgagcggagtagacttgtcaaaggagattcaacgcaaaaaatacaattttacccctcaattaactcatccatgcggagtacctggttgacgcgttggaggcggtacctctcaaccgtttgattctagtatctacggcttgtatttggtattttccttaccttaaggatggtaaaatttctcaacagaaaataccttaccttaaggaccttgttgatcatcttgagaggagattttgcaactctttacttggtgttgtattgctttaaaatataaatgcttaatttgctcatcaggtaaagttggtaatttactctatatattgtgtcccgccttctccgccgtcccctccgcggcctccttctctgctttccgcattgtccctgccatggccactacggtggcctttcctgccatggccaccgtcgcccctgccacggccactgtccctgccgcagccaccgataccatgggggccaccgtccccttcaggcaatggcggagctacgtataatctgtggggtcagctgacatcacaggtttttgcaaaatagctcaaaaactattgatatttgtgttgcaacaataaaaaacttaagaattttacagcttgaccccataggtttaagcagctggctccggggccaccctggccgctaataccatcggggccgccgtcaccagcatgtggtatgcgtacgccgtggaagtacacttctgcaccgacatacactacttcgccaccgtacccaccgacgccgcctggtctgagggcgtcaccgtgtggcggccgcggtggccgtggcggacgccgaggcacccaccaatacctctacatccgccggcgcctccacggtcgttgcggccaccacagccgctgcgaccagctctcctggttggcagggctcgccgggttggccgtccaccggaaactctcctccgaagttggcggccatggctgctacggttgatcgattggggcgagttgggtgaggaggtgagatattccgatgcatgggagggttgggggtatgtagcaggtatcgtatttatgggatctccttcttttttttttgaacaactcgcacgagacggtgcgaggtaatattgatagagcaggaaaaaattacaaaattacaaccctggagggtcgtaaccaggaaaaaggaaaaaaaaaaccaccacccacacatcgacatcgccaacacaccaacccaggagaaggctagcaccggaacggccgccgctaagcgtgaccgaccgccactagaccaacaaagggacacagacgagatcgcccccctaggggatgccaaaacgacgtcttcaagaagagaagcgacagaaaaccgccgccgccatccgtcgaagcttaaaggagccaagactgggttttcgcccggcaaccacccttgaggggtaagacagcacgacaacgccctcagaatcgttgtcggtccggccgaggccagactaggttttcacccgccgctcaccacttgtgaaaccacggctgatacaccgatgctccaccaccacacaagctctgccgacatgtggaacccctgcaccggcgtcccccgccggccagccttcgtgcgccgaagaccgcgccactcccactggcagctcctcctcacacctaggtcgcctcctccaccgccggccgcgccactcacgccaaaccggcctcctccaccggatgcgcctctcgcgccattccagcctccctccatcggccgcgcctctcgcgccaagccggcctccatttccgccgcccgcgcctctcgcgccgagccggcctccactgccatcggctgcgcctctctgcgccaagccggtctccgacccctccaccaaacgacaccacgccggccaaaagcagccgtctgccacgccctcggctagccatccgagtccgccatgcctccggtgaccgcagacacggtcaccgccaccgcagccgttgctgccgaacgcccagccacctcgctagcaacccgcatccgccgacgtcgccaccgtccacagccacggccgccgtcgccactgccatcgatgccagcctccgcctccgcaaaccgttgcgccgtcgtcctccgccaccaagcagccaactcgacgccaccgttgccagccgacgacgctgccaactgccacgagcaccacggcgggcacgattgtcgccgccgtcaccagcagccgtctggccggtcagcctccgctgcgtgccggccgggctgctcctccgagccgcgttgccgccgccgccgcgagctgttccgccgagtcgcgcccccgctgccgtgagctcgaggtcgcgccgccgtcgccgcaagcacgaggtcgcccgccgtcttgccgcgccgccgtcgtcgagagctcgaggccgcccgccgtcgccgcgagctcgggccgcccgccgacttgccgcatcgccgtcgccgcgagctcgaggccgcccgccgtcttgccgggccgccgccgcccctctacagatctggccggcggggggccagatcctccatcggggaggccggatccgcgtccggcgcgaccggattcggccccgcggccgctccggccgccgccttccgccgtgcgtgcgtcgcgccgcctcccacgccgaggggttgctccgccgccggcacgttttccccgccgccgccttcccggccggccgcacggtttccggcggcgggctccggcggcggcgaggtggctggaggcgttgggagggggcggcgcgggcggctagggtttcgctcccgagccgctcgcgtgagagcggcgcgagagcttggggaaaaaaatttaggaactccgtggcggctggtgaccgacacagtgctgccaacctgatctccttcttttggtaatcagtccaatctttccttaccttagtgtagtgataatgatatgatatgtttccaaatggaggggatcaccagctcagtcttcatttcctttccgaattaaggctgatgctccatctccgcgcacctctgcaattcgaaacacgtggaaaatacgccttcgaaattggcttacgcacttctagccgatctctaaagaatatgctctcatttttaactttcaagtttcaattctgtactggaaatcatgtatatatcttgcgcatgttaattttaaaagtaagagcaattttaaagtccttaggaggtaccacgaagtatcaaaaatttagtgtaaaatttagtacgttatagtaattaaatactaagagataccaaaattacaatagaaaaagtggcccctcatggtattttctcaaggagtataaaattactctaaaagtaaactgtgcaaaaatcttctttcagaaccagaatgaacatgctgacacgcataaggttcaggctgaagcatagcccgccataattcccgaagtaaaaaaggatcatgtttctttgtcactttatatgcgtgtcaccatgttcattttgttttgttttttttttaaaacgtaagagtcttgcttgtcaatatattagtataaaaaaaagacttctacacaaccgcgacccgttgacgtggtcatggggttacaggggggagacaaaaaaaacattggactgactaggagaaaaccgggcccggaatgttcattctagttgaggaagaagatttttgcaaaacccgtattacagtatggttacggaaaagatcacagaggtagagtttgagaaaagaaaacctacacgctaccgggctcatccacgtcgttgaacaactttgttgcggcatttccaaatgttccagagaatacaaagcagcattgagtgtagtacgacttgagcgtatcctgaaggtcttttttatacgattatacggtaggcatacacccactaaaaaatactcacaaatctgcaaatacgtccctaaaacacgctcaaagagaggtccgtggcatacattttggaagcacgtgtactgaggcctgggcttaaaggcatctacaaggcccagtgccagccagagcacagctgcagcagaatccttcaaaaatccagcccaatccagcccaggaatttgttcacctgggcctgatcaccatacaaaaatcgaataaagcaaactgaatctctctgctgagccagcttgccagatcacctacctaccaattcgaacaaaagcatcccattatttgatcgatcgatcgatcgatcgatcaattagctcgatatccattagcaagctgttgttgcatcgatccatggttgtatccattgattaatttgattagctgcaagggcaagaacatcatatctgctagctagcttgtcgtcgcaatcaacgatggactacttcaacgggacggacgcgcactgcggcggcgccgtgggcgccatgggctcctacgtctacaacctcacctcctcctacgccgaccagaagaacgaggtcaacatcgtcgccacctccctcgccatgctcctcctcgccgcgctcctcctcgccttcgacctcctcgccggcgccgccacgctgcgccccgccgcgcgcctcgtcctctccgtctccctcgccctcttcctccccgtcacctcctacctcttctccgaggccaagaacgacgtccccggcgccgccgccgccgacgccgagctgcccctgcgtgcgcgcctcattcttgcgtggatgctgctcgtcgagctgctccgcaagaaggtggaggccacggtcgccggcactaagggcgccagtggcggcggccccaccagccgtgccggccgtgtcgccttcctcggctacctcgtcttcttcaacgtccacggcgccggccggaaggcggtgttcggcgtgctctgggtgttcgccgctgccaagctggtgcagcgcgtcgccatcggtgagttcgtcaagcgctccttcgccttcggcaagaacccgcagctcctcgccggctacatggcgcagacgctggagcagcaggagcggcgcccgcggcgagacgacgagctcatgacgagctgcaagtacgccgtcatgggagaggagaacctggagagggaggccggcccgaacggctacctcgtcgacctgaacaagacagtcgccggcgatgacaacgccgacgacgccgtcgtcgtcaccgtgggcagggtgtggtcgctcgccgagagtgaccagctgctggtgtccaacccgaagctgaagcggctctgcctctcgtacgctctcttcaagctgcttcgccgcgagttcgaggagacgccgttgaccgccgcggaggccgccgactgccgtgagctcatcttccgaggcctgtgcaacgacggcggcgccgccgccgacagggcggcgacgctgttccaggtgttcgacgacgagctcgggttcgtgaccgagtactaccactccgtcctccccgtgatgctggcgagccccttcttcctcctcgtcaactacatcgtcttccccgtcctcgtgctcggcctctgcctcatgaccgtcgtgctctgcggcaacggcgacatcgccttcatcgccggcagcatcaagagggacaactacgccgtgtcgttcggcttgctgaggatgacgaggtgcctcctgagcagagtattccggtcgccgtcggcgctcttctcctccattgacctctccatcacgttcctcctcttcctcaccatcctctacgaggaggcgtgggagctcgccgtcttcctcctctccaactggctcaccgtctccatggtctgcgactacgccgtcaagccgccgagccggctccgccgctccgccatccgcggcgtccagtgggtgacgaacaggatgagccgccgcaattacctccgtgtcaagcagtactccgtgctctggttctgcaggctcccgctgaagctgccggcggcggccgtgccggaggaggcgaagcaatccatcgtggagtacctcgcggcgtacgacggcgccgtcgccccgctcagcgccggcaggtcggcggtggcggcgaggaacaccctgtgcaacgcgtcccggctgatctcgtcggcgtgcgagagcggcagcgtcgccgaggttatactcacatggcacatcgccaccagcctcctggaggtgaggtgcccgccgcacgcggaggaggaggcggcggcggcggcgaggtcgagcacggtggcgacgcggctgtcccgctactgcgcctacctggtggcgttccgccgggagatgctccccgacgacgtcgactgcacggcgcgggtgtacggcaccatgaccacggagctcaagcgggagctgggtctcaagggctactacttctcgacggacgccacccggtacgggaagatgatggctatcgccggcggtcaagaagacgacgaggcggcggcggaggagacgacggtggtgcgcaagggggcgaggctggggaaggcgctgatggacgaggcggccggcggcgacgaggcggcggtgtggaagctggtggccgacgtgtggacggagatcgtcgtgtacgtggcgccggcgagggacgccgagcaggtgagggcgcacggcgaggcgctggcgcgcggcggcgagttcgtcaccgtgctctgggcgctcgtcacgcacaccggcattgcccgccccgccgccgcgtcggtgtgatcgcggcatcgatcggatggtgattgaggatactgatggttggagtggtacagtaaagattggtttgcatgcatggattggctaatttttggattgattgattgttaatcacttcattatgattaatttgcatcccaatggattggtgtaacatcatatatctgtgtgttgatgcatgtgatatatacatacatacatgatgtgtgttactgtgttttttttcatgtaaagatcatgttgtgtatgttccgaaaagccatcaaaatgtttgaaaaaaaaacaagataagccaatatttgatatatgctcaacaaacatataaatttaaatttaacttatacacattattcacagttttttgtacttgtattgtaggttgaatttgaatttgcatgtttgtgtaatgaaatatatctatcattctatttttaaaaaaaaaacaaatagtgactatttaataacctagaaaaatgagaggatactctaagggatgaaatgagttttcccatgttatatgttgatgatacgtacatataaatgcgtgtgttttaatggaattgatttacatttgtacccatggaatggagttactagtcacactacaattcgtacaaatgtagacattacacatcatcgatcaacccatgcattacaccaaacatgttattgatgttatacatattaaaatttcaatcatatttgcaaaatatgaggtagcgtcacaaacggttcagaccagacctcgcaatacaccaatcacacaacccaaaatcaaaccatatgcacacgcatttacaacacaaacacatgaaatcagccatggcaatcaatgggcgtagacgaagcggcggcggcggcgctcttgttgtcggcgacgacgaagtagacgtcgctgcaggacaccctgacgttgtacggcctggtgtacacgacgccggcgaccttgaaccgcacctgagccgccaccgctacgttgaacggcccggttctcctcccttcgccggcgacgatctcctgcacaaacctgtcgtccagcgtccgcgccgtcacctccacggccgtcgcgttgcgcggcggctgcaggagcagcgccgcctcgtcggcggcggcgaggccgacgaggaggaggctggtgttggtctcgatgtagtcggtggtgccgtaccagagcatgacgtccagcgcctcgtactccacggcggcgcgcccgctcgggttgccggccaccagggtcaggttgaggaacgccgccttgttctcgtcggtggcgccgctcctcgcgtcggcgacggagaaggcgagcggcggcgggcggaggacgaaggaggcggcgatgacgagggcggtggcggcgatggcgccgacgagggcgccgaggagacaccgcctcggatgaccacggatcttggtcatggcgcccatcttgacacagctagttcttgctagctagctacctaatgtgcaagcgacgttgcatgcaactagaattaaaaggcgccattgaaccagcagctgatcacagcctccatcagttcagttgcatggattcgatcgaataaagttaggcaattgcattatttctgaattctgatcggcagcaggaacgctaatatgcatgtcagtaggaattatattcgaataaacttattattagctgttcgtataactaaaattttctagtaggacaatgcatgagacagcttaatgagcaatttttgtatctcagctgcgacatgtgagcagaataggttctctttttttttcgccgggtcggagcagaataggttcttgcagctgcagaaactagtgattagcagattgcattagctagtgagggtgaatgtcaattcgatcagcagtgacgatccacacaggcatatataatccatgcattatatccatccgtgtgatgagcagaataagttcttccccctacggacggatcggagatcaaacatttaataagatgcttgaatgaattacgtaccatacaggccttgttcggttaatcccaatgaaaaaaagattggagaggatttattctacatctattatggtggagaattatttcccttcaattctcttcaatcccctccaaaccaaataacgtctcaatggtgaatagtgtaatggcatcaacatcgcacatgatacatataaagggaaaacacaattcatcctaggggatatcccctatttttgcatgttacttaaaatgtcataaaaaatttgaaaaaaaattagtaggatatatcaatatgtgatatatcacttcacaaacatgcaaattcaaattcaacttatacaagtagaaacaaaaataacaaatttgacaatgaatagaacgcgtaattcacagtcaaatttgttatttttttgaattgtataagttgaattttaactcgcatatttgcgaaaagatatattatatattgatctattttaacatttttttaaaaaaaattttgataacattttgaacgccatatatagaatgagaggatatctcatcgagggataaaaatccacttcccatataaagttgaaatgactgatcaatgacaattactaccaaaggaaagagccccaacgtttgtcggagaaatataaacgagattcacattctatcagctgctcggcgcattataaggtgtcaaagcacgaactggcgaaggaacttttgtactaccctgaaggcctgaaccaatggaaatttggttctcatctttgactactcctttcttttcccgtgcctaaatatgaatttttaattcaaatgccatttaggtattcaaaccatccctctcaaataaatcatgaaaattccgaagtgtcactattcatctaggccgttaatttatccccttctttctccccaagaagcccaacccctccttcccctatgctcctttcctttcgtctaccgagtcataactccttatcctttgattgctctccatcttgagttgccttcctgattcatcccgcgggcgctttgcccagtaggccatatttgacgcaaccgagccacctttatgggagtggattttgatcactcgaggggatgtcccctcattattgcttaccacttaaatagttatgaaattttttaaaaaaattaagaatatgtattaatatgtgatatatcactccacaaacatgcaatttcaaattcaacttcacatctcgtaacgaaaaaacaaatttgactgtaaatatgcgttaactagctgttgtttactttgtttttttcgttacgagatatagatgttgaatttgaacttgcatatttatagagtgatatatgatctcatgttaatacatcttctcaattttttcataattatttaagtgacatgtaaataatcgaggcgacatcctctctagagatgaaaatagtctcccacctttctgcaaccagtctatatatctgcctcgtcatgaagtcataatgtctctcaccgtcatcttgcgccaacaactttgaagaatttccccttccacctcagtgaaaacttagccacacctcggtaacgtaagtatggtacatattcagcgttacaaacattttccgaccaatggacagaataaaaatgcatggaattattaattcatgaagatcggtagtatagcagactctataaccacacatactcatgcacttacagtagtagagacattttcacaacaaatgaataaaagaaagaaagaaagagaaggggaaaataacattaaagaagagaaagctgcaggccaaacaaacacacattcacgcatccaaaagcaatcaatcgatcaagcaagcaagcaaatttacacacattagctagtgacgatggatatcgatttcgtgctgcttatcgatccggtccggtgcggatttttgttgggacgacgacgtgctggcgtcgtcttgggaaattttgagagcgatttcgcggaggcggcggtgtcgggtaatgccggtgtgagtcatgagagcccaaagcacggtgatgaactcgcctccctgccatagcacattcttgtgcgccatgatagtacgctcctcgttggacggagccacgtacacgatgatctccgtccacacctccgccagaagcgtccacatcgaatcatgatcattcgtgtatttttctagcaacttgttggccaactctgcgcccttgtccacggttccctccttgttgttattcttgctgttgatgttgttgatgatggcgtcggctcgctcacggccgcacgagaagtagtagtggtaacatccgagcctgtctttgagctccattttcatggccttgaacagatcctccgccttctcatggtagtccggaaggagctccggttggaacgccaccaggtacgcgcagtatctggacagcgtcgtcgcgacggtgaaattgtcactactagtgttcttcttcttcttgttcggacagccgcagcagctcatccgcttgctgtcggactcggtgatcatcacctccggatcaggcggaggattgaggcgttccaggagaccggtggcgatgtggcatatgaggatcacctccgcgatgctgccgttctcgcacgccgtcttgagctcgtcgaagctcgctagagcagacttggtggaggcggaggcggaggcggaggcgagggagctgaggaggatggagtgcttgactgggacggggacggggacgggcttggtggagacgagcaaggtgatgagagggatgggcatggcgagggtgagcggcggccaacggaggtcgagcgcggagaattggttgatcatatcttggggatggagatggaagcccagccatgtccggacggagaggatgcagcgggcgaaagcacggaaggcggagttgtcgcagaagcgggtcttggcgacgtaggcggagagcagcgagaccgcgaaccagttggagaggaggaagacgaacaactcccacacctcctcgtagatgtagatgatgtagaggaggaaggtgacggcgaagttgatggtggcgaagaaggcggcggccgagtgatgcgcggtcaggaggaggcacatggtggtgtcgaatatgcccgaggagatggtgaagttgtccgtcttgatgctccggaacgcgtacagcacgtcgccgccgccgcagaggatgatggtcatgacgcagacgcacaggacgacgacggggaggaggaagtagttggcgacgaagaagaatggggaggccaggacgacggggacgacggagtggtagtactcgctcaggaagttgatctcgctgttcatcacctcgaacaccgccaccgcgtcgccgctcttgtagaggccgttgaagatgacgtcgcggcactcgctggtctccgcgctgctcatctccggctccggcaccggcagctgctccagccttcgtcgcagcagtttggatagcgcgaaagagaggcacagcctcttgagctccgccttctcgtcgccaccattatttcccgttccaggtagcccttgctccacccagattttgccgacggtgacgagggacgacttgctgtcctccttcaacttgtagccgtcggcggtggcttcaacacgcgcatcttcctctcccgtcacgatgtacctgcaaccctttagcatggcgtcgccttgggccggcagcgacggcgaggtggacatcatgtaggaggtgataatccaagggttcttgccgcaggcgtaggagcgtttgccgacctcggtgaaggcgatccgttgcaccaccttggtggcgcagagaacccagaggacgccgaacacggccttccggccggcgctgcggatgttgacgaagacgaggctgccgagccagacgacacggccggcacggtggatggtgcccgagtagcctttcatggcgatctcgtccaccttcttgcggatgagctcgacgaggagcatccaggtgaggatgacccctgccatgaacgggaggtccgtcgacgatgcgcggccgatgccgatgacggtggtgacctggtcgagctccttggccgtgttcttggcctcggataagaggtaggacatgacgaggaggaagagggagagcagggaggtgaagaggaggcgcacacgcgggctgagtatggcgcccacgttggagaggccgccgaagaggttgaggatgaagaagaatccggcgaggacgaacatgagcacggaggcggtcaccatgctgccctcgctgctcgcgtcggcataggtgaagttgccggcgacgctgcttgttccgattgaggatgagttgcagtaataattgctcatctcgatccctcccttccgtttattacttcattcaattcaattcattccagctactagcttgccttatataggagtattatactagtagtgcatctcgactacttcctccgttccatggctcctaatctaaaaattcttcagcttaatttgacctgcttttcaagtttatgaaaaataaatgtaacgagaataaatatattctcaatacggtggattttaataaaactagcttgttttcataaatgtttatgcactttttctataaacttctttaaaaagtcagaaatttcacgcagaagaaaaactaaaacacattagttatagatttttatttaatcacattagaaacacatacactcttacacatctgtgcacaatcacccatatgagagcacacatgtgcttcctatccctacgattgcatccgttttatattataatgttttgattttttttctagttaaacttttttttaagtttgaccaagtttataaaaaaaacatatagcaatatttcaacacaaaacaaatatactatcaaaatatattaaatattagttttaatgaaactagtttgttgttgtacatgttgcaaaattttcctataaacatggtcaaactagaaaaaagttaaaacgacttataatataaaatgaatggttatcttatgaacgcacacatgcacactctacttttatgatcacctccgaagactagtaccttaagaacgcacacatgcacgctctactttacaaacacttccagagactagtccggcgtattttgaaattgacgaagtcactacggacgacacaatatcaacaggtatgtcagctaccactcgaaaaataactagccgtaaatacgagtattacgtaaaatctgaaacttgaacctggatgagcatattataccacaaggtaccttactagctaagctacgcccagtttgctcttagttataaattgtgatataataaaacaaataaatgcactatgaatacaaaatttatggtggattttaatttgatattacacatgcatgtacatttttttataaactttatcacgacagtccaagtttccatcttctacttcatcctttttatgagcacgattcctaaattgctaaatgatgtatttttgaaaaaaaaatctattagaaaatttctgtgaaaaatcatatcatttttttatgttttttatagctactccatccattccgaaatataagtcacaaccacccttaactcaaagaccaagaaataattgttatcacctcatagtttggattaccctaataaataaaatgcatgcacccagtaaaattagagatgttgatggtggaggatttaaatagtaacattttagtggaaaagatgtgctagttaatgacatgcatgcatacacgtcttatattatgaaataagtttaaaaagtagttgtgccttatattatgaaatggatggagtaatacttaattaatcatgcgctaataaaacaccctattttccatgcctgacaaattaaaaaggatccaaaaccaacgtatattggctgcgttctaaggtcaaggttcccaacttctctcccttattttccgcgcgcacgtttttcaaacggttaaacggtgcatttttacaaaaagtttctatacgaaagttgtttaaaaaattcatattgatccatttttttaaaaaaattagctaatagttaattaatcacgcgctaatggactgcgccgttttccgtgtgggagggtagggttcccaacaagtgggaacgaacatagcgtgtggttgtggttgtgaacttgtgataattatttgaaggtagaaatgactacttaactgttataatgttaaaagtcgttggggtacatattctaagaaattaaaatttatatatataatagttttgtttttttaaaatcgtttagtagattggaaagcatacgcgcattcttctattaagttaaaaagaatataactatgcatgcgctgcaaattaaagaaaggttgcttcattcttttttatacaatctaggtgcgtatacaacggcccctgcatgtgaaactcgttcactttaataatgatgaacagaagtagtaaagcaaaaaagagacgcacatatataacgtcgcgcacgttcacccagctaataaggaggacatgaataggattccgacgaccaatctttggaaaataaaagaaaaaaaaaggaaaaggaaataaaataaaaggaaaaagagattaaggaataaattccgaccaatctttggaaaagaaaagaaaaaaaaaagaaaaggaaataaaataaaagaaaaaagagattaaggaataaataccaaagattgaaaccaaaaaagctggtagctttcacgtgttgaagatactgtatgagctagcaaaacaacgatgatatgatgtccgtcggcaactcggaaacctggctagttaagctctttaaatatatattctcctctccaagaaacgtgagctacccactactttaacaattgcattctttatatttttattctaactccattccatcctatctttatctaatagtaccggacttgctatacaattaactcttagattcctaactcacatacgtaattatattatgtatataacagatattaaaagaatgatgatatttaatatacaactctttttcttctgtaacgtatttttttattatactagcaaacaagcccgtgcattgcaacgggtgaaaaaaacataatgataatatacggctttcatgcataaccatatcgatgacaatcagaaaatcagaaaattggaacatcttaatggcccaacctcaatgatgacaaccttaccgatgtttgctttacctaaaataattggattattcatatgacaacatgcatataatctaaaatattcttttaatctcattcttgcaaccaatcaaatcctacaccgcctcgcatgttcaagtctatacaaaatagagtcactatgcactcttctctaaataacaatagaaatattttttctcgcatgatttttatacggactacggaaacctttttttccagcgcgttttcttttgcgctttttttgatattttttcctcgcgcgtttttttaaaccgtttttattttcccgtgcattttttctttttaatatacgatggaaatttctcattttaaataggtagattagattagattagagatagagaagagatatgtacggactactaaaacaacaaatagaaattagactttttttgccgcgcttttttctgccctttttattttttttttctcgtgcgttttttttatgaacggtttttttcgccactttcttatagagtcagatctttctagattttttttggttttttttatttttttacggattttgtttttgtttttcgctctataggaatcggacttttttttcattgtgggaatcggatctacgtttctttttttgtttttttcaaggaaacggacttttttttattctgttttaggtgggaatcggattttttttctgaatctacgtttctttttttttgccaggtatcggactttttttttctgttttttcccgttttaggtgggaatcgattctattttttgctagggaatcggattttttaggttgttttttcgctttttttttattttaacggacgatgaaaacatgttaaattttttaagtagtagagatgtaagatttacacatgcagcgcacaccacactaaacattcaagagtgcgcctactaacatacgctaaaaaacaaaaaccaaagactactggtacatagggttgaaagtgattcggataattttcgtccgaacggaccaattttcggattcagataatttcggtcgaaaatatctggaaatttttgaattcggaaacgaattcggattatttttttcagaaatgaaaacgaatactgtagaggtgatatccgttggaatcggaattcggtcggaaactatccactattttccttcggatatccaagctatacctcagaccttatagctatccagcccagccagcccaacccaaggaggcaaggaggcagcgcagcccaagtacatgatgtaaccctagctgcttgctctgctaagttgatattctggtttgggtattcctccgtattcaatttcggttggatggctatgtgtcacgcccgagctagccccgagcggaaccagcccgtgacgctccaaattaacctgttaatcgataccagtcccaggaaacagtgctggtatcacaggaagacagaatatcacagccacagaggtctctttattatagagtaggattacagtcatgttgggctgtggacagaccccgagctcacaactgcactacaaaagaggaaagcggaagccaggacttggaccaatcatcacaggcgcgacttgggaactagatcgaaaccctaaaactcatcgaagccgacttgctcctggaagaactcctcatccgcgggatccacttcatcttcttcggcaactgggggggattatttatatagagcaagggtgagtacaggagtactcagcaagtcatgggaattaagtgtttaatgcaggcttcaagggagaggctgttgtttttgcaattgattttagttaaactcctttctgaaacaactaggtgagtgcttctcaaacaacacggatgagacagtgtgtctcgtccggtcggagtatgtgcaatgtatcagtctttgattttctcaaggttggcacccggccaacagctttcaaacggccacccaggcctggctgatcccaccagcggcagagttccaaacaacgaacccattccacaacagcaatttcacaaagcagtagtcaaacaaaactacgctaaggaatcaccttacatccgcccataaccgcgggcacggctgttcgaatagtttaataacctttgcagagggggcacactttacccacacgacattactaacccggatcacccagcccgtgcagaacagccacgtctggtgaccttgaggctttcatgacaaggcatttcgagagccgacacaggtttaccatatgccgacgagaggggtcccagaccaacaacaggttaggtcccagaccatcctgtgccagaaagcccaggggtcctccccgacaccaccccagcaaatccacatgtctctcgacatcaaggctcccctgattagctaattactcagccaggggtgtcccattccacccatggtcgtacttgttatatgttcggatgaaattccaaaggaaacggtccttaagtgcaagagcgggaaaccgtgctcctggcatgtccctcggtctgcgattttggaaattcatttagttcgcaagcaccgacccaggcgtcgggttttccaagtcttttgtaaaacccaagttttacccatcgttggatattttaaatttgaggggaggcctccgatgtgcatgcccgaaggcccgtacatcgaagtaccacatttgacaaaggagttttaagtattcgatcattaaggagggtgattgcaacaattaggattggggggggcaggctaccttgcaagccgtagccgaattactcgtgttaatcctaatcatgcaatatttgcggaaaagaaatacttagatttaaattataggtgcaagatgatcaaaggtgacttgccttgctcgagatcttgagcttgatcatcgaaatcctcgcactgcgggtcttcgggctccgaagctatacgcgaacgagacgactcaacaaacggtgaaaataaggccctattattgacctctaagtgtgccattagatagaactcgggatttgagaaattttggaagttgaacggagtcaaacggatgtacggttgggaagatatggaatttctaagattgaaggatttattgaaataaaggaaaaggatttattaaaatactttttgaattagaaactaaagagggaggggatttagacttcgcgggcggcttgagcgcggcccgagaggggttggcgtggctcggccatgctattgggccggccggccttgagaggcggcccaagggggctcgcggggagggtgaggggagagagaggttctagatggacgcggtccatcgtgcggggtccggggcgggcccacgagtcagggactcggtgcacgagggagggggttcacgtggcgcggtgctaaggtttcaggagggggaggtgtggcgcacgcagggttcgcggaggacggaggtgcggcgggcccacgcgcagcctcttggctctccgtgggttgcgcgcacgagcggggcaacggagggaggcggctaaccgaggtcagcccgactcggtccgaggccgagctggcaccaatgtggcgccttcgtggctgccacgtgggccggctggaggaggacgaagggaggctggccggaacggacggcggacgacggcggcgctcactggagctcgttgggacatcttcggccaaagggagacgcaccggtgtgatgataagaacgagagggatcaagccttcagctcggatgcaccggaaatggctcgacggcgaggaatcgcggcagcgcacgccggcgacggcaaaagaggggaaaggcgacgggaccacgagggaccgattcctcagagcaagagcatctacacgacctcgggattgcattcctagcaccggattgggcggagctacaccgagagaagctggcgacgagcggcggcttgcggcggcgagcggcaacggtggtgatgccacgccgggcggtgggaagggcttgggcggcgcccgcgagcttctaggggtactacgagtgctaccacgtaatctaaggggaggaggaggagcgaagagggagaacggaggagagctctaccgagacaggacagggcgctgtgacgagaggccgacggcacgttagtgatctctccggcctcgggccagggaagaggatgaagacgagcgccctgagtccccttccgcgtccacggacgcgctggctcctccggcacgcgtggcaacgaaaggcggcggcgaacagacacgggcgaggcggcaatggcgagagacgaaaaggagagagattggtttggggaggggcttgggtttatagggtggcaatgtcggttcggaaaccgaccttgggtggtcaaagagcgagctggcgctccgacgctcgcggccaaaatggcggcagagggcatgacgccggcgagggagaaaaagaaggaaagaaggagggaaaggaggcttgcctcttgccactttgggaaaagaaagaggaagagaggccggcccggcagagggagaaggagctctgcctccatctcttgaaagcatgcgcgcggtagtggcagggccgggtcgtgacgacgacgatgacggcggggcggtttggagtggagcggcgacaagggcggcagacgcgggctcaggcgcggcaggcgctgacggcggcggcgaccggccggtcggccaccacggcgcgcgcgcgcgggaagcaacggccggtgtggtgatttgagcggcgtcggcgggaagcgacagcgagagcagagagggagggagaagagagagggagagggagagagagagagagcgctcagcgctcgagtggcgcacgtgcctcgcacgtgcgggcaaggatggaggaagggggagagatgggctgagagggaatgggccgggggagaggagatcggcccacgaactcgagggaggcaaaatagactttttcgagaagatttgatttgggagggatttgagattagggtttggatttgacgatggatcggggaattgagatctggaatggcacggacactagacaacatacaaagaaacaattttcgcatttaggatttttaagagatagttttcccactagacgccacgacggaacgggcgctacactatgacgaattatcataagaaactcgcagtcaagggtagtgtctcgaaacaccaggagggcattgtaaaggggtattggttgcatagttttaatactagaaagtatagactaatgatgttggtatactagaagtataggaatggattcttttcttattctttctccacttagtttagtgttagtattagtgagagtattttagttcttctgcttcgtgtcactctacccctgaattaactaacccttgtttagactctgatttataaaagtaacatataaattattagcatggttttctcttataaatcttccatcgggattaaacaaatacgataccttggaatagtctgcatagttgttacaatggtatatccgtacgcttgtggatataatctgtaaccataatatactacggatatttctacgctattgctgggaattatattcatagtaatgtcgttaagaaatacccacgctctccttcactctcacattggatagagatacaacggatatttctgcgctattgctgagatctatattccttattttaatttctaatttctattatttctaaattgtatttctatatgaactctaaacttatgtttcaatatttttttaattacgaatttcagttattgttaaattgcatttctatatgcactctatattcttcttctaatattccttattttttttaatttcgaattttcgttatttctaaattgaatttctatatcgactttaacctctacttttaattttcttattttttttaattctgaattttcattagttctattgtataccggtatggactcttgtctagcttctcttcctatatttttttatttttaatttcgaatttcagctattttaaaattatatttactctttttttttctttttctatgctatgagatctaacgtggaggcttattttttattcctttaataagttaatgtatagattaaagccgtcgttccatctcctccgaccgcaagcatttgtggatacccatccgctggactccttgctcctggccaattaaacgaacatgctgtactgttcatccgtccatcgtgctcaccgcgcgtgtccgcggttacaacccggctttgggtgcggcggcaaccaacacgccaagtttaattatctagctaataattgaatcagctgtaggtatgtagacttaggggtgggcattcggttagactgagaaattcggttcggttttttggtctttttaaaaattcggtcttcagaatctcaagatcgattggtctccaacaaaactcaagactgagaaaatcggtcttcggttagtttggttcagtctcgcggtcatagaccgaactaaccgtgacaaaagtttaacagcaaaaaaaatggtacaagatcgatgaatcaagcaattaggtcatacataacacactacaaattgatgtcaccagcaaatcgagcactatttggataaaaaagaagcaaatcgaacacgatttataaaagaaatcgg

SEQ ID NO: 4525 - DNA, 33791 bp, Oryza sativa
tccaggcggaggcccccgcggccggagcgggtcatggacaactggaagcgcttggtccgcgccgccctcaagcaccagcaccgcgccccctccgccaccgcttcttccgccgcgggatcggcctcgcctccgccgtgcccccctcgctcggcaagaccaccaacatcgagcacatcctgcaggctgccgacgacatcgaggatgacgaccccaacgtcgcccggatccgtaacttactttacccctcctcactcatccacctttgcttcctcttcctcttcctcttcccacccccctaatttcgggggtttagggtttccgctgctctactttttaccacttgttgttgttgatgatgatcatttcatctccttgcactccagtttgtgagcaagcctacaccatggcacagaatctcgatcccgacagcgatggccggggtgttcttcagttcaagacgggtttagcttctgtcatcaaggtatatatgcttcttcccacccgtgccactaactctctctgtcaatgccatttctgtctaacttgctcccatcgcattctacagcaaaagcttgctaagaaggatggcgcgcccatagaccgccagaatgacatccaagtcctctggaacttctatctacaatacaagagtcgccgtcgggttgatgatatgcagcgtgagcaggagaggctccgcgaatcgggaacttttagtacagagtatgccatctctccaatcgcaccacaactagttttgaccagttgatgcgccctttttttttgtttcctaacaactaacttctgcagtgcccgttgtttctgccagccatttcttaacaaccttgttcgatgaaatcgatgttgcatcattatattgctctcgtgtttacactctattgcagtattgtgctaaccatagaaagacaacttatgcacattctaataattctcatgactattttatttttaccagcatgggatctagggctgtcgagatgaaaaagatctatgctactttgagggctttgcttgatgttctggaaattctcattggacaatcaccatccgatagacttggtaggcaaattctagacgaggtaattgtgcagtcattacagaacccctactcctgttaaacccttttgttgctgctgctcgccaacacctctgaggatttttttttcatatactcactcaactagtgtttttccccctctcattttcgttttacagattaggagaataaaaagatctgatgcagccctgagaggtgaacttatgccatataatattgtaccccttgatgcaccatcatcagtggcaaatactattggttttttcccggaggtacatgttgcaatgcttgttgtccacacagcacagaccgttatcatcttgcattactttgccaaacagaaaaatatttatggtgttgtctattgtttcatgcaaatctattaggtcagggctgcaatagctgcaattcaaaactgtgaggacctgccacgatttccttctgatgcacttcaactacagctaagacacaaagatgtttttgaccttctgcaattcgtatttggcttccaggttaggaaaaatctcataccatatatttcatggcaacatttgctatgtaaccatccctttttggttacatacgtgcaattgctttttcttgttgcactgactcaatatgacaaatctaaaattagggatgtagttattgatgcattttacttatgcatgaaatttgaagtctaaattcattctacgcaaacagcaacaaaaacgagaaaattgtatgacaatgaaaaggagaaaaagacgcatgccactatttggacctacttgtaatttttccttatacattttcaaattaaaagtttaatatgcagggtgcaaagacatcctgtagactgcattgtcattttttggaagctgttatgttctttttggtgccaaaacaatagttaatttcaagggtgcacaaaaaaatctgtatgcttagcatacgggcaattcttctttagttgaccacattatgttggtttctatgagaataatttgaattgattatgcgttgagttgacatgtgacagttacaactgttactttttctgaaatcgtgcaataattttcctttaatctttgctggtgtgacatgttggagtatttagcaaattccatactaggaggcatcctctctgcagatccagtcataaatagaacctttggaaatcttgtactagcttagcagttaaaaattgattggcatgacctgtgtcctttccatgctgcatctgccagcaaatccttgttctgcagtatgcacatactacagaatatttattgttcactacgccttattctctgtaacgatcaacttcacttgattacatgctgctatagtgctatggcaatttttgattggtttcttaagccagtataccatctagcagcttatgtgaatcctgatcataatccgcttctacttttgaagattaaaatgttatggcatcttctagatgttttgtgaatttgcaattgcatcaacattcttgatttatgttggagcttgtgagcaaggtttgcatgtcgagtatcctattctaggcaggattgttttgtgttgactgttgacaggatatgaattacaggatcaaacctgaaacatcattattttaaaggatggccagatctggactactatttagtacacttctccctaatttagatcctgtacaacatcatgattggaatgattgcccaagattgtaggatcattacggttctactattcagaaagatagaaaccttgtgaagaactaaagattataaaacagaaataagtttggtgcaaatatgtgctttgtcataatttgtttggtgatcttatgttatttaaattatttactcgtcgatctattgtgtgagaaattgtttctttctgttttcctgcttctgtgtactggtctaatttatatcactggttactgcctttctatcgagtttctaattagattaaattgtttttccaggaagataatgttcgcaatcagcgtgagaatgttgtgcttgccttagccaatgcccaatcccggctcggcttgcttgatgtgacagagccggttagttcttcccctattctcatggagtatcatttggacttgtagtacaataagatctttcttcctactgacatgatacttcctctgctactaaatatatatagttctgcatgtaaaaaaagggagcacatgcaacaataatggtggttaccatttaatactgtctcagctttaaaaatgtcaccagccttttgcttgatcttcactttagctctactggtctaaataaatttcattggttgctgtttcccttcatagaatcaatgaaagttcaaacttgtttgtagaatagaaatataagtcagtatggctaatctattataattgcctcggtgcagcggccagatgttttatgaaagcaatgttgaaaccttaagtaatgaataaggtatagttactagtaattaacagtgcataggctgattactcttgttcctttcttttttggcctttaaattccatgtacttgcgatttttgtctataaattcttgtgatacatattattatacaatgaacattggcaatggccatggctcttgtagaaaattgatgagagggctgtgacagaagtatttttgaaagtgctggacaactacatgaaatggtgtaggtacttgggcaagcgtgttgcatggaccaggtaatttaacctctcatggttaattttctctgtgcctgttattatttcaatggatgctttctaattaatttccttttctattagccttgaagcagtcaacaagaacagaaaaatcatattggttgctctgtattttcttatttggggtgaagctgcaaatgtccgttttcttccagaatgcctatgctacattttccacaatgtgagttcctttctctcctactaatttctgccctttttcttttcatgtaattgcagatgatgacacgtagaaattatttcaacataggatccagtgttatatatatatggtctggtctgtttctgctgatgaccaaaattattaaatacagcaaacatttagatgactagttatctcagctttcgccttgtcaagttgctttttttagggttcaatcttatagtactgtgagaacacatgttggatgttgcacatttactttttctatgtcgcaaaatgataatgagcaatattgtttgtggagatcattattgactgtacttttctacttttctgttgagcgcttttccttcaggaaacttccatgtttcttgataatgggatattgcactactacattcagggaagcttgctttatgctaaaaaaggatagtcaaataagttttgtcgataattcctcatttaggcaaatattagatcatgaatttcttttaggttaaagtccatttgtaaccttaaactgtgctcaaagtccatttctcatcttgcataacaccctaaaccatattttatcgtggttctaattgatatgatagtggtttttcgctagcatgaacttcagttaagtattatgattttcgacctaattaagtaccatttgcatcaacaaaatatgcagctaggaaaaccacctccatttcaaacaaaaccactaaaaaatatgtcccaaggtgtttcttgtcccattaagagttgaaggtgaaaaatatccagttttctagtgaaggtgaaaaatggccattggccaaagtttaaaggctataaatggactttacccttagtttttattctttggatgaacaaaacaccatgtcctaaagtaaccaactgtatatttatgccaaacttgagcttgactgttgatattagacgattcagtatatctttgatgcttggacatgggtatctcgtcacagcattgcacatttacaaggattcagaagtcacaaacatggtgacatgggtatatattttaataacatgataaaattaattagagcagatcttgtttagaacgttagcacaattccaccgtgaaaccttaagcttgggcctttgctcttcaatcagcgtacttacatctagcttccatctcctaaggataagatgggtgcagtgcgaagcaactaagttacccagatcgagatcgaggatgacgggtacagagctgagattgataggaaatcatcaacaggcagaaaggaaggggccgggcactgcctgatcaagggcgaagaactcgttggtgggaacatgggagaggatggagagtggatgaaatgccgaatctgtgttctctcttgaatatcctggcacttgcgcagtatggcgctctctcagagatatatttgtgtgaacacggtgtccaacactgatacagcaatcggatggcattttggtgttacgtagcagtatatatacttattaggagagtagttcttttggttttagtggcaatttcctgttgtacaatacgctgagcttactgatgctgcttgcaaattgtcagatggcaaaggaacttgatgggattcttgattcatctgaagctgaacgtgcaaagagctgtactattactaatgattctgcttcgtatctggagaaaataattactccgatatatcaaactatggaagcggtacgttcagttattgaaggtctatctcaatttacttttgggtttagatgatgcttctgctaaatctaaatcagtaccaattaagttgaatcttctgaaatcttctcatgtcttattgtctacggccactactaggtggcatttcgttgtaactgcgcactcagtagttttgtccaattcatttgtaattggttgattattgtgaggcatgtgatgatttaatccttttttaaaggataaattgagctagttacattgcagcaaccgttttctgtatgtttgatatttttcttctgtattaaagttatatccattatataccttctacaggaggcacagaataataataatgggaaagctgcacattctgcatggcgaaattatgatgacttcaatgaatatttctggttttttccctttaaactgctgcttttatgctgtttcctattatatctcttgcttctctgtatttaatctcttgcatatatttaggtcacgctcctgctttaatcttggttggccacctgctgaaggttctaaatttttgcgcaagcctgctaagaggaaacgagtaagtagtcatccatagtattttagggctagcaatgtggctgtgtgagttgcaaacctatggaaaaatcagcctatgtgtgctttttgtatcatttgagattctcctttctatcagttagccaacagtactttcgcaccactgggattagtttccttagagatagattgtgtaacattattttttttccgtaatattagataatagatcagaatcctatgtattaatttggaaggttgtcggtttaattagtaagttagagatagggatgaaaacggatcggaaacggacggaaactagctttatcatattcgttttcatatttttttcggaattggaatcggaatcgaaaactcggatacggaaatgaaatcgaatattatcgaatacagatacggagcgaatatgagacggaacgaatacggtagcgaatatttaccggtatataaaaaacccctcaaattgagtttcttgatcaaggaagagatatcgcttattattttagttcaaaatctccaacatttatatcgtcaattttatagacggtcccacaaccatatgtgaaaattgattttcatggctgttcctctaagagatccatatgcaaatatgatttatcattttctattcccaagaccttttactagatgtataacttacttaccattgtataaattggagattttatttattttacttcacatcttcgaaacttgtaatgtttgtattatactttaaatgctttcaaatacaaatgttataagctacaaagtggtagatcccgttgagctcttcaactttgatatggaacacatctccatcagatgtcgttgaattgtagggcctgtttggcacagctccagctccagctccacccctcctgaagctggagctcagccaaacagtttcagctccaccaaaactgggagtggagttgggtggagctctctcacaaaatgtactagagttgtggagctgagtttaggcagctccacaactccactccagactcaactcctggagttatatttaggagttggagctgtaccaaacaggcccgtagatatgagattttgtaaaaattaatatggtatattataatgaatatttagacccataaatgacctcaaataataaaatagtcaataataaagttgtagatctcatcgagctctacaatgttgatataaagtttgtcttcatctgattccgtatgaaaaagttatgtatatatacgtgttttttatataatttgctcaatgtctgcggatatccgaaaaaaattccggatagtttccgactgttttccgattccgacggatagtacccttactgtattcgttttcgtttccgagaaaaaatatccgaattcgtttccgaatccgagaatttccggataattccgaccgaaactatccgaatccgaaaaatgactatctgaaccagtttcatccctagttagagatatgccattgttaggaaagtagagactgtcttaagggccaaggcatggtttctattcacataagttgtaccacaggtactgtagaacaggagtcgttgctacaaaatgggcacttacgtaccctactgcaatcatgtaatgaatatgtagagtgagaacaataagcctcagtattaaaaaggagttgtatgtatctattgactgaaaaggagagtattaaaagaatatgtattctgttaagtaaacatgcagtgttcaatcttcatcctaacctatccttatgcctattacttaaaagatgcacttggtgattgtgatggtaacatggtgtgctctacactcccactgtccactaacagtggatccaaagtgggttgtgcgcggtgtaaaagagggcaagatgtaggtagtgcaaggccgtagaggcataacagaggtcaaagcggagctcgttcagtcaccatagaagaacatatggtgtggcatgtgttgggatttgtgacaagggcttgctgtgctatggaagtaggatttttaacccatagcaaacttacgggcattaaacttagttatgtaaaatattgggtcttaccgatgactaaggctggggcaatgactagaaggaaatggacacatttattttactgaaaatttgtacatatcttgtttgcattatggttatttatgtgcacttaactttgcttttaattttatatttacagactggaaagacaaactttgttgagcatcgcacttttctgcacttgtaccgtagttttcatcgcctttggatttttctaatattaatgttccaggtcagtggtttgatatcgtacttgtacacatgtatagcttaaatccaagtatcatttctgaatacagtttatgatgctaaaagtgctcttttctgatgcagtgcctaactattatagcttttcatcatgggaagatagacattggtaccattaaaatattagttagtgctggaccagcatttttcatactgaacttcattgagtgtacgctctctatttctttgttcatggtttcacttttgctagttacaatttttggcggatatactttgtttcatcacgaagcttttcatgcatctcattttttgccactgggttcatctgacatgtagccttaacagtcaaaatgttaaaccaagatgaatgtacagcttagtgacataaagagaatcccttttctaattgttatgtggactagaatcaaaggatacttcctaagctgactttggtggttttgttcttctctaggctgcttggatgtgctgctcatgtttggagcatataagacagctagaggttttgccctatcaagattagtcatccggttcatttggttgactgcagtctcaacatttgtaacctatctttatttgtgagtattcagtattttgttcatgtttttttaatgtacagcaagtcacctcacttgaatgctgaatgtcaaacaggaaagtcttggatgagaaaaatgcaagaagctctgattcaatttatttccggatttacgttcttgttcttggtggttatgctgctgttcggcttgtgtttgcattgatggccaagataccagcgtgtcacaggctctccaatttttctgatgggtcacagtttttccaattctttaagtggatataccaagtatgcacattgtcatcctgcgcagtagtttgcaacatatctacattgtgaaatcgtgtacttatattgtttctcctgtttgcatttaggagcgatattatattggacgaggactttatgagagtataggcgaatataccaggttcttttcttttactctagatgattcttggaaatgtacaaggcattcttagtttttctggtgatctctccagattaggaaaaaaaattctaatacccagtcgttatgtggaaatcgcaaaaaagaaaaagcttgaatattttttctgatttgttaaccatatacatgattcgttaccaacctgttagtttgaataattcaccagcggttctcttatagctatttttttggtcatggtatgctatttacttgtgacattctgatgcagatacgttgtgttttggttggttatactggcatgcaaatttacttttgcatattttctccaggtggttataactgtgtatttcagaattttaatgtttattatttttttgtgttatcaaaatttactcttgtttattgtgttatctcatttctgcagattcgacctctagtcgatcctacgaatgtgattgtgacactccgtaatctgcattattcctggcatgatcttgtatcaagtggttagtacattttgcacatatcactaaaagcattgcccattttctgctacagctttactaagaagaaaactattttcttcttttttcctctaagtacgagataagcaaattccttcctgacagtgtttcattttagggaataaaaatgctttgaccatcctgagtctatgggcaccagtcttagctgtaagtttcttgtgttgacatgtaattttctatgaaataataagatgaactttgaaaatgatacatggttcatttcatttctatgttagatatacctgatggacattcacatttggtacactcttttatctgctctcgttggtggtgttatgggtgctagagatcgccttggagaggtacattttgttctgatgttctagaactatcccgaagtacttaataactgtatgctcactctttgtagtttgcaaactgtaatcatcgttacatttgctaatttaacgcagatccgttcaatagaaatgcttcataaacgttttgagagctttcctgaagcttttgcaaaaaccctttccccactgaggtactcgctcccactaatccagaattgctattctgtctgctcatgataggagctgattaatagatcttatagtttcttttagatctgtcgtttggttaatttgattttgatcttccgatccttggtttttattctgtttttgtgtaacactgcaggatatctaacggaccagttgctcaggtaaataaacttacattttgcttctaatactaacttcaatagattggttctgacatgcaattatttaaacttcaccaaacatgtcattctaatttagtttgttccgtgacttctgtctggagctactaggtttattcttaacttgttaagcaccagatttgttgtattcttacattattctcgccgctacctctctaaacttatgatagcctgaacatattagtatgacctccgttttctatccacttcaaagatctggcttttttttgagtgagtacatttggacacacaccgcaatcacactatcacacacgcacacacctgcgcgcttcaaatattatgggaggcaccgaatggcccctagagtgtgcatccactgaatttgcatgcatgtacactcctaaaattggtggacaacctccaaatctaggatttgaaccgtagagggttggatgcacaattgcgccacttagccatctgaccacaatctagctccccaaaatcaggctagctgatatactagtcttgtttttgacgttctatcaagtgtaatatctgtatgtaccattgctttggttgtctcaacattagggtccagaaattactaagatgcatgcctcgatattctccccgttttggaatgatattattaagagcttacgtgaagaggactatatcagcaacaggtacatgtaatcacagccatttgttattttgttatatcccatttgcttcagtatcatgacaaagttctctttcagggaaatggatttgcttatgatgccaagtaactgtggcaatctaagacttgtacagtggccattgtttcttctgactagcaaggtatcctaattgaaattagctagatagatcccttttttgcatatatattcttttattggttgctatgaatctgttggttttttcttttgtagattatgttggcgaatgactatgcttcagattgtaaagactcacagtatgagttatgggacagaatatcaagagatgaatacatggcctacgccgtcaaggaatgctatttcagtgcagagagaattcttcactctttagttgatggtgaagggcagcgttggtatgctttcctactgaaagatgaaatatctgatactgacaccaatattgtgttgtatttcccccaagttttctttacttaatgccaatgcatactattgatacatgtacagggttgaaaggctttttcgggatctgaatgaaagtatagcacaaggttcacttttagtgaccataaatctcaagaagctgcaattagtccagtcgaggcttactggtttgacaggacttctggtaaagactattgcactttattttggagtaaaatgcaaatagagagatatcgtgccttggttcttgtttaattatttcctattttttctgtttggtaaatttaccatgaagaaatcttatgtggtaaattgaatatcttttagatacgcgatgaaactgctgatcgtgcagctggtgttacaaaagctctccgtgagctttatgaggttgttacccatgagtttctggcaccgaacctgaggtatgtggtgagaactcgctgtttaatttgcaaaagacatagctccgttttattttcttctgaaaatatgctctttcttgttacagggaacaattcgatacatggcaactactgttaagagctagaaatgaggggcgtctgttctctaggattttctggccaaaggatctggaaatggtacttctcttatgcaaataactgaaatttgcttggcctttctatatccttggttgagtgactatgtttgcctgcagaaagaacaagttaagcggttacacctacttttgactgttaaagactctgctgccaacattcccaaaaatttggaagctcagagaaggttgcaattttttacgaactctctattcatggatatgccggcagcaaagcctgtctcggagatgatacccttcaggtactgtaaatatgtatggacttcattctatttcaaaaataggaacctattgacacctaattatcttgtgcaacagtgtgtttaccccatactacagtgagacagtgctttatagcatgtctgagctatgtgttgagaacgaagatggcatttctatacttttctatcttcaaaaaatctatcctggtattgttatgattccgctgctttattacaatatcttattgtctctgaaggttctttacttttggacatactttgctccttctttacatatttatatttagtgctcacctatataaataagtggatagcgctgggacttgttaatactataattgcttatagattatggttagtagttatccgttgattgtaacgggttaaagaatcattattgcaataaataaatgaaaataaaataaaaccttgaatccctttagaaccataacagaccacagctaatgtcttcacataacaattttcaactccaaacaacatataataattagcattttcaaaatcaatatttatctaaagatgcttgttttcattataatgtggtgagttgttatgggtttgtggcatggcgttttatttggtttgcagatgagtggaacaacttcttagaacgaatcggtcggggagaatcatccgaagatgatttcaaggaaagtccaagtgacatgttagaactgcggttttgggtatcatatcgtggacaaactttggcaaggacaggtcagtttgttgtttcatttcttttgtctgcaatataaatgataaagttgcaatggagttcatatccaaccaatatagtatgtttaatgctacacctgtatatcaactttattctcatatcaaatttcatgtcttgtcctaccatttgattgctatattccttcatattttgctgaaacagtgcgtggcatgatgtactaccgaagggccttgatgttgcagagttacctggagaagagatatcttgggggtgcgtatttggtattctgttggtactagattaattcaatacgtttctcggctatcttcatcattttgattgttctaccaggcattgaagatggatattctgcagctgaatatattgacactcaaggttatgaggtgtctccagatgcacgggcccaagcagatcttaaatttacttatgttgtttcttgccaaatatatggacagcagaagcaaaggaaagcaccagaggctgcagatattgcgctcttaatgcaaaggtagcttggtaaatttgtgtggtgtgtatggtgtgctaggtgttcttggttccgtgttcattatgcgaagttccctgattagtgtcttatcttaattgttgctgttacatgctgtaaactgtaccattgaataaatgctgatttttgttcttataacttgtagaaatgaagctcttcgggttgcttttatacacgaggaggatgtgtcaagcgatggccgtaaagagtactactccaagctagttaaggctgatgttcatggaaaagatcaagttagtatattctcattaattttcttactgatatttaccctatatggtgcatgtttctgaaccctgctacacaatatgctatagtagatactacctccgttcacaaatgtaagggatttaggttcttttggagagattaaagtcagggggaaagactaagggatagttggggagtcagagggtaggtggagccgtggaggtaagggtgggtgaaaattaaatgaagggtggttggaatcccttatatttgtggacaaacttgaacccccaaatcccttatattttgtggatggagggagtagacaatagtttattggattgaactgtcaactatttagcgttattacttgttggccttactggctgtcaaaagaattagtgagtgataggtaatcaagtgctcacaggttcctgatgtcctgtagtcctctttccttgtttgcaatcccagaaactactgtgattctcaactatttgacattgtttcctctagatcaaattttcttaggtttataaagtatttgcaacaatgtcttctcaattttcatatgtcgagtaagaggattagaaggaaacatgatcttggtcaccatttcatagtctcttgctactgcattatgtgttcttgctaccaaaaaccagctccaatgctgtctgcattcagcacttaactcttctagtatcttcaaatgttattgctcgacattgctgtgtatcaatcttgtcttctgcatatattgctatatagctatttctcctctgcccttttccaagccttgctaagtacttcatcccaaaataacttcatttttagcctccaccgtttgtcccaaaataagttcacttttactctctaacctacccactatcagcaaatcgatgagttttattccttcaataccccttgcctacccacccactaatactacttttctgctaatgaggggcacttttgtagttttttttctcttaccttgtttttcacacctagagccaaagatgaagttatttttgggacagagggagtagacataaataaaaaacttatgcacaatctgtagaaaagtagtgttaggtaatttttaattgtatcctctaataaattaacagtttatgaaaatataactcatgtattccgttggtgttaatcatggtagtctggttactaattcatgttactgtgctgagagatatcctatatgattttgaatgaaatatacttttgaataaggtcttgagattagaccgttcaactatatgacatgcttcttattttattctgttccctgttgtggtgcactttaattatccataatccgaactctagaaggaattttcttgtcaatctatgatgtattttactggtgtattttgcatcagttatgttttacttaaccatactgttgcacctgtaggaaatatactccattaaactgcctggtaatcccaagctcggcgagggaaaacctgaaaatcagaaccatgctattatattcactcgaggagatgcaatacagacaattgacatgaatcaggttttcttcttatcattatcattaacagtagccttgtccactccccttttccttaatgaaattaggtcgaccaaatcttttggccgacccggcaaaaaaacagtagcattatcctttttgttgatatattcctcatgaaatgtcgagcttgtctagattcttatgtgtaattctatgagatagattctaaaaatatgctcatgtagtacgctgcttgccatttggattattcacaattcatgctgttattaaccatgattctgacggtgataggtcctcttcatgcttggtaaattggtgtaaacaactaaacatgaagatgagttcttgtttttttctttgtgatggaagtattaacaaaatcactggagaaaggtatccattgtgtacaaaccaggggccacggggaatttacactcaatacctcattgagtgaggtagaggacatctttaggtgctaacatgtgacatgcagattagattcaaaagagatgtgaggatcattgacccaggctcatatggagaaataacatggggtcatattctgacccatctaccttatcttgtccattggtccatgcaatacattagtttatacttgctctacgtagatgaaatatacttggcactcccctctttttcgaaaaggtgtctgtgcaccagaaaccatcttggatccttggctgataaaatttctcctgtaggataactacttagaggaagcaatgaaaatgaggaatttacttgaagagtttcgtggtaagcatggaatccgccctccaacaattcttggtgttagggaacatgtgttcacgggaaggtatccttactatgactactctcagttattcactagcttttggttttgcttttatttttgtattaacctattatattttattcctgctgcagtgtttcttcgcttgcatcatttatgtctaaccaggaaacaagttttgttactttggggcaacgtgttcttgcttacctcaagtgagtcaaatttagctagttgcagggaataatatctcattcttaccacattctcttttttcccccgcaacaaacctgtgacaatggttttaaccaaggaacttaattgtgttttattgttcttattacagggttcgaatgcattatggacatcctgatgtttttgatcgcatatttcatataaccagaggtggcataagcaaagcatccggggtgattaatataagtgaagatatatatgctggttggtattttgtatgctccggttaagaagttacctgaatgtggttattgctgcattgttcattgaaaacatctcatggcctcatgactgtctaggctgcttgtttaacttggaaaaggaatctcccatggtctccgtgaaaataaaaaccataactgaaaaaaaaaaactattgggttccttgatggatctatttttgttgcccccctctcgtaggttaagtctacattcacgagacaacccatcaatcctgcaaaaagttgaggtgccattattttgataagactgttctgataaaccatgcctgttgttctttcacagtatataaaccatatatggcttattgagaactaaacattagttacgtcacttgtgcatgcttagtagtgtatctctttcaaacttgacttgtatgtgttatctaatctgcaggattcaattcgactctgcgccagggaaatatcacacaccatgaatatatccaggttatctgtttaatttttttgcactgcaaatgtgtataacatgaataatgtgcactcattatgatttgtgtatgagattggtcctgaggattttaaatatgcatggttttggaatatggcatgtgcacttgcatttttttttgttagcatgtctggtacagagaattaagcggcttggacgcgtattacacatacatcaatatggtcttcccttttcttgggcatgcaaattagcaaatgcacttgaacagatgaactaaactttcttacacttttgatttatttttttttggaagtgcaggttaacacatttgcttaatgggtgcatatgtcatcttgtgtacacttgcattttaaaatcagtatatctttgttatcatttcccaaaataataatctaacaatctatttcacttcttttaaggttgggaaaggacgagatgttggtttgaaccaaatagcacttttcgaagggaaagtagccggtggtaacggtgaacaagttttaagcagagatgtgtaccgtctggggcagctgtttgacttctttaggatgcttactttctttttcaccacagttggttattatgtctgcacaatggtaacccctcgccccaatcgcacatgattacgcttgaagcaacttacatggtctatgtgatgaaccagctcggcttgaacacttgagtacatgtgtgcactgcatccagacaattatttgattgatataattgctgttagatgggatgagagcgacaaattgcagttagctaatcatatatcatggtttggtttaattgcattgcactatcctaaactatcacctgtttgcttgagatcaaacacagggatcaagatacgagaactaggtctaaatcatataccatgaatgggtttacaccaagttaggccctttccagggatgggccgggaatttatttcaaatttctggccaactaaattcctggaccatccagggaggagccaggatttggtagtttggcctttgccaaacaaggtcttaaggtttgaggatgcaacatctagttgaaggcttaatacacctgtttgctgcttctcttttttaatcaatgggggtggagctttctactcttccaaactctcatcgagtgatacgcctcatattttagtataaaccctcatcatattttagtataaaccctcatcatgcatacgcctgttaaatcataatagcagtatatgttaggggcataactttatatttagcaattagcaaaagatagtttcactaacttgatggaatatagtgctatgtgaatatgataaattctgatcgaaaatactagttctcatccgaggacctgtgtgtatgatttcttgattgttgctggataaatagcttctataactgcaagattttcaatctgtcacctgatacctaatgtctcaatgtccttataagcattgttttgaggaatggaatattgcatgtccattagttatattgttgcctagaggattttggacacgtttacatcatagacatttttgtagttttgtcagcaattcttttattttgtttactatcaccagttatttactataactatattatttatgtgtgcatgcagatgaccgttctaactgtgtatatctttttgtatggaagggtttatctggtaagtatttaaattataatgtgttatgcttctgaatgcaagtaaattttgctgaatgttgcttgtgttgtatattatatatttcttttaccattcttactagctattgcaaatttgtaaattcaggcactctctgggctcgactatgaaatatctcgtcaatttaggtttctgggaaacactgcactcgacgctgctttgaacgctcaatttttggtccagattggtatttttactgcagtaccgatgataatgggtttcattttggaactggggctactgaaggtgggctttgtttccttttagagaacgatacatgcttttcacagggttgctgtaaatcatgttaggattcttttttgagatgataatcatgttacaatttcaattgttttgcaggctattttcagttttattacaatgcaactgcagttctgctcagtgtttttcacattctctcttggaactagaacacattattttgggagaacaatacttcatggtggtgcaaaggtataatttgtttgctagtgtacgtatattatattaccttttagattttttctgacgcatggccctttatgcagtatcatgctactggtagaggttttgttgttcgtcacataaaatttgccgaaaattatcggctctattctcgaagccactttgtgaaagcgtaagtttctacttccaagttttcaagtgaatacttaaaagaaattcaacttatatgagtagttgtcatttatagatatcttcgcctgatgaaatggagcatgcatttcattttgttcatattggtcttttagtatgttgtattacagtgacccatgcctacctatgttatcagacatgagctattttgtgagagtgattgaatgaaatgtttccttatgcatcttacaatatgaatcaaaatctggctctatcccatgtgtcgatattggtggagggaagtgctagatacctttactttagaaggctcacaagccctcttgcaaacacgcatttctgttttcttttgtctggatactgtagggatctgactcaacgaatgaaatctgcaattttaattatggtgtgcctgattggtttcttgactacttgatgattaatctgatatatattaatatttgcaggcttgaagttgctctcctcctcattatctacattgcatatggttatacaaggggcggttcatcttcctttattctattaactatcagtagttggttcctcgtcgtgtcctggctcttcgcaccatacattttcaacccttctggtttcgagtggcaaaagtatgttcagaatattcctatcttttagttaatttctctttagttgcctaacattcaggtaatatcaccagtgattgggtaaaatcaagggattgttcaatttgtttttgtgaagaaacataacactatgtttgatgaaataccttttctaggagtatatagggtagaaacttacgcttggggtagttttagagatgttcttggggctggataaattaatttccacaattctcactcttcattggcttccatttccaaacgtcaggactgttgaggactttgatgactggacaaattggttactttataaaggtggagttggtgtaaagggggaaaacagctgggaatcttggtgggatgaggagcaagtcagtaactatgactgtttggagtgttaaccgtatacttgatttaaccatatcttttgactatttcacttatgcactgttttattgcatgcatacaggcccacatccagacattaagaggacgtatcctagagactatcctaagcctcagatttcttattttccaatatggcattgtttataagctcaaaattgcttcacacaatacatctcttgcggtaagtcagggatctccccattgttttgcactgcaaatttttaattgctatgttagcaaaccatttcgtcacatcaaaacctttgttaaaaattcagttaagcacgtgtctgcctgattctttttccatcttgcattcttccattcatgtcgaatgcagtattaaatgctgtagctcttctttcctggcctaaaaaacattcatgtgttttcgttaatgtgaaacacttggtactgtgaggcctcatgttagctgaaaaagaattttttgttagttttggcatttgtctggagcacctgatttaaaattcctatgtgaacaatagtgttataaaccacaaaagactgcatggtatggattcctatagcttctacaatctagcaaatctatccttctgatcttctattatatctaatgcattttttggataggtttatggcttctcatggattgtacttctcgttttggtgctcctatttaaggtttgttacgttgaagtcttaatatctctacctgttctgtgattttaatttatatgggcaacatcatctaagctaatcttttgctgtatcgtgctgcagctttttactgcaactccgaagaagtcaaccgccttgccaacttttgttcggtttctacagggcctccttgcgattggaatgattgcaggaattgctctacttattgcattgacaaagtttacaattgctgatctatttgcaagtgcgcttgcttttgtagcaactggatggtgtgttctatgtgtaagtacagcattcctcttgtttctttcctcaaatgttgcagggttaatgctgtttgtagcacagattttagttgcatcactggtagttagtttgattagttcttacagatgcggtcctggcttatgcaaacttctctacttgaatttggttgccacattttctatgctttgttgtttggattttacccacatgccttctaacctgttgcatatcatggcagctggctgtcacatggaagcgcctcgtgaaattcgttgggctctgggactcagtccgtgagattgctcggatgtatgatgccggaatgggtgctctcatctttgtgcccattgtgttcttttcatggttccccttcgtatccaccttccagtcacgtttcctgtttaatcaagctttcagccgtggtctggagatctccctcatcttggcaggaaacaaggcaaatcaggaggcatgaaaagcctaaccacctaaccgcctggatatttttgttgtatattcttggaattgattagtggtacttgatttgaacaacacctttgtacataactgcctgccattttaggagcaaattatgtatccaaactaacagtgccatgccagtttagatgtgagtattcatctcttgtttgtagccgtaacgacctgtaatttgaacattccggtaatttggatgcgacaattcagatagcctgattgctgtatttgagcaaacaagtgtcccgaatctttggtgctgagacgcatataacgccgtatcagtttacctagtagaaacgcagttgtgttacagtcgtttcactgcatttacttgcatatgccacctggagtcccggagtcgtccagaactccagatcgttcacagggaagttgtattaagttcatagtggctgctactattacatgtctctgaagaacctgggtcatcgctacatgaaatgtgtcgcttgtgctgtcgttattgttctgctgatccttccgttcttctgtatagatctactgctctaggatgggcaagcaagagtgaactcgccatgattgcattgcaacatcctagcggaaaagaaaggcttttcaagaactccacaccgttgcaacattgacaaagaaagggctcttggaggatctatcaggtactatttatttatgtggaggagatggctatggtccttgtcatttcttccttctctacatcacctagctaggtcattttctaaataagctcccgattcactggcacttctggattcgtaagccacagcgcccacagttgtgttgagtataccttacgttatggaccatcaggcaggcatcagcactatccacagggatgtgttactatctaaaagcttagtgccccttacggatccattctctctgccacttcatatttaccatttatttcctacttgttgattgttacacgtgctagttttaccactaggatctttggggtactagtttaggcctcctttggaatggaatggatgagattttgttttttttcgtaggaactaactaataaaatttctattcctttgtaactgcgttctaaagaagtccttaaataacgtagtctgctttgaaatccatatagaaaactacctcagatgcagcctacatatgtgcaaatggcatggcccatctgttttgcttattgtccccttgccagatgaatcctggtcatgccactagattagctgtctggctggacgggtaatgtatgccatgtgccgaactgccgacaatgatgatgattgtgggccattagtgtcactatcacctctcttgtagttaaccacctagctatgcaatattgcaatggcataaacacctgcatgctagtaatagcccaataacggtttcctagaatccagacacaacttatgtttgtcctgcagtgaagttcgactctgttctgcattcatccctttcctgtaaccattcagagaaaatcctgcttaataatctttatggagaaatgcagtgcttctacccccattctagaactacatcaatatcctactggtgatctagcctgccaggtgcagttcgtatccgcctatccggggatctgaaaattatcatgaacctactggtgattgctatgctatcaggagatgccagagcactagcttttttctagttgcatttcgacaattcttagtagttacaggaacaatgttggctacatgtttattggtttgcacccaatttatcttagcatgcatgcaggaaggagctccgtatgctcccaacaagccattgaaccgaaccactgtttgacagaaacagcctaaacggaagctgatgagcaccgttgatgtgcctgcctgtcacacttcatataagccatgagcaccatcatattgtcctactcatcattgcatcactcgggtaaactctgtaaattccctctctgataatgaaatccctctttaacttttacagattgtgaatctctgcaagcaacacttgccgataagcaacaagaaatcaacagcagtagcacagctaggtgtgattaaaaaccatgacagtgtgcttgaatatattttagctctttcctcttgtctccatgtatgcagccatctctgtctgtttggtaaaaactcaactgaattgtaacaccttttgtttatgagcttacaagaaaagttttgccctgcatgagagtcctaagaatttactctcttaccacgtgaaggattaaaataccttttgatcaagatgatgcactggatgatgatctttgatcattatctgttacaatttacctgatccattttaccgcgtgctgaactaaaacaccttttcctttctccctcaagctttaggtgattatggttgttgttttactgctactgaaatggatggtaaaaagaaaatgtatgatgtaacttctatacttttgcaagggcaggaaatgtaatcatacctatgtgtacgtttctacttctctagaagaaatatgaccttattattgtgaagaaatgagaatatgaagggtttatctgcaccaaataacagataacacttgtgcttaatgatttgtgtacttctaaaggaattttacggagcaactgactctgatcatgttttttccaagactaatcatgtgtacgaaactacagggaacaaccaagtttcaacaaattaacatgcacaatgattcaagaaagggtacttcttcaaccttggtacttatgaattatgatgtactactaggcttacaattatagaactgtgttatagatgataacttgtactttcatctatcattggatcaataaagcagagcactttcagaaatgtatcatttctcccttgccttcattgatgatgcaacgaggttgagagtgaggcagagcaagcatcggttggaccacaggattattcttgcggaaggtaggtacgtggttgttccattctaggtccatggtttacctactaatatcttgtcatcccttgtgggacaaggcttttttgctttgtgattatactgccactttgttatcctcttgagcactcctgcgcattacaattaattgcatgacaaataggagctatagctagctacattaaagtcaaactttatgatgtcttaatagtttgtggattaatccatttttcaggtaaccggtgaagatgtcgccattgagaggttagtttcatggaaaggctgtgccttgccttgccttccttgttagattttgcttatgtatcattccaagcgagcagttgcagattgtgaaaatgacaaaatagaaactacttcatgtagctggggaattttaacggatgtgtatatatatatatatatatatatatatatatatatctaggtcaaatgatatgttcttgacttgttaatcatatcgtgtgcttatggacagtattcagcacaaccaaactataatatgcacgttttcttgcatgctaatccgacaagaagaagaaaaaaagtttctttggacagtaatattctcctcggtggtttaatgcaggagtggaataagaggccactgttgcaaacttactcagtagactgaatacttacgactaagattatattggactattggtggacggtggcactcaggtaacgggagctcaatgattcaaaaccgactctacactaatttctttcaggtatgtagagccaaagaaaagttgtttacttattccattaaactaataattatgttcttgtcagtttgtgtgaaacaaaaagtttcagaatctgcagtgacaaatgcaacccataccatttggaaacttttgagaacaccgagcaagtcatatatacttaatttgatagacagctaatgatggttgttcaaagcgtatcctgtatggttgattagcctatgtcacaatgcactatttcctaacaaatagcaactcgaagtctcccttcttcaacatttcaaaagcagcacaatttcaggaaattttctaaaagttttaaattattcacactttatgcataagaaagtctaggtttgacacattggtagtcaatatgtgaagttgaccatgctctgcagccatcgcatgcatattttatattcctttttcatcggttaggtaaatctgtgtatgtcaccatactgtggactgggttgcgtagatcgcatgccaacgattgagaggattattttcaggtggtagaagctacctctgtaacttaatttactttttcgatctgtacacgttaattatatttacctgatgcatacagtttaggatatcttaataaaagttttacgtacagcaatgatcgatgcataacatctgcattcgatttctaaccatgttgctattgaatgctccgcttgttagaccagttcgtgcagaaaatactgctactgtactaccaagacatgtgcctttctgatcgatccctgtacattaatttgttctctcttgcacatcaattctgttgcacagcaaactgtactagtccctacatgaaagtcactgtagaatgctttctgaagccgccaaacctgagctatatattaatgcctttataaacgtgtgcaaaggaagagagagaaagagaagagtaggttcttcctgttcaacaattatccataggctgtctatgctttgccccaacatggacatgacaaaacctgcatgatcagaaagcgatatatacgaaaatttccgggtacaccagatataactaaatgtataaaaacaataaaacgtatatatagcccatttaattaaggcaatagaattataaatggtggccgtatgtttcaattaatttgtaacaacgtgcaaaatttacattgtatgcataaaaaataatttcaccgagcaaattagttgtttgattactagctgcgtcaggaggtggaaaataatgagctcgatcaaaaccttccaactcaacaactctgtcaaattcagatgataagcttgtaataacctatgaccatgcataaaatggatttgacaggcatatatatacatatagttagggctgctaaaggatgatgctaataataattaaagcttttgatcgagaagagaggtctgcagccagcagatgagagagatgaagcataggcaagcgcaaaggtgggatagtcaatggcttgtggtgtcgggaaatgaggtatacctactggctaactaattgtctgacttgtgtttcaggaccagagaaaaataatatatttattttttatggaaagcaaaaggcacaactaggagccattttaactacaagtacactcaagtagctaatgatatttccacatccgatttctaacgaatctaacaatacatgcacaagcaatgaagcaaacaagatctgctgaaacagcccaaacacatatcggatacatggaaatatatatatatgtgcatttatgctatacacattaattaggatttgctagatttgactttcattattattaactacggggctagcttaagtgttaaaacttcccttgattatttgactgtgctatatatactgaccaatatattaagaactgattaatatatgtaggttcattcttgtggagagagttctagaacataggggccggccggtgattaaccttttctactttcacaagctacccatccctctccatctccaactaactaaatctttttaagtcatataccgtttgcatgttatctgatgcatctaataaccgccctggttagtgatatgatgtgtctaaccagtaattaacctcgtttcggaaagacacgggctaaagctagctagggaagctgcatatgcatgcaggggccatgcgtgctgatgtatacgtccgttgctttttttagtttctttttttttatcatttattctagacaatgatatatattaaatcccctggcaatttaattagagggtatacatatataatactgtgcccgaaaagaaaagaagattgttctctgtcgaagtcctgctgtgaaaatgaacggcttaattacttttttttttgcggggatgaacggccggcttaattactgttctgcttaaaactggtttcgtatatactatattaactagagtaaacttgagactatatatggattatatattatagccgtacgaaatcgtaaaatatatatatatatatatatatatatatatatatatatatatatatatatatatatgtacatatagtcatttgattgattttgtttcaagtgtatctagggattgggattttgaaatggtccaaaaggaagctagcgaccacatcaacaataacagttttagatatctgttggagaagcaatttatatattgtttatttttgttctgacaacgcatacctagcttaattattccgagatcgagcaattatttcaataccgtgacgaccaaaatttagcttagtcacacacgatattagtagtaaatggtgtgtcaacaagtacatatctgaacagaagtcacacttggacataaaaatgggaaaattaatgtcttaatttcatgtcccagctatctaatcattacatatattttttcctccttgtaaaggggtaaaaaagaaacgataaaactaaacaaacaaaaaaacactactgatcgagtgttccatgcatgttctttgtgttctttctacataactaaaagtggaccaaaccaccttttctgatgtgaacaaacaaataaacttgacatcaaccgatccaatagttctcttcttcttttttttttgggttcatattatctccatttagtatccctttaattatctagttcttcacatctcacttgtgttgttttttgaaatatacatctcacttgcgttgttgctgctgatcaaccatgatgggcattgcctgcatcaaattagtatcatgtgagataagtatatataagtagtaaccattaatctgtttaatttggcaataaactgcatgcagggttttaaaagaagatcaggggcacctaagctagctacatacagtagtactgaatttctaaactaatatatatagtatatattagatcatgtattagaatcttatatattgtcctgacattattgttccacctcgaccagtctggtgaactatatatcagagaggaattattggaaagatttttttttttaaaaaaaagatttttggataacaattgaactcgatataaaattacttttttaattaattagaaagttgatgagagtagctactcactctgctagcaatatgtccgtcatcgcccaacaaccttccatgtcgatgtcgtccaggttcagcccgtcgaacgtgctcgacgccggcgtctgctcacacgacatgccgtcgccgccgccgctgggggtgttagtattgcactgatgatcatctgcagctaccattggcggcggcggcgccatcggtgaggtcgtcatgttgcttgcgctcgggccgccctggccgagctccggcgagctaagcccgtccccgccgtggcaaagctccggcgagcccagcatgtccccggaaataccgctggaaattctgttgagtaggctgtcgggggacatgctcgacatggccggctgcgtctgctgcgtgcagctgtcgttggtcaacggcggcaggttgtcgtagttgccgttgtactggccgaggcggctgaggtcaacgccggcgagctgctgctgctgtccgagtatgccggcggagttggcggcgagggtggcgccgaggatggacgtcatgaggtctgtgccaggtagcacagcggcggtgggcggcggggcggtggtggaggcgagcacgcggaggaggccctgcagaatctggaacttggcggcgtcggcctggagcttgatggcgttcaagtccaagggcagctggtgggcggcgccgccgagattggcggcggccaggaggttggggaggccggcgaggaggtcggtgcgcgggcggtgcgtgacggggtctatcccctggctgagaagcttcttgcggaggtgcgtgttccagtagttcttgatctcgttgtccgtcctccccttgagcttcgtcgcgatggacgaccatctgcacgaacacgaaagcaactcccttaattagcatatgtatgagctagctagctagaggtagacgaagaagaagaagaggctagtggttacttgttgccgagggtggcgtggaggtggatgatgaggcgctcctcgtcgtcggagaagccgccgcgcttgatgtcagggcggaggtagttggtccaccggaggcggcagctcttgccgcagcggttgagtccggcgagcttcgggaggcgccgccagctgccatggccgttcttgccgatgtactccaccagaagcttgtcttcctccggcgtccatggccctttcttcacgtcggcgtcctgctcacaacacggtgatctccccatctcgatctctcttcctagctactactcctcgttcgttagctgagctaggaggaagaagctagctaagctagacgatggccacaagagtatgtttaatttggatgataggttagatggacggctatggtgggggtggttttataggagaagaggaagagagagccctaatattatttaacggggctaattaatttaagtgataaataaactagacaagtacacaaagaccatagcattagcatgcatgcatgatcgatcatatcgagtcagctagctagctaagctaagtgagattaattgtgggctcaagcaagcaaacatccttcctttctgtctctagctctgactcttatgcctggcactaattgatttctcactttgggacttcaattagtccaaagacttacgtccatcgtgattagccattagctcatgcaaccaacgaaccaacggaaagcagcagagagcaggggccagcttgcttaagcatgttgtcaatgtaggtagctaaggttagatcgatatgcatttgctctgggtgtcgtgtgcttattgtgtcctgtttttctttcctccgtactttctgtaccttaaattatttgggacttttgaacatatacatatatggcccaatgcaagtggggttttatttaggatccccccaattacattatttttctcatgcacaattatattaatataagctcacaatactatagcatacgaattgatatatattactactagtatatataaggatcagtgtatatatatatatatatatatatatatatatatatatatatatatacgtacttctgtacgtatatactccttatataactttgccctacgtacgattttattaacgtaccgtggatgcatgcaaggatgatggtgataatggtatatatatttctacgtataaagacatgcatggtagatactgtacaaagatagatgtgaaaaaggccagcacattagcatacatatatactagtacatcgatgtgatagtaatattttctactgtgtgtgcgtctacgagggcgacgtgttacttggaaaaatacaagaaaaacacctctctgatcaagtaagttcatgcatgatttggacgtcatgttacgtacacaatatagtgcgttgacacgtacgcttgacaacttaattatccagccaggaaacttaattagcaagagagaacaaactaaaggacaccattcttttcttttctttttttaatgatactttattaatatactatataccacctgtggtgtgcatactatattaattctattaattgctacatccacccaaaagtaagttcacctatatgtctaaattatcatataaaagtatgggctatatgtcgagattcacgcataaaagtgaatttatttagggagtatctatctatatgtaagtgtatttgttcttactaaatcattaatgcatagagaaaatgaataggggagaaaaataaagagaagtgcgtactaatggttgaatgactaaaacgagaagaaaataattaataaacccaatactaagaggagcatgtgtaatgtttatttcataacaaggtcccataagtggggcccacggtgaagatagcatgcaccttgtgaaaagctttgtagtgtataaaaactctcagaggtgatatatatatgggtgtgatccactgctgttaaaaaaagaaagttgtgaaggatgacaaatagtcaaaatactctctctccttaattaattaaggatcaagcactatggctggtaccggtctctatgttgaggacagttgaaaaaacagctgcagtgtttagggtgggctctatccctttttctccccttaattaggaccttctctaaaactagggacatatatagtataaaccacgtacgtaaaaaaaaataaaaactattattagattaaaaaatggacgtgtgatatttatccatgttatcgaaagcaaaatttctacccccagcaaatttttctcatgactgaatctgtgagtagaatttttattcttagtgacatagataaatcacaaatattcatttttttatttaacggtagttttggttttcattatatatatggtttacactatatatttttcctcagaattaacgttgcagatactttaagaagtccataggtaaaaatatatattttttttgacggagggagtatcgtagtaactattgacaatgatacgttggtatttacgtgtacaaattaatatgtaggttttcgcaaaagcaaaagcattaatatgtcggccggtatacctgcagggcatgcgtgtttaattaggtaatattgacatgacacacatgtaaatatgggatgaagtgtagatccagtgcgtggacggcacgtgttgaggaggcagaggagaattaggttcgtgtggtctgacacgtgtgtcctgttaattgccatgatctaacaacaaataatcaaggagcaaattaagcaagctagctagagtatccaggaagaaggaaggaactactatacctgctcgattgatggaatggatatgatagctagatcccttgtttcacacgcacacatgcatgacacgatcaaaatacaattaagcagttggtaaacctctcacttaatttggtacatatatatatatatatatatatatatttgcatcaataacaagaagctatagctatggtcgttaggggttggggcccacccaactagctacagatgtggaattcatgtgcatatatagcttttgttcttgccattgctctaaactggtctttccttgtaaagcaatgatgacataattaacgaaacttaattgcattattatatgtgtactagctacctactactggatttttcacattttggtccttttaaaaaacatatttcgcaagtagacccctagaaaaacttatcccaaaaatggtcctttttggggcgccagagtggctggcgccgttgttcaacaggacggcgccagcctctttggcgccgtccccctgccgacgtggctgggcgatgttgaggtggctaggggga

SEQ ID NO: 4526 - DNA, 58900 bp, Oryza sativa
cgcctacccatcccgcgcacatggatccaatgcatggttctagtggcggcgatgggagacggggatggcggcggcgatgacaacaaggatgaatctcgggctcaggagctgctagggttctagattttttttttgccgttttttctttttgcagcctgacgatttatgtacccacatgtgaaaatacaattttcggaagcggttgttctacccgcatgcaaaaatcgcagacacctggatgtaggcgggctaccccacccgcctacgaaaatcgattatgaccatatgaaaaaatcatttatgtagtagtgttatgttttttgaacgaatcgataagcgccaatttcattgaatagagtttaactttacaagaaagggagaattgctcttatgcccttacttttaaacccaattgtgattttactctcgctttttaggatttttaaatttacccctaatattttgaaatgaaatcaccatttacccctacaatgacagttaggtgggttccactatattgagttagagaattggaagtcatcaaaagagaaaattagtttaggaaatattagattaccgttctatccttaagcaatatcatactgattcattcatacctattcggtcagatttgttccccactgttcctatccgcaaacccttggggttggggaggagatagaggaggaggaggcggcgattcttccacacagcggccggtcctcggcacgagcaccaggaggcggcgccgcgggtggagaagctccggtcaatggtggcgctagcgacgcgagcagcagcgtggcaacaacgtaactcgtcggcgcggcggccctcgcgtcatcggcacgagcaccaggcgacggcggggcgggtggagaagctccgtccaatgatggcgcccggcgatgccagcaggcggcacgcggcggcgctggtggagaagtttctgtcgatggcactggcagcaccgacgacgtctcctcagcgagagcaccagctggttgctggtgaggcttttcttggacgaaaagctcacgcagaccgccgtcatggctgatgctatcgcgatctctagcctggagtaagacgcgccagaggtggtggactgactgacttcttcctaagtattttgcttctgtatcgtgtatagcatcagtactctgtagcatgtgtgggtttgatgcttgctgctaattaaccagcagattatgaatggatttaactgatgtgatatgcaggcatactttggttgatctcccgtttgccatttaagtcaaaaaaaatgttaaatttgtcatatttatcataatttgtcagaaatcagaatagatttgaaatattttgcatgaaatctcagttcataacaaatgcaaatgtcacgtacaaaataggagtaaaaaagagtagttcaaagtaggggcaaatatgcaatagcaagcaatgatataaaggtcttttcgcgcttgacataacaccgttaaactgaccatccaaaccagggacaaaacactacttcgttttaaaaaaaaaactgggacaaagacaaaaaccctaaaaagtatgagcaaaacaacaattaaattgtaaagtaaaggtaagaatgcaatagcccctaaaaaaagagggagcagagaagactgtaccgaaaaaaaaaacctaaaagcccactagcggcaaggtagacatgttgctaacttcctggtcccacaagggaccatgttgtggtctcctccttgattttactgactagcccgattgttgacagcttcgtgtgttggaagattcgttgttttttttctttcagatctcccaattgatcagtagtgttagggtgcgtattgcttgcttcaacacctctctcgtctttgcaatcgcctcccaccactcctgcactatagtggcttgcctccactttgtgcggtttagattgtgacatgaaacccaatccacaatttccccccaaattctcctagtgtatatgcactctgctagaggtgcagtcctctcttgcgtctgccatccctttgttgcgagtctgtcggatgtccagaccctgttttcgatcactagccaagtaaagatcttgcactttcatggcgctcagggtttccagatgagtacgtcaaagtccgattttgttgaggcaagaattgtgcattgtagatcgacgtcgtcttgtactcactgtggtttgtaagcttccaggtaattctgtcctcttcactctctatgagttgtacaatttgggtgatcatcttagttgtccagccaacaccggtcagtaggtcggggtcaaggaggcattgaccgttcctgatggcctgctgtagtgatctattctttttcttgatgctgcacacactagcagggccatgtctttcagtctttttccctgcagttaggcggagtcccagaactttgccctagcttcgttgcctattgttattgttgttgtcactgcgaaaagtagtttgacgttttctttgcatggggtttcagatccgatccacgccttttctggtgatttccattcatgcagggattataacactactacatgctagagcacgagacgatggccgtcctcgaccttcacactggtcggtgatgatgggctgctgtaacgtctatccttcgtgaggcgttaaaaactaatctaatgaaactccatccgtaaaaaaacactctttggtttttatgtcgtataagttgtgccatagatgccaatccagatcctttcctcttgatgccaaaaatcaactagtactcctcaatattcctattccagaataatgctagagtttgaattaattcccgtatattcgaatttcttccctaaaaacttatccgcaaaattcctcatattcaaatctgatatccgttccacacttgtcccccttaaacacttctgtaaattcaattctcaggtttgaactccccaaatttacactccctgtggaatgcttcccaaaatacagtctcaagcctgtaaaattaattcattcccaaaatatccaaatgtccactttggttctcatccttgactcctctttcttttccccgagcccaaatatcaattgaattcatcgaatccaaatgccgtattaattaggtattcaaaccaaccattcaaacaaatccctgaaaatagtaaagtatcactattcatctggaccgtttcccctcctcctttctcctaaataagcccaacccctccttcctgtttgctcctttacattccactatggaataagttcatttgaggtcccttaactttacaacgaatccgattttcgtccttggaccccaaaatcagatatactcggtccataaactttcaaaaccggtgcaaacgaggtccatcggcggttttggctgacgtgcgcctacgtggctggtttaattaggtctttgtcccacatggtattgacgtggcgcttacatggcaattctatcctggaaatataataaaaaccttaggtccatatgtcagctacacacaaaaaataataaaaatggtggggcccacatggaccccacatatcattccctttccctcttctttctcaacctcactcctctcctttcttccagccatggaaccagctcgccttcctccccttcctcgcacactcgcggcaggcggcccgacagcacgaaggttgtggccgtcttcgggtgcttctcctcgcgccgcagcaccgcctcacagccatcgccgcctcatcttcctcctagtcccagttgccgctgccgacaacgacgcgtggtcgtctgggatgacgcagtcacgcaggccaacacgaagtcgacgagggggacaaggtctctatctcctccctttcgacccacggcgacgagaggagaggggagaggggagaaggaggcaccgccatctgtgggctggccaccggttgctcagcgtcgtccgtagcgccgtcgtcgttgtcgttgtcctcagccaccttgcccctcgcctgtaccacgaccgccgccagctccgcccgccacccaccccagccttcgcctactccggtcctattcttgcaggagagatagagagagaggggatagggagagagcgccgcagcgtgggcctgggcactggaggtgcacgcactgtggaaggacttgacgcggcaggtggcgccggacgtcgcggcgcgccccacctcctccctccctaccctaccccgctcaacgtcctccttgccttatccttctctacgcccgctccggccaccgctcgggccgctccgccggccggccgatctgccccgcctgtagcccacggcgacgagagaagagggaagagagaggggagagggaagaagggagaattgaggtttacatgtgggcccacgatttttattatttttttgagatcgaattgccacgtaagcacaatatcaatgtcacgtgggacgaagacctagtcaaaaaagccatgtatgcgccaggtcagccaaaaatggcttccaaacaaccaacggacctcgtttgctccggttttgacagttcagggaccagttgtatcaaatttttgggttcaaggacaaaaatcggattcggtgtaaagttaagggacctcaaatgaacttattccttcctctactaggccacgactccttatccttccattggtctcagcccaatccagtatagatggacaaatgggccacttggcctagcacgatccgacaccagtggagccgacatggctctctcaatggccgaaccgggccatgcccgcccacgggctccacttatagcccagacacgacccaataagagttgtgttgtgccggaccggcctatcgtgtccctcctcattgagttgtgccttatatatggcttgaataagtctattgtgcctcccttctctatgggtcgtgtcttatatatagcagaaataagtctatattgagtccctcctcgttgggtgcttgaagtaagtctattttgcctccctcatgtctcgtgccgtgccgggccagcccactgtgccaaggcagcggcccaggcatggcccaactgtcaggccgtgccatgcttgggctgggccatatatggccaactatacaacccagtcaatccgtggcccctcatttcttctccttcttcttcttcttccatcatcttgcgccaccaactttgtctcatcacactatgaatttcctctaacttccccttccacctagctcagtgaaaatttccatagccgcactgcagtactaggtacgatacatatgcagcgttagaaatactttccgaccgacggacataataaaaatgcatggaattatattattaattcatgaagatataggtagagagtagcacactctataagcacacgtactcacgcaattacagtagtagagacattagttattacaacaaaagaaagaaagaattaaagaaagagtaggaaaaacaatcactttgatgcatgcatatatatgcatccaaattaagcaaataattaagaaagcaagcaaatacacataatatatatatagctagggccttgggatggacatggaccccaataatattgatcgaatttgtgctgctttaatttgggggattactacgggtggtgttcaaccacgatttcgtggcgatctcgggtaatgccggtgtgtgtcgtgagagcccaaagcacggtgatgaactcgcctccttggcatagcacattcctgtgcgccatgatacgctccacctcgttggacgcagccacgtacacgacgatctccgtccacacctccgccagaagcttccacatgtccttttgtaattgtagcaataatgtggccaactctgcgcccttgcgcacgcttccctgtttcttgctgttgttgttgtcgtcgtcgttgttgttagccggcgatggattgacgatggcgttggcccgcttacggcctcgagagaaatagtagtggtaacagccgagcatatccttgagctccgtcttcatgtcctggaacaggtcctccgcattctcactgtagtcggggaggagatccggttggaacaccaccaggtaagcgcagtacctggacagcgtcagatcacttgattcaatctcatgtgattcaaggtttgaggatccaacacttaataacttaaacatgttatagggtatttctgtctaggattcaatcttccttgcacatatatgtgtagcgatgatacttgtcgaggaggttaaattatgaccttctggttcttctcaacattgaagtggtcaaatttcttctcatatcttcggaataaagctgatgaatgatctttgtatgttactattggattcaacatcttcctagacaatattttcttccaatcttttgtaatttctttcttaacttagatttcagaatctttgtctttactatctcataatttcctaattactttgtagtaactgatctcctgtattcccctactacattctttaactagatattgtattccttatggtaactaaaatttctcccttgtttgaataacatccgatattgaacttcatattctttatctgtatctgattattttctttaatggaaattcgtgtcttggctgcttatttggagttacatataaagaggtctatgctagcaatcctggtatataattcactacctatacttaagaaacatcgtgagatatttcaaaatccatgtagtttaaatggtagtgaatttatttccatggttgcatagaattatttccattcagtcgcacttttagttgctattttattcttcctgtacatcgaaattcttgccttcaaaatgattggcctgtagtatagctctttgagttgaaagtgtttaacaagacacttttctttcatggttttcttggtatctagaaaattgataacttgtgagtaagaaaatttttcataaatgatttgtgtccttctaatccaaatatattgttggtatccattcaaacttcttgtacatatctagagtgcaaacctctagctctagtcatgaatcttcaagttgtgtatagtcatcaatacctaggagagatcttgttcaagaaatattctcaatcaataattttgtgttgtctaattattttatccttgttgattcatgagcttctatgttgtttctcctcgtgtcaaagaaattgggaattcaatctttaattgaagatgaagaaatttctcgtagataatccatatccttttatcccaattttattgtcaatatccgttcagactcttggtacttgttgaaattgcaaattttcttcctttaatcatacgtttccgagtagcgacataatcaactatgtctagaaaggattttgtacttctccaactaatatttttgtatccttaaatttcttcagatctattctcctgttctgatatacccatttatatttttggtataaatgagtataattggtttcttcagcattacaatcttgactcttagcgggttcagatccatctttccagttcagggtcttgaataaaatatctctattattgttcaggcattgataattggttatctctggccttctttgtcttaaccttaacttataatctctaaattatgaataatcatgcttatgtgttgtaattaccatggcacataagtcactaatctactttcttgtataagccttcattctattctttctacaccttatcgtaataagactcaggttcatccattcagactccttttgtaggtcttgatattttccgttcagtcacgcttttagcttggcagagaaagctatctttaataatgtagatgtatgtatactctatggaaatgtctccataaagtgcagcgataaatattccatgaatattttgttcatagaatatcttggggtgctgcctagtcctaagcttgtttccataatgattattgtcttgtatttaatttggtaaatgctaggtagataaaatctcttgcttaactccttagcataaagtgttggttgcaagagtacatgtgctgacaatctttttcaaaatccaatatttactgtacctttcgaggcttcacttattcttctccacgacgaattgttcatcttcaagttatttgtcatacagagtatgcaactcctatacctgaccttaaagtccgaaattaccttaaccaataggagttctcagcttcttggatttgtcgctccatatactgctcaatcataatgtggtatctataggtatatccacctcttgttgtacttctatagctttaaattagtgcatcttctgaaaattggctctacctatggtttatgatggcatagagatctttgtatggatggaagaggtcattctcttctaggttacatatatttctaagtagggtagatgatggtttgggtacaaaatcttgtttgtacaggttattcaatggggtttggccttgactatagaatttgtacaggttattcagaaggtttggaagtggaggtggcttataactggttccggtggctttcatgaatcttctcggttggctgagtgtattcagagtgttctccatgaattggaatggttgccatcatcccatatctgttgatctccatatatttcttaaatttccacagtcataggttcttcaaccggatttctattatctcggtagttcttcatttgaaattgctccatcggttgaacgtaccttcatagccctcaagtatttgaattgtcacttggcttcataccgtaagtcttcttgatgatatagacgttgacgatagatcttgttagggtttaagagattaaaactatcctttaccttgcatgaaatcaaagcataaaatgggacatcttttcttttgatctcgcaaattctttagtccaacatatttctcataaatatctttgtcatggcttaggcatgtagaatgtcttgtggactagtaattcctcaaatcttgtacatcttgttgcttggattgcaataattttgactcatgctaacataaccaaaggcttttatttactgcccttctggaaataccaaggactagagtcttcggagggggttatattattatagtaaaatagttattcttttgaaaggaggtatgatgcacaaataaaagcaaaaaataaaaccaataatgaaggggagttcattctaataaaggccttagcaaacttattaggcaaaattttagtttttaacctaattatcctatataaatgggaagttattcataaaggggttagacaacctatgggtttaagactataggaaaacatatactctgataccagttctgtcgggtcccaaaactaatgattctgaaaccgacatatttagactgtatcaagccctggattagtagattgatacaagttcaacaatctggatcgtctttgcatacatttaaacatagctttgaaggagattttaatacataaagtaatagggcgtttacaagcttgtggctaaccattacagcagaagctatagaatgacctaactctgctgttttgctatagacttaaaccatctaaataatctagacttgaggactaagttaaaagggaactaacttatgtgattgaactcccggcttcgataagaactccaaaaatgactctgaaaaaggggggttgaagcaagggtgagtacaacgtactcagtaagctattatattaatcaataatgaatgcatgaaatggtaatatctgtgtagagctaggtttacttgtggaaagcagaggatatagaggaagaaagcctgtaatgttttaaatgcaacagtatttaataaagtttggaattaagtttctaaccaaataccatatgagtcccgatgctcaaatccgtgagcacagctattcgaatagtttcatgaatattcatactgcagtagatgtacgctttacccacagcccatgacttgttgataatcatcaatttcgtcatggcctagtattagattactaacaattgtggcacctgtttcattaactctagtccccatgcgctctgaacgtacgttatcagcaacgtgagaagttctggcgtttccgaggtatttaagggggactgatcgtatgataccatgtcatctcgatcagggtttataaacactacaacgggatcgcttatctctaacgggcataatacctcatcactttcgggtaggccccccatcactgagcaaaggtcagtgatgtgagaacatatctcaatcgggcatccgaccatcacggatgacacacatctcaatcgggccaacactatagcccgtcacggatgactctcatctctaacgggccaacactatagcccgtcacagatgactctcatctctaacgggcctaaattatagcccccgtcacggatgactttcatctcaatcgggcctaaattatagcctgtcacggatgagtataatccacaaaaaaaataaattttgttttttggctagcctcggacctttgctagccatgctcccaagccgggctcactcgtgtgcacccgggctgcacacttgaaaaaattttccggtcggtcacccatcccaaaattgctccaggccaagcacgcttaacctcagagttctttggagatctgcttccggaaaagaagttatacattcattcacatacacaaccatcaatatatttaacacaaccacgttcacataacatccattttgatcacatatttcacatccattcacatgtttcaccagcaaaaccgacttaattggagcaaatatatatatttagcaagtattaacacgatgaggaggaaaatcagacttctaggcaaaaatgaatttcgaaatgaattttatgataataaatgaactcatatgaaaaagttgtcaaaaacattgtttacaaaattcacatatctctcatctggtcttataaactagagaaaattccttgtatacccctaaaaatttagctaatctcttctatacccttgaattttacttacttccttgtatacaaccaaaatttgattttgatcccttccatacccctcccgtcagttgaccgttagttgaccatctaatttctataaaaatgaccattttaccttcagatgaacatataaatttatgaattacattattaaaaaaaataaaagcttctcgcatgagactatcatagttatgagtttgttgtgcgatgcattatttatcccaaaattatttttatataatgaaataaaaatatgtatttattttttaaaaaaaatcataaaaaatgaggagcattcatacaagataggaccaatgttcacaataatggttttatgaatcctcccgataaaaaaaatccattgtcctattaaaatttcaaataaaaactttaatttattacttttgttttattttcaaaatttatgtcaaaattttctgcattaattatttagtctcattagtttcataaaatgcacatactgcgcactcaaacaaaattttcaattgtttctgaaggttatattcaaacctaaagcatcaagggcaaaaaggtcatttgcaaccaaacgtcatagtgaaatgatggaaaatgtaacggtaggggcatggaaggaatcaagttgaaatttcaggggtatagaagggatcgggtaaatttcaggggtacggaagggattgggtgagttttcaggggtacacatggaatttactctataaactataacacagatatgtaaattttgtgaataatgttactaacactttatcggatgaagaaatgacaaaaataaaagttatagatcttgatgagttatacaactttgttgttgatgactttttcagttgaaatcatttagtatttgaaaatattgtttgaagttgtcatattttcaaattcaaattcaaactgttcaaaaaaaagttatatagaaaaatgaccaaaataaaagttatagatcttgatgagttatacaactttgttgttgatgactttttttagttgaaatcatttagtatttaaaaatgttgttttgaagttgtcatattttcaaattcaaattcaaactgttcaaaaaaaagttatatagaaaaatgactaaaataaaagttgtaaacattgataagttatacaactttgttgttgacaatttttccatttgaaatcatttactatccgaaaaattattttgactaataaaatgaattattatactacagttaattattttgttacaggtcaactcacaaatataaatatttcatatgaaaaataaaaaaacactaagtcatctcaatcgggcattttagtatagagcctgtcacggatgagtcatctgtgacggacctagttgttatcgattgagatatggtcgcacccgtgacgggcaccaacttggggcccgattgagatatggaatgttatctcaatcgggcctaaactacggcccgtcactgataagtgtcatccgtgacgggcatgagttttatgcccatctaacatgtttgtgcgaccatatctcaatcgggcgttttttcagcccgattgagatgacttccttgtgacggcccgctaattctagtcatgttaaaggccgtcacggatgaaaggatactagtgaaataaaatcacatacacagtgtgcacgatatttacccttgctcgataaatataataagagagaatccactcagtgccactgagtttttcccacttctacaatctaccactgactttgtcaagttgaacaatatgccatcgtgttttcccaaacatctactaagtgccatcgccatccacaagccgttaggatgcatccgtttagtgtattgattttttttcttaatgactaaaatacccttaccttagcactttgactgaagaccctagccgtgcaatccccatttgatctgcccagtgtgtggcagcgccgactcccatcgatggaaggccagccgcccgagactccgaatggtggcgtgatttttcgggttggaatggattcaatccatgggttaaggtctggatcgatccataaatcacgaccaacccactcgctcaggtcatgtgctactagctgtgctctcctcttgcaggtcatgtgcttgctttctgcctcccccattatccatggcggcatggcatctctgctgctggcagctgccacgccggcggcagcggctatgcctactccacggaaacgagacgaggtgcccggtgccccaagggaagcccggactgctgcgtcgtcggcaagcgctacccgcggttcatgtggctcacagccggtatcggacatgcgccggcgatcccgacgctgcatatgtgcttccgccggaacatggagctggtcgtcgagctgtactccgggtctgggtggctgtgcctcgacgacggcggtggtggcgcacgctgccgccgctgcaacgggaggatccgcgtcgtcgtcaccgccgccgccgtgaatggacggtctgtcgttgtcagggtggtggacgagtgtgactacgtgaacgggtgctgcaacgaggacggcttcgcgcccccgtgccaggacaacgttggcggcgagtcgctgactgtgtggaagaagcttggctcaacgagaacaggggcaaataggtctttttacagctctaacagatgtctaactaacggcttatggacggcgatggcacttagtagacgttcgggaaaacacgatggcatattattcaacttgacaaagtcagtggtaaattgtagaagtggggaaaactcagtgccactgagtggattctctcatataataattgccctgctcggcatatagttgcctcctactcgatgacttaaaaaaagaaccactgtacagaggtactaccttgttattaacataatactaaatctatccccatacttagaactatggtcgtacccgttcgttcttcacaagtacttggccagtcttatgtcggttggaacagtactagccacccggaaatcaaccaattctaccgtaccgttccaatctaagttcattatatttttatgcagtctaactaggcagggctaagcaaaagctagcatatctggtttgctatgttcaggttatgcatttgaaatcatgaatgactaatgcatagaatagaggtatagaatatagggcatttatgctcaaaaaggaggaataataacttgccttactccaacgcaaataaatccgagataggcaacctgattatccgatcctcgaaataccacaggttgccatccagaataaaatagactctactgaagaagaggaagagccaaattcaataaaaatctatgaaatatcaaaagaacgataaacgacttaggaaggctagggtttagggtataatctattcctttggtagggtatggggattattgggctaatatatcatgtataggttcctaagggttggaggttagggtagagaggattaagtaactattgtcgcttgtattttatgtgcaggttttggttggtggaaggataggaagtagttggataattggactggttaagtgggtatatggctagtatttgctggtggtaggtttaggtagtataataggtagggtttagttatatgggagttgattgtggagtaggacagcatatcggctaggctctatatgtataggttttggtaggtggagagtaggtggctgagagtatggtggataggtgggtatggaatttgggtgatgacgggaattaactaggaaggtattggttagggtttggttgctagtcgttgctagagttggacagcataatgactaaatttgatatcttctctagccagtgtcatcatacagcataacgactagaggaataggaagtttgtgtaggaagtgttactccgacaaccgtgagtagcaacggagcggttaggatcacacagagcttaagagctaactatgcggtgtgtagtggaggtcgagggaatagtgaagctccgaccattgtacgcattaaggcgtaaggtgccaggagcagcatttcgaccttaagtttggttttgccggacttaacaaccaacggttcgacgtcggagtcaatagaccgcgaacgtccccatggaaggggtaaagttctaaccagtggcttttagtggctaaagggtatttttaaaataaaaggaaatatttgaaagttaaatataagtttcaattataagtttaaatcaaatatttattcaaatggtatttgaataaattaaggaaattcaaataaaatcttaaaatagcaaatttggcatcaaaatgtagattttgaatttagatgaatttaggtccaagttttactggaatcggatctacggtttaggagatatgggcttctaaagaataggatttgaattaaatctagaaaatataaagtggtactgtacgggggcccacctgtcagcctttctttttccatttcttcttcttcttcctcctttcgttttcctctctgtctcacagtgagccgagagaagagagaggagaggccgagtggggcggcggtgctccggtggctgggaggctgcgacgttggcggtgggttgtgttcccgagcgacgcgcacccggggagggtggtgtatcgaagagaggaagagggatgtggccggaacggcgagtagaagagtttatcttcggtggtaaagagagggggggtggtggcttgatacaaaggggaaaggaaggagagatgggcaaaatggattcgctggagtggagccagcatagtggcgcaagggaagaggaaggggagctacgaaggaggagatcggccgacggcggcgacggccggacatggatggagggagacagaaaagagcttcaagctcgatgtggggaaatgatggggtattgccggctatttataggcggcgaagggcggtggtcaatggcggtttgcagaggggaagagggagttggccttggtggcggcgacgtgagaaggaagacgacggcgccggctgtggcctgtgattggtcggcgacggcggcgcatacacgcggcggtcgcgggagggttgggtggcggcggcagtggagtgcacggcacggagatggctttgccgtggttggcaaggcagcggcggcggcaagcgtacgcgcgccacgcgcgcccatggcgccggcggcagcgcccacagaaaaggaggcgacggtggtgcggctgggagttggatgggccggtttgggccgagaagggagatgggccgaagggagagagaaggggatttcagcccaatgacaaaaaggaagaagtctaatttgaataattgatttggatggctaggttttgcaaagaatttgaataggaagttttggaaggaaatttggcaaaggagggattttccaatttatttgagtgcaatgtttttggatatagaatataatggactaaatatcaaagcactcaaatgagaggggaattaacaatataattcctcaatatatatatttggaggaaaatggttggaggtaaacataaaaaggatttgaatcctaaatttgatagcaggaatatttgaagaattatttgtggctaatagggaatcaatttggaagaggaggataaaataaaaatctattcttctcagcacaagagcaatcattcacaatatttgtaatattgctattcttctgccaaataggaaatccaaccatagagattaacgatggctagatcaaagggaggaatttggatatttaaaatttggaaagggaactaagtataggtttggaatcaaagcataggtttaagatcaaaggatgggttaacaattaattccaatggaatcggaattacggttgtttaggttcaagggcaatatggaaaggatttttggaccataattcataacaaaaaaaaagggttttcgaactaaatttaaagaaattatggtcggaggaaagtattgaatcaaatcaagaaataacccaagatggttttaaatagaaaccgcaaaaggaaattaaataaaaggagaggttttgagttagttttaggaagtctctctaattataatattctaggtttaagaagttattaaaaacataagaatcggcgtggtgcataattagaaaattgttaattttcaggatgttacagtactggattgacgtcaagtatcgcagacgacggcgagaatcgacgcacggctcacaacttgcaggccgtccacggacagcaattcctctcgcagagcgcgacagattatttaacggtgtaaaccttttagagtagtggtttctttttaaatttggacctctccgctctccggcccaacgaaagcgacgacgaataaagtcattattatatattagcagtgcgtataatttctgttaggaccatgaggtagagtaatgaacaatactctgatcctaagctgagaaatcaatgtatgtgagcagaatatgttcttgcatgcagctgcagctgcagaaacagctcgtgattagcagattgcatttagtgggtgggctgtcaaatcgatcacagtcacagaaaccacatgtgagcagaacaagttcttaacataggagagatgacatagcaatggaaatggcgaattcgtgatgcacatatataaagctagcaacaggtataggcgatgtgtgtgcttgacagtgtacagtgcagaccatgggtggcgacggcaagcacaccaagttaccatggctgggcgtggcgaggtacgcggtgaccgcggtgctcgcggcgacggtggcggcgacggtggtgctggccatcaggatggtgctccggccggtggagctggacctgtcggtggccaacggcgcggtgtccgtggagcggccggagtcgccgtcggcggcgtcgctggtcaagtacaaggtgacgctccgcgcctacaacccgagcggccgcgccgtggtccacttcggcggcgacaacctcgtccgcctcatctacggcgccgcggcgcagacggagctcgccgcgttcacgctccccgcgttcgtcgtgccgcagcaggagtcgcacttcgtcaccaagtccgcgttcctgaacgcctccgcgctgccggcgtcgctcgccgcgaggctctacgacggcgagaccgaccaggtggtggtgcaggccgtggcgtcgctcagcttcaccatcggcggcgcgcgcggcgtgagcgccggcaggcgcggccacaacttcaccttccactgctggccggtgtccatctccagctactacgaggtgtccggcggcgaggcgtcgtgcagccaggacaccaccgaggcggcggtcgccggcctcacccacgaccgctgcatcggcggcccttgcccggagccgtacaagaactccggtaactgctccgggaataatagcaccggcatcaaggggtgatcgatcagctaatttcatttcgcggggtgtaatttgatttccagatgctactgtaattaactaatttattacaaattgaagaaataattgtattgaagttgtgtactgaaacttaaattgtgcttgaacaatgaaaaagtggaaactaaaggcattttgatttgttgccacgttcaacccgataacatgtattgtacacacaagtttagagtgcacgctcaattaccatacacatcagctaacaagtaataaaaattctaaacatacttacaagtacgtgtgcacgtactacaactatacataaagtttcaacttcaagtttaactaaacataaattgatcattatcaaaatatgctaaacttgtaattttgggataattttgtttttaaatatgtggatttgtgatgcttggctctaaatttatagttttatgataactttagtgctaaatatgtgtttaatgatacaacgtctcaaatttatagtttttatgatagtttgatcaaagttatatacatagttttgtcaaatttactctgaactaaaaaatatatatcatcgagccctaaatcaaacaatgggcctaaatcaacgagaacctgtgctccaaaacccaaactggaaacgtgaagggcccgtgaaataagagatgagctcaatgggccttggcctgccaagaggcccatcagatcacacggcccaataggaggccttcgagaaggttctccgctggcctcgcacgctctggacttcttaagccgcaagcacgcgacgcgacggcgaggccacacgacctcacctcgccaccatgcggctccccggcgacgctcgcctcgccctcctcctcgctcgccgccgcgccctcccctcctcctcgcccgccgcgtcggcgtcccccttccacggctcgcgcgcccacggaggtgagccgccgccgccgccctcatccccgcactgtggctctcccgatttcctgggatttccttccagtgtgactgatctttctttctggttggttgctttggtgtgcagcgaggtggggcgacgcgtttcgcgccgcggctcccgcgtggaggtcgccgttctcctcgccgactagtgccaggctcttccacggtgaggacaacaatggggaaaaaggggaagaagggagatgctgctgtttctggtttggtgagcttggctgagtcgattggtgatgttggattcgtgtggctctgcagggacgaggccggtggcagcgagggactactacgatgtgctcggcgtgagcaggaacgcgagccagggggagatcaagaaagcgtattacgcggtatggttggctctggaatcaagactatgtcatgcttagggtgtaaattgagcacaccaacgcggcacatcttagttctatatcgcaagtcttgaattataaagtgaagactaaacttttagttgctaattttagtgatagactttggaagttcccatcattacacttcaggacttgtgcatagaaagatcatcacccatttggattttggaacagtaatgttaaccgcaagttgatgggtatctaccagtttttttgtctaccagaatgtttctgaaaagtggttgatggactcttgagtaaagggcagttgaggttgtttgatttaccatttctcatcctcaattttagttatgtattagccttgtgttaatatagaaaacattggcatttcctttccttatgcaccatcgaaagaaaaaaaaaatcatcgcgtattgtttacctcacaatccctttttttttctttgttgtcctaaaagcttgcgaaaaagctccatccggatacaaataaaggtgattctgatgcagagaggaagtttcaagaggttcagcgagcttatgaggtacagttttcagcatggaatacataggtaaaggttattattagtttctgataatatactgagacatacttatttttccttctttgcagactttgaaggatgatcagaagagatcattatatgatcaggtaacaatttcaacctatttaattgaacaaatgccaacattttagctgtcaatgcctaaggtctattatttaaattaccatgggtctggaacctcaatttagtgtttaccaaggccctaggctgcctgcctaggtaggctagacaggaaggtgctgccaagccgcaagctttcaattaccttgtagagcactgcccagattcattagttatcctattctcataattagtggtagtaataattcaacttgactattatgtgattattgcttttcgttgctataccctagggtcagaagctatgtcttagaagtttacaatacaagcttttgaacacaaacttgtccttgacatgatctattacaggttggccctgatcagtatgagaaagcttccgctggaggaggacctggtggtgcatatgaagggggttttggcaatccgtttgaggatatttttggtggaggtggcggcggcggtggaatgaatgatgtatgctatcttttgtttaattatttgtcatctggttttattctggtggttctgctcccatttagtttgtattgttttctatcactcatgttgctgagtatatacagaaaaaagatactgttgtctggaaattcattttatctttgtagttttatagttattgaattgtttgagttttagcagaaacttgtgtcctacatactgcgacattgcctctttgatactttttccataagtggttttctgtttctttcattgcattatttaattattttacagcttgataaacaaatggcatctcatcatccttcattttatagatgctgatcacataaccacatgctcgtatactttaatcatatgagtataacggcactaatatgacttttgttgtctgtgtgtataatgaagttctttagaaacatattcagagagagagaatttagcgggcatgatgccaaggttagctctatactcatttttttttcacctatcatgtttttgctctgtgaatcgcagtttcatgttccattctacaggttgcacttgaaatatcatttatggaagcagttcaggggtgcacaaagacgatcaattttcagactgctgttacatgtgacacctgcagtatgtagatgcgcttctatttactgcacatatcaaactatcgatgtcctttgaattgttcctaatcatctaatgagagttctttgttttcccagagggagctggcgtaccccctggaaccaaacctgaaacttgcctagcctgcaggggttcaggatttgttagttcttcctctagcacaattatttctatttaatgtggtatctcatttaaatgttagtactgtgcttatttgtctttgtttttcatgtgctgttggaagatcttcatgcaaactggtcccttcaggatgcaatcaacatgcacacagtgtggtggtagtgggaagactgtgaaggtatgatgtccctttgtgttgataacctgcagtcaggataaatcagttatctagccttcaataaatcatctaggaggttaactgtttagagttgttgtccttaggacataaaattccgtacctacctgaccagaattgctttgtgatgtagggttcggtatttctaaatttgaccatcttacaatccttattcattacgtgtatcaacccctctgatttttttcaatttgtggtcatttaacttgtgatgcaggtggttgttgactgcacctaagtccagttgtctgatattagatatatgaattgaaatcagccacaacaataacttctgaaccatgctgttctttatgaaataaatatgcacttgacctctgatgttatatttgctcctatataccttttgtacagtgtctagattctgattagtcacgatgagctggtgattgcaatgttcttgtgttgttaggaattctgcaagtcatgcaaaggaaggaaagttgtgccaggaacaaaaaacatccgactcaacatagtgcctggtagttttcaaattgtcagcattcatgttatttgtacgcatatactcttattttgtgttactaaatgtccttgagcattattctgttcattcaggtacggatgatggtgacgttataaagttggttagatcaggtggagcagatccagatggtggtagtcctggtgatctttatgtaactctgaaggttagtcctctgcacattagcagttataccattggccaatgaatggtaataggcagttgaaaccttactttgggatcagacaggaccaagcactcggtgcaactagctgtaggttgatcccagtgcaagagtagtgtctggtcatttgttccaattcttttccccttgatgcaatgatgcacggctctcctgcatatttgagaaaaagatgataagcagatgacctttgtaatgctgttttttccaggttcgtgaggatccggtatttcgaagagagaaaggtgatattcatgtagatgctgtattgaacgtgactcaggtaagttgagcctgattattttttctgcatcctatgcttatatttgccactgcacagctcagtaatggacatccctagcgggaaaacagaaaaactcagttaccggccatacttcgttgtcactacattctgttttggctgagctggtaatctgagtgggagtgtggtagtggtctgtaagcaggattgtgcatagccttctagggctgggtgataacaagttagtgttagcagattatgtctgttccctttaatcttagaacaaactgttgttattagactgttccttatttgccacagagcaggcaaacaacaattgtttttcacagtagtttgaatgttaaaactagctaaagtatgttatctctagcgagtaacgatgctgtggtgattgtctgataatctctagtgatactaaacaaaacttgtaatgttgtcgagtaggcatctcctccacagttctcatatttcatcagtattcagattaagattaactgcaaacatctttgtaggcaattttgggcgggacagttcaggttccaactctctctggagatgtagttctaaaggtacctccaaaatcagtttaccctcattttcaatcttctcctttgtttattatgtcggaattctccatctgccttgcatattacaggtcaagcctggtactcagcctggccaaaaggtggttctgagaggaaaaggtaaactgcactacatagtgtttaccttttcgtggggcaaaattttttttttagttagcataaattgcatatggctgcatgtttaatacttcatgctcagttacacatccaagtaaaaatggagtctgcaagggccttgttttattaaaacccagtgccgtcatggctcataaatttgtagcggttgatacatttcattttgcctatagtgataagcatcactttatcctgcaggaatcaagacgagaaattcatcgtactatggagatcagtatgtccacttcaatgtcaacatccctgcgtaagctctcctcggaacttactgaactgccctatgctgttactagtacttctgttcaaatattcatgtattacttatacacaggaatttgacaccgagacagcgcgtgctgatcgaggaatttgcgaaggaagagcaagctgaagaggagaaagacgcaaaggcagcaggagcatcgggatagctgattttaggagcgacccgtacatttgattagtgctttagtctcatcatatatcgcgagatagaataggctgctgcctgaaatttgcaggggcaagaagatatagtttggttggatgcatggaattttacatgccgacatatagcagtttcaaattttgtagctgggaataatatacaccacgccgcctgatgtttgcaatctcctaatgtcactagcatcagtgagacaggcggcaggatcctgtattgtataattttgtgtgttaagaaagtatggaactcacggtaccaacctctggactcgtgccactcgttgagttgatattggctctattcatttttcaggttctcaattttgttcccagcaattcttgctggaaaggacactggaacagaacagagttcataaatctttttatgcattgtatgctggcaccgaattagtatttcagatgatgtgctgaattggaatttgttaacttgcttaaaaaacaatccaaatatttgtctcgcatttctgtctgcatataattcgtcgtcgtgactaatgtgactgaggatggatcggacgaattctgcagttcttgcatgccatttttttttggagtaaatttcactttggactagttttatttacccaagttgcaaattggactaggcaataacacatcttttcaacttggaccagactttgttaccataatttgcactttagtctagtgggcccatgcgttagtgactaatgtgttcttcttcctcacttagcttgatgtggtgttgctcgacgagctgctctcttcccacatggggggagctcgaggttctcagtgccagcaaggagagctggtcaagcacaagcacaaccactaccccacgtacgtaccccgtagtgctggcgagctcgttgattggtctagccttgctcctcttcggtggagacgaagcaaatgcacatcttggtgactgcagccccaccgacgagtggatatagtactgcaaaggctttggtgaagatcaaggaagtagagcacatactgcagtgggagctgagcttgaccttgatctatgctacactactaaacatggccttccttgctcagatcggcatgcctgggcaattggagaagaaagagaggaggaatcgagagaactggaggacaggttcaaactgaaataatttgtaaacatagctagcccaaggtgaaaatatggatttgcccctagcctaaactgcaacattggtgaaaataggtggaccaatgtgcaattcactcttttttttgagattcctatgaaattttacacgatttttcaaatgaattagttcgctttttgtagaaaaagagaactccaaaattcgtcgaatccaaaggctgcatgcgttgctgaattctgtccacacgctctccttcacacagcaaatgctggtctcgtgttcatctccacatcgccggagaagaggaggatgatgacgtcgacgatggcgaggcccacgatgctggcgtgctgcaagctctacatctccgagagccgcaacgccgccgccctgcgcgccatcgagcaggcggcgtgcggcggcggcgccgtcgtcgtcaaccgcttcaccgacgacgcctacaaccgggtgggctacacgctcgtcgcgccgctcaccccctcgccggcgccgccgcctccgccgcagtgccgacgtttctgttcggcgcggtgcaccgggaggggaggacgctggcctccatcaggaggcagctcggctacttcaagcccaactcctccggcgaccaatggcggggagcgccggagacggacgccctgcccgtcgcaccggacgccgggccggagaggtcgccgagatccaagggcgtggtggtcgtcggcgccaccggctgggtcgacaactacaacgtgcccgtccgcaccggcgacgtggaggcggcgaggcggatcgcccgcgccgtcagcgagcgcggcggcgggctcccgtccgtgcaggcgatggggctcgcgcacggcggcggcgtcgtggaggtcgcctgcaacctgctcgacccggcgagggtcggggccgagcaggtgcagggcatggtggagcggctcgccgccggcgagggcctctccgtcggcaagggatatttcactgattattcgcaggataaaatcgtcgagttatacttcaaatcagcagctaacactgagggttaactgcagtgcgaccactgatcactgagagtccagcggctgacactgagagttaaacttcaaaattgaaattgagttgatttggttggggtcacaagttctcgaccagtgatcactgatgagttctaactcaagaaatgcaatcacactttcacgcgtaacattttaccaaaaaacataacaaaacaaattcagagtagacgacatgtagctcgctgtgaaaatcatctaactgatttacaagtgtgcacatggccgaagagttcagcagcagcaatgcattccaagccaggtactttcaagttttccagtaattacagaatgcgatacatccaaagatgtgagaatcaccagcatgaaaaatagcaataccagcgacaaaactattaaagcaatttttagattgttccattcagcatatgctagtaaggcctcaagccacccaggcggctttgttatttggcttctgataatcagatcaccgttggttctccctcctccgggcgtatcgggtcctgtcattgtacctaggcctatctgatgctctttgtgggacaggttctacccgcctctgcctctccggggacctctgaacaatctctccattgacgaagagctcagctgtaaaacaaaatagaaatagattatatggcatgagtataatatctttccaagaaatcagagtgcagcagagcaactcatcctaccaacctcaagccaatagattcacacaatggtcagattttgttcagcatgtaatatctactctaaacaaactagattaaccaaaaatacaatgatgcatttaatgtaacctctgatgtctcaaatacaaacagttaaagccagtgaccacgaataagttctaaatgtttcatctcaactgatccacacagcttcactgtactgaagagcagaagagaaaaagaagagttctctttaagtccattagcattcaaaacaaggcattgcctaaatagctatcttgctttgccaagatggactgcataacatggcacaaatccatggggaagtgcataaattcattcacattcagtaagaaaccataaatgatatgataaaaaaagccaccctaaattatttatatagctaaatgtgccaccttcaaatcaggtaaaattagaaagcggattctaacttgtcatagggaaaattttcaacctccctatgtttagtggcatgaccatgttggcatgtttcatccccactgacctgtacctcatttcatttgaggtgcagaaccgttgaagagacattttttattagtccattagcattcaaagcaagacattgccatataggcttcaccactttgccaagatggactgtgaagtctagaacagcagtttggtactgttgagtcagcaacataccaaatcgttatgaaacaagcaagcgagagaaacacaaaattgttttaatagctaaatttgccacattctagtcaaggaacattgggaagtggattctaactcatcatagcataaatttcaatttccctatgtttaatggcatgatcatattgcatgtttcatccccactgacctgtaccccattcatttgaggtgcagaaccgttggagagacacttgttattagtccattagcattcaaagcaagacattgccaagtaggcttcaccgctttgccaagatggactagtatgtctagaacagcaatttagtattgagtcaacaacatactaaatccttaaaaaacagtaaaacatcaagactcaagggggatgtggcagtaaatacactgttagtgtctctatctacactgatctgaaccccaatttggtaaggtgcagaaccgtgagatacatttgctattagtccattagcattcaaagcaagacattgccgattaggcttcaccgctttgccaagatggactacaggtttggtaaacagaccaaagccttgaattaatcaaaaactgaagaggtggtaaagtgttcttaatgtctcatctccactgatcagaaccccattttaccaaggtaccgaaccgttagagagacatttttttcagtccattagcattcaaagcagggcattgcctatatggcttcacagctttgccaagatggactactagcaaaacatcagtatgtggtcggaataggctcacatgccatgaaaacagtctacatacggtatccagacaatgttccatttcattttgatgcagttctattaaaatatactttaacttcgatcgcattatcctgtaaaaatggaagcaacaaatgcctataggggggccaattaggatatagtatctacaacatcagtcaatcagtgatcatatgaaatgacaaagccattgatctcctaagaaaacctgcagaagttgtgaggttgtgcaagaaagctacctccatagtccttgtactcagggtcgacataggaatcagggaggacaaacagaacaccaggaagccctgtcatacaacacatacatagtgcatcagatacatgaacacacacagtgcgctaaaagtattctcattccaggtatttataaaaccaaaacataggcaaggaacaaaccttccagcttgttggacgtctcctcatcgatctcgcacccgaaaccaaagtatctctcgcaggagacgttgtagatcttcttcttcgcctcctcctcactgcagcaaacacaaccacataagaaatcgacctccgaaccaactaactggaagtgaggagcaaatacatggcaaggttagcacaaactgagagacaaatcggcggagagagaggcttcaccttccgaggaccttggcgagggtctggatgtagcagtcaatcatctgctgcttggtggcgccctccccgcctggcttgtccatcacgatgagccagtgctcgtagtcgcacccggggaacagcggggccatctccgtcggcgcgcggtctccgcctcctcctccgccgccaccggaccgcatcggggagtacccatcgccgcccggccgccgcgcgaacccgcgaaggaagccgacgcgcgagaccgcggcgacggtggggcgcagcagcgactccggcgcaccggggccgccgcggcggaggagagcggaggccgagaaggaggtggcgcggcgggagaggagcctccgcgcggcggcggcggcggcggcggccatcgcggggtaaaaccctagcggagtgaagggagaagggacaacgcaacgaaggctggggtttggaatcgcgaatttaaagctgcgtggcgttgaagtgaggttcgtgtttagatgggcttttagtaggccgtatttgaggacgaatgaagcccagtgaatgaaacatcacactggtggctgatagtactgagcaatgcgagcaatggcgtgtttatgaagtttcaggatgtcttttacgacattattcaaatccgagtaatttacaggtcgaaaaattcaaactcaaacgtgtaggttacagatctgtaaaaaggctatatactccatccggtttttaatatatcatgccattaacttttagacatttatttgatcatttggcttgttcaaatcttttttacaaacatacaaaatataagtaatacttaaagaacttttaatgataaataaagacgcaactaaatatatgataattgtataaactttttgaataatatgaatggtcaaacatatcacaaaaattaatgatatcatacattagaaatcggaggaagtacactctattgaatataaaactaagaagtatataggaatctcaaaggccaagcaagtgataacgagttcaatttacatccaggagaggaagagagcatctaattgaggtgtcagatcgacaacaattggctacaaagagaaaaaaaaaaagcaaggtaccacgttgagttgtacatgaattggttttttctgtatgtataatgccgtataatcacatactatatgttatctatacctactagcatggtgtcagaaaaatctgaaaactgtaaagacagattggaggatatggtcgcgcttccagtcctgaaatgacacttttgccgtctcaaactgcaaactgctgcagctaatcaacagaaaatggagttccgagcaaagaattaaagaatctgcttcaattgatttcattcccttgaagagctatttatcaagtacaggaactattgctgagctgggttcgatattggatagccgtgcagcacctagaagttgctccgggagctcgtcgtatgtgtttgcctgcaagtgtaaaggtagagaaatgtgaaccagttgagatatactactgtttattagctatagaaacataagtcttcaaagttcaaactggatcttgcagtttaatcatttggcctacagctgataaaccgtaaaacggcttattaggaatcaaaaataatttgagtaaaacttttatatatcattaccgacttaaaagcaaatgctgaaaaataaactatgttaagaaaaacctcaagatcaattctaaaattaagtttcaaaattttagttttggctgcggctgagccaaaagggtgctcttggagagtaaagactgaagaaaatgagggagccactgagcatacatacctgtataagaaaagccatgtcaactattaaagtcgtaacgacgccaaacaccaagcccagaacaccattggccactgctgaggaaccaatgtctacatctacctgcataacaatatcaaaaataaatttgtttgttcaagagatgccctaaataacctaatgttctactgcttcagtcatatctcaactttgccaggtatttacatgctcgaataatgtatttctccagtaattaaaataataggagttgtgttgtgttaatatttaaggtgcctatattcagtgtctcacttctatgtactcttgaccacgcatataactgcaatcaacagcctttcccaataagcaaggggtacttccgacgctctgtcgcactatccaagatccctgaagaaatcaacatgctcaagtgagaaaggccttcattataaatcaacagggctatacactccgaaagttagaccagacctttggaacagatgggatgagcttcaatctgctatttcggaaatcatcatcgccatcagcaaaacgttgtaacagtgatcctttttccaaggttcttgtaacaaaatagaggaccaagctgtaatggcttgatccaggaatctgcaaatgcaaacagacctgatcagcgtgaccaaaataaagaagacgagccctgatggaatcacagaatgaaaactggtatttttcaagggaaaactgaaagcaataatgatttttttctctaagcgaacaaaataatccggcctaagctataaacaagccaacaaaactggtatgatcattgaaaactacacagcaggtcactgcatctgctctcattggcaatgttaatcaaacaaaaaaaaacaagagattctgagctagggttttgtcaaagtgtaaccagggagttctatttttcttctaatagcaattgtgcaaggaactagtttgtcaaagcgtaaacaatttgtcaaagtgaaaaccaggagttctcttcctgtaaggaaccccgtgagcacagcagaaagaaactagccatggaggagagaccataaaagaaatatgatcttacttgaatgtttacaacaaaggtgaacatccccttctcagcagcaacctacattggtaaaagttcaatgagaatcatcatactattagtatagtagatatacttcattaggacctcacttaagttcatgcagataaggaagattgtcttcagtaccatatatataatatgcatgtgcaaggatctcttttatcaatagtcaaactggaaaacacttaacatcacaacaaagtttcaagcaaaaaccatcaactctgttaacataattgtgagatacttgctgattgcaccatctcactgattctcatcaactttcctatcctaagtaatggcgaagtgacgcgcacttccaatttcaaactatgcaagataaagtctaaaacaaagatcaattaaaatacagtccagataattctgtcaaactgtatcaacgttcataattttacacatatgtagatcttacagcaggttatttgttcacaggatacatataagtaattaggtacatattcaaagtgctcactactagaacgcagagtaactacctgaagcaatgaagcttctacacagctaaagtttaatatgcaatgaaaaaagattgatagcacacacaaggtcgatgaaaagagtttggaaaaccgatttgtttacaagtacaattctggtagaacaaacagttctgcaaaaggtaatcgttctatattattccaattttcaagtgctactttgcatattagacactggaattttaagcatagacataatcatgtaatagtggatttcagaaagaagggcacctagatgtgggtagagcatgaagtaaccataaactatttgcttacctgagctgcacatcctttccgcctagcaacatgatccattcgctttatgtccctaagccagtcgattgctacaagctccataaggtactttgttgcgggaacctgtaaagtcaggtaggaaatgcactaagctcttaattgcctgctatacttcagaattaggaaaacctgttgtgccacttttaatgtttggacctttgatttgtcatgtggaaagctctcactacgaactttaaagagcttgctatcaggtactgtccagcagttacggcttttctcatttgcatcccgacgaataatgcccgaaaaacaagacaaatctattggatctgtatcaaccaatataatgacaaaggataaggttaaaaaatgataaatcatctaggcaaattatacacatatcagactaaaagaacaaacctgtgtacttagcatcactgtcagatctggtaggtgcctcctgtacatgaatcacataagacttcagtgttaaatgaatcagcagtaaaactttcttcaaactacaaaaatagtacaaatgtaagtgtagtatgtattttgacctcaagattagcttcaggaacttgatagtcatcatcttcttctgactcttcatctatcatatccaaatttttgttatcgacttgtccaaaatcagcttgttttgtctttaagtcagtttcttggagtttcttatcctttttcaatttggacacagtagccatagtactcatcacaggaatcctcggaactggatgaatatcatcagtttgggaaaagtactcacgcaatcctggacataaatgcaaatgttagaccaacatagacacatactatcaacacgaaagaacgttgtgattaattaacagtatttatttgtcatttttagcattcacgggaaattaggacatgtcatcaaaagttaaaagaatggtttgtactttgtaccagcaacacagttgagcatctgcaacaaagagtagtactggaacgatgaaaaatagttgacgccccatccctttagatcaatttgcataaggtgttgaacttgagtgcgtggtctcccgttgacgcatttgagaggagaaattttaaaacctccacctgaactagtaggaagttaaggttaaaaaacaaaagttgtgcaacacttgttttaatatatcaagcatcctgataagcagaaggcaaattactttcaataaacgccctcacaaatcctggttggggaccacaattctgatgctcagtagatcggaacagtacaactgcaggtttaagaacattgaatcaaacaagttgcttcagaatgatgaaagtgaccaacaaggagacatccaaagattaccataacttccatcatcattgcgccgccaatatcgtacataacaaagatcccggggccagaccaacctacatgttcagttatctattaaattagatgtagctatgttattccaaatctgaggtaatgcaataatatatcgatataaagtaaagaacccaggtcttgtggagtatgatactgccatatagaagttctcatcctacaattttaatttagcaacagttgtccaaacagcaaaaacagtaatgaatttggcagttggcattgccctattgggtgcagaggcaattccaacaagtgaattgtacaatatatgccaggcataaatattctacactcaagtccaaatgaaaaaagttcgtgctcaaatagtttatttagactttcaataagatataaaatgcaatcctcatgcaagttataacagaaccagatgatatgtgcacataaataatcagtacaagaaaaggtgttacattgaaaaccagttcagctgtagccgatgatatagtattgcagtgtgaccatcaacctcttcaactaaactcccatactggaagctacaatcccacctacagtggagcataaataatactgaggtcagcattcatagaaaagcaattaggaagtaaaacacttaaacagcacacacttactcatatcgtgttacatccatactcattattagcccaaaaatggattcacatgtggcttccaccacaccaacagctctcattgctcggctacagcttcttgcctgtaagggtgcacaaggcataaaaggttactcatagcattggcgtgtctgcctttgacagtatataggtaagagaggtacatacaaggtattcaacctccacaagttcttcaaagatgcgcaagcctgccaatcataaagccaggaaactctaattgtaacttcatttgaacaatcctaaagttgaattcaaaattttaaagtaccccttatatgcatgcctatatataatctacgtaaagggctgtgaacttaccattctgacatctaagtagccgccagttctttcttgagtaagcatggttggtgtcattctgatctgacagcccaatatcaggctccttggtccaatcatgtaccgaatcaggagggcctagaaaaagaaatggtgtatttaagttctctcgtgtagccattacaaaatattaataaaaaattaaaagtatgtttaccattcccgatagttgtcctacgaagcaaagtaggccggggctcttcttcatcttccggtctataatagagtaaaatctcctattacttttaaccagaaggacttacatacagctagataaaatatgaaatcacttgcccactgtcacgatcagagaatgataatgggcctccaaactccatgtcaaagtccagtgaagcaaaagctttgcggtttttagccgtcatagtgtcttgttgctgcagaatgaatatctccgatgttatgcctaggacagttcattggtgtgtcatagaattattgaaaaaatggatgttatagatttcttttgaatctaatatgtacaagggagaaccttcttacaccgtagctaaacaagaaactaatgaaaaaggggctgaaatatccttattacttcgaacaattgccatatgttgttacagtctgttggacttactacacctgatcaataaggagctctagcttctttttccagaccagggcatcctcgatatcatgcgcacccatctgtagaagaacaatactaggattaagatggtatttgaataatgacaagtttactgtatgagaaattttatggtccttaaaaaagtacctcgatgtacctaaattttacactaattttttttgtatctcaaggtacttaatacctggaggtaccaaattttatactagaaagtgtggtacctctcagtactttttcaaggatggtaaaattacccttactgtataggtatatgtgacagaaaaaggctataggatactaaatgaaagagtacacacaaaaggaccactagcatctctcccatatgtagtgttacactgttattgtcaattaaacttgagcaaataaaattgcatagcattagtcaattatcaagcagagaaagggaatccaaaagctacactaatgctagtgaaagtagcgtcttcttttaactatatccaaaagctacactaatgctagtgaaagtagcgtcttcttttaactataaaaccagaatgatgtagaaagggcatcgctcccttttttaggtcaacagaaatatatgacccataaacaaagtacacaaaaaaggatggcaagaaaagggttaacatccagcttatatacttgctttttccaatacactgcagtagtaaaaactatatattgcagacaaaatatcagcaagtgcgtttaaaagcaaattctcaaacatagagtgtattctggtttggcaagttagcatcgtaacgaaccgtgatatgattctccttttctttcttgttgtatatgcacagaacatagaccatctgcaaaacaagaatatcactacaaataagtaaatgacggtattaacgtcacaacagtacagcagtacccctcaaaagtaaggtgtttttcttaaactaaaagatagtgaatttattcaagaaaaaggtatcaagaaactttcccattgaaggaattaaatgatacgctttatgctttatgctttatgttatgatgctagatgaattaaatatgagaagagggaacttacttgaccatgatgtgttttaagccctctgtcttccactctgcaatttccatctatttgaagcgccttcactggcacctgcccatccacaaatcttaaatgaataatcaaaataaagcagccaccatgctcctgttgcagaatttccaatctaaactcgtgtatcagtatggcaatttattaggttaaaatcctccgaataaggcgtacaatcaagagtacttcagctgaagtactctacaataaagagtacttcagctataagaatcttattcaagaatcataatccatgactcattcagacattcttactctccaacgatatgctttacatctaccgaagcagtacatttacagcaaacgctactctaaatgacccagagctgaagagacaaaactccattacttaacaacagtatgtcattaattagcacttcctagcctcaaattaaaagcatccggagatacagatggtaaacagttccaactcagcttcacggttaaatagttggcatcagtttgcaataatcatataccattaaaataaggcaggtggttctatgtgctagtcaaaccactcaaaaatccaaaataacggcagaaaactcatgtgcatcgcatcatgatgcaggcaaattcccctacattcagatttagttatcgtaactagaacatcctccgatcctccactccacccaattggacagaataaaccacaagtcacgaaatcccgctaaaaattcatgagaaactcttgaaaaaaaaaaggtagcgcagctttctgcgagactacgacaaatgaatcgcatcgcgagttcgcgagtatgacagcaaaatcaagagcataagttgcaggatgatgatgtgtataccatgttgtccttgggctgcttcttgtagtaggcgagcagcttgttgtcgaggacgaagtagcgcgtgcggacgaacgacctcccaatcttcctccgcccgtaccgcagcatccacccctcgtgccgcaccgcggccgtcgccgccgccgagaccttggggagctccccgctccgcgccatcgccgccgcggagggcctcgggggatccacgccgccggcgcgccccagctcggagctcttcgccgccgcctccctcctcgaggtcgacgagctcatcatcatctccggcggtgatttcgaattccaactgggtcgcgtcacgtcccccgggccgccacgtcaatgagccataccccagcgggtgaggtggcaccggaggggaacgtggaggcctaggcaaggcgcaggccccgccgaatcacggcggccggagccggcgaggtggccggcgacaggcggaggaggaggggagggtttcgaggcgggggaggcggagagagaagacgagagattaattattattgtaagccactattaaatccccaactactactttgcatttttatttcaaatatttggcttttgcctttttcgaggaaatttctggtctagaccttgtgttttgtctaaattacttattgttgacttggggggtcttttgagtccattgaagttttgtaattttggagatagtactgttttaaaatatgaaagacaatagtacaagcattaaaggaatttgtggttttccaccttttctgtgacattttcatttatttgaaaatgaatatgaccacttcttggtcttcaacttttgttttgttcatattcaatggtacaaaagaatgaattgaatatagcaagttaaatgttgttttaaaaaaggtattgtaaaacatttatatatagaaagtgatactcttcccatttagaggtttggaaaacgtgcacgtcgtaatccacagtcataagagaaaacagtgatggttagataagccactctaacaaaaaaaaccgtaacccgtaagtctagaacactcttaaccaaaaaaaaaactctcaaactagttgaaatacccttcactaaaacaccatgttgaattttcgattgttaagtgtacaacatctaagttttttttaacgactcacgtaacatagtgcgaagttcatattgatacaaccctgataagtcgtaaccagaaaaacgaaaaattacaatattacagtatctatgttgacatggtaccaatatgaacatctgatatcatcttacatgtaattttttttcctttgagattcaagattttattgattatgtaaaaatgtcacatgccagacaggaatggtgctcaaaacacacaacttgtggagtttaatatttattcaaataaaaaaaggggaaatagatgttatagaataaacgaatcagtgtatgaaaaaataatttgtagagaaaaacaccattcacgtgcatcaatatacaaatggcctaaaatgaactgcactagaacaaacacaaagaattgcgattcaaagttttgttatgaccatgaagaaagtttggtttcggaacggatgcataattatttaatattttaataatcttgtaatggattattatgtcactagatgtcatataaaatgaaaatgttccaacctgcatacgtaggaccaacttctttttcctgaaaaacttatgtagtaccaacttgaagtaggcaagaaatgcaggccgtcaaaatatttcttatcaacttccaccggcaaaagcactgatacggagtagtggtatcttctatactacttaaactttactagattcgaactgaaaaggagcaaaagattaacagagccttccatctgaaattctcaatggcatcagtttaataattaagttgtgtatcatgtgctggcctcggagagctagaggggccatttgtaattatcttgatttgaaggggctatgctgtaagcttcagttcgtgagcgagtggcgggaaatcccccgcccactccacggtccgcgctggaacgctctcccgtgtttgaaagctacccattttacccctcgccgtgcgctggacgccatccgtgcgacgtggtcccgacacgtggacggctgagatgtgcttagcgtggaaagatctcgctgtctttaggacggactgattagcgattagtaattgcgtgctcaaatactaattaacccacagaacgtatacatatttttatccagggacacgttgacttccatcttattctcgcgtttccatgtgatttctggaggattatcagaggctagctaggcgttattcagccagttcttaagtgtggaaattaatatgtgcagtgcagattctttttgtataattaaccatatgtttaagaacaactccatgtcacaatctttttgtaaagcatgtgtttgagaataactccatgtcacatatagggtataattagatcaagatgtatccaaattaatgagtaattatggacagcaaagctgacggatgaatgctggtagtgctcctgtcctacgtgcttgctggtctgcagctagcgaatctccagcagcagatgcacgcatccacaacgtggctggcaatcaaaaaactgtcacagctaattaaccagcatctgcagtttgctcataactcgtgttaatggctatgaagaaagaaaaaaaccgagcaactttcctctcggagtatcggtaatctttcgttacgttttcgtgtgatgagtagttctcgcaaacggttttaattggttaatggtcacctaaaatcaattaaattacgtgtgtatgctgcaagtaattaattggctagtggatggacaggacaacccaggaagcaatcaatcaagcagcaaagaacaatttagctcgtgtttagttactttccaatttttattaagtatacgaacacacatttaaagtattaaatatagactaataataaaataaattgcagattctgcctgcaaactatagaatgaatctattaaacctaattaatccattattaacaaatgtttactgtagcatcacattattaaatcatggcgcaattaggctcaaaagattcgtctcgcaatttacatgtaaactgtgtaattgttttttcgtccacatttagtgctccatgtatatatctaaacatttgatgtgacggaatttttagaagtttgatgggaactaaacacagcataattaagcaaaaaaaaaaagcaacaattacacaatgatacgataaggagaccccacctactagtacaaagcagtcatgacattccagagaattagtctcagcaaggcatattcttctcatcctctcatcaaataatatcttgcagcagtttgctgatgcatattccatgccaacttaattgcagttccaggtgtcattagcccattattacatttaacactgttgtgaacttatgatccaaatggcccatcagccgaagtgctcagatttaggcccaaacaaggaagaagcccagccgaagaaacatgggctcggcccaagccacgtcatacgagcacggatctcgaggtgggagaacgtacggacgcgatcccctccgagcggccgtaggctggccctcccgacccagcaaaatcttcttctcccgagacgaaccacccgaagccgcagcagcagcgatggcaatggagaggcttatctcttcgccgctcctcccgcgccggcctccccgcgccgccttctcccgcccgccgccctccctcgccgccgcgccaccccaccaccgcgccggcggtgcggcctccgggtacggctccaggccgcctctcgcctcgctcctcctctccaggcaccaccaccaccaccagcctccggtcctcgcggccaatcctgctgccgatgtggccgccggcgaggctgtccctcccgccaccgccaccgccagccggcgcttcctccagaaggtgagcgcctcgttgcccgccagttttccgtgtcgcgcctcactcgttcttgcatgtctcgtgtgatgattactgatgtgaatttcttcttcttcttccaagaattgcttctgttttgtgatgttgttgtggtcggaggagtccaagagttagcggagattattgagctcacgcgtttggtttgacaggtggcgtcggctgcggctgccactctgttggcgacgattgcactgacgctgatccagccggcgtgggcgccgccggcgttggcgtcgttccactcggcggcgaaggcgggaggtggcatcttcaagtcggagctgctcagcagcgcgtggacggggttcctggccggctgcctgcacacgctctccgggccggaccacctcgccgcgctggcgccgctgtccatcgggaggtcgcgggtggagagcgccgccgtgggcgcgctctggggctgcggccacgacgccggccaggtcatcttcggcctcctgttcctcagcctcaaggaccgcctccacatcgaggtcatccgaacgtgggggacccgcgtcgtcggcctcacgctgctcgtcatcggcgccctcggcatcagggaggccaccgaggtgcccacgccgtgcgtcgcgctggagaacggcggcggcggcggcggcgcgcaccgtggcccgctcgatgctctaccagccaccaggaagaagatcaccttcgccacgttcgccaccgggatcgtgcacgggctgcagcccgacgcgctcatgatggtcctgccggcgctcgccctcccgtcgcgcgtcgccggcgcggcgttccttggcatgttcctcgtcggcaccgtggtcgccatgggcagctacaccgtcctgatcggctcttgtacggaggcgctcaaggagagggttcccaggatcacggagaagctgacatgggctgcctcgctcgtggccatctccatgggcctcggcatcctcatcagccagtctctcggctttagcttgtactgatccgccatccctcgcgacacctccttcttcttcttcgccattgttaagcttccactgcctccactgtaggaatctgccatgagaattttgcaaatgttgcttgttgagatccaggagaattcaagtttagttcacaagaaaaaaaaatgccatgagaattttgcaaatgttgcattgttgagatccaggagaattcaagtttagttcacaagaaaaaaaaatgctttgctgagaattgcttaggtgatctgcgatgagtaaacatgtgttaattgtcacccaaatgtattacacgtacttgaaaaaggactggttaagaacgattcacatcaaatgtatttcttgtacttggaaattaaaaagattggttaagagtaattcagtgtgtctaggagatctggcatgcatttctgtcattctgtttttgtgtcatttgtagttgctagctgacactttgtacttgagtgagatgtactgtatgtctgtatcgaattgtggtttccattcacaaccctgatagattttgagatgctgatatagataggcacattatgttcctctgcttgttcagaaattctatcttggcaaatttgggacaccagatcgtcagcaggtgacgcagaatgcgaatttgctacacagttcttcagtggcaaatcaaggacaagtctggaactgggatcaaataataatgtatatatcgaattcaacctgtgaagaacaaaaaactgaacataagagctggttaaaatattcaaccaaacagtcgccttgtccgcagataagatgatgtatgattgctgctgttgaatgaactcttcgtgtttgcttgctgtcttatcagccataaccagaaaagtaatttaaaaacttattttaaacttgattttgaaggtcttcttttcaacattggttgtttccctgaattagttttcaaaccattaaaaacaaagatatacaagttgtccataaactgttcatggttttatctttccacggcttatacatcaaacaatcaattacacagactgaacttgtacgtagtaaacggagacaaatcggaggttatgcttatgcttatcagctaaaatttgaattttcaatcttacatttaggggtttttttttatcaaagtttatttttagccttttcttttagatcactaaaagcatgtattatttacaaattatttttcgtttgcaaatataccgtttataagccaaacgatggggcattaactttggggctttaacctatttgccactcttacgagtagtgcttaacgatttgccactaagcccacatgttatagacacatgagagcccacatgtcattgacagggtgtggcaaatcgttaattgtcatgtcacaagagtggcaaatagttaaatttcccgttaacttcaaacaaggtgcttatcgatttttctatatatttgtcgataaattttcttccaaaaatttgacagatgtaattacagtacaatcgtagtgtaattacactgtaactatagtgtaacttatatgtaactttcaaaaatctctacataatatgttattctggtaaaatagaggttgtgggaacaaatccttacacatatgtgtgttgtggttttatttttcttcctcaccaaaacaaatcttatatgaaacttatatacaagttacgctgtagttacgtgcaagttacagtgtaattacactacgattgtactataattacatctgtcaaatttttaggagaaaatttgtcgacaaatgtataggtggtcccggtgcttatactgcgaaaaaaatacgggccgttctgtccgtgtaatgggccttccgggccagaattcggagcccaaatgggcccgtttaatgccttggtggtgaagtcccaactcccacgttgtctcgtctcgtctctcgcaccaactctctctctctctcccttctctctccccgattcctcctccgcctcgccgtcgagatctcgccgcgcccgcgcccgcctccgccggagctctcccgcgccatggcgacgcggaaccggacgcctctgtaccgcaagtaccgcgacgcgctgcgccacgtccgcgcgccggcgggggctccgtcgtcgtcatcgtccggaggaggaggaggaggaggaggcggggggccggtgatcgagatggcctcgctgctgcgctccaaccgcccctacgcccccctcagcaccgacgacccctccgccgcctccaggtaacaaccccccttccaccaccctgtgccgtctaatctgaaccccacctttagatcagtgcgctagttaatcgtgatgcgaggggggcgcgagatgcggaattgcgacatgggaatcacaattgctagacttagatcggtttccgtgcgagtgaatagcgatgtcccgtaaaatcttttacgatggtgatccaattagcctgtgattcaaacgaagcagtagaattgcagatcgctgaactcattcccttagctagcctgtttaggcgtcatctactgcgagatatttataattggttttgttagttcaagtagagaagttgaaaactgttgtgagtataaacatcgaggtgtggtagcagtccaccaattggtttgggaaccttacttggcactcacatgtggtgtatgtggtgcagtagaagtgctgtgacggtcgggctgcccccggcatgggttgatgtttccgaagagatatctgccaacatgcagcgggcaagaacgaagatggcagagctggctaaggcacatgccaaagccttgatgccatcctttggtgatggtagagatgaccagcgagcaattgagattcttacacatgaggtaacagacttactgaagaggtcggagaagagacttcagaagctatccatgaaagattcttcagaggattcaaatgtccgaaagaatgtccaggtgatgatgggctcctatctttacttattaaacagctacaggactcataagggatttttgttttgatggatgaaatgccctttgattgttatatgcagcgttcactcgctacagacctgcaaagcctttcgatggagttccgtaaaaaacagtcaacttatttaaagcagctacgccaacagaaagaggttcgtacgtcaatctgctcaaagtccagatacttttgctacttaaatcgatctaattgagatgcttgattaatgaatcatgtttacaggggcaagatggagttgatttggaaatgaacatgaatggttctaagtcgacatttgaacttggagatgatgaatttgaggatgtggtatgctattactttgtctttatctttagtccttagtcctgcagacttgattttacaatattgttatcctgaaagcttggcttatagtaactagtaacacactcaattctaattattatttttattgtttgttgtgtattgctcctccctatctgctagtaactgacttgaaaatcagaatcaagggtttgcccgacttgcttcacttcagagttcagacccacaagtatacacaaaatttgtgaagagaaaaacgcaaaatgaatagcggcacacattatgtgcaatgaaggccatgtctaggtttgggtggttacagtggcttagaataaggcaacataaatctgatagtatgtatttggcttgcttggatcaatttgcaggtgtgagttaggaatctagctcaagaatgagcacaatctagttacatagttggaattcttattctgttatacttctattctaggcattttaatttgacgggattgcattataggatgtagctgttggatgtttatagcatttcattttgctcctaccttttgaccacatgatgacattgtggatcttaatatcaagtccagaaagtcagatttttggcctgtgaatctgtaatgcttgaataaacataataagaaagtaacgcacacttgtgggatggagttttgaggcttaagctattgttatggcagtactgggtagtgaagatcttgcatttccaagcttcccagccctttcactttgtaattgctgtactgatcaagaaaggccgggttctttcaattgcgttttaaaccaagtgaatttaggtacatcatttcaactggctcccgatgcagaagttataatcataaaaaaatacaaggctttctaagtaaaagtgctatagtcccgtgctccacctgcatccacttacctaaatttttctcttctgcgttatcagatggcaggcaagaaacatacaggcgttactgccctttttttttaatcatatcatgaatttagtaacataggttatgttcatgaataaaatcaaagaagtttgagtagctttgcattgtcatgaacaccacaataatccaagcatccatacaccatggccttgcatccatgaattcttagtatagttcatgcacatacttagatggtatccaggcagctgcttttaaactggtttagtgtgaaaaagagtcttaagtgagatgctcaaagaaaacattaacaaattatatgcttcattatgtatatatccccttttagtgttctcgggagtatgatgtttgtgtatgtttttttgttggatttgaaatcaatgtatgggaatagatttgctggtatcaaagaggaggattaaagttccagcataccctttaaattaagtaattgatcgatgatgtagtttattccatgattttaatttcagggtttcacggaggttcagatgtcaaaacttaagaaaagcgaagcattcaccagagaaagagaaagagaaatcgagcaggtgagttctttgtttgttatttgcttatatgcacaatgctatatacatactctcttatttgaattaaaaaaaatcaatcatgggcacaactttattttatattatctgcattctacttgaaggttgtcgaatcagttaacgagcttgcacagatcatgaaggacctttcagttcttgtgatagatcaggtataagaaaaaccctaaataaccgagttatcaatgattggttttgttaactggttcaaactccagactcataattacttcatctcaacagggaactatcatagatcggatagactacaatatacagaatgttgcagcttccgttgaagagggttataaacaattgcaaaaggtttcatcccccaacccattttctatctttagagtatttttatgcagatttctgtagttaagatggaaaaacttctatgccatgtttcatttgccaggttaacttatatgatattttatgatttgtgtccattacggagtagcacagtggtttaagaaaacttgtactataatgttaaccctaaaaaattgcttcccacctgatctatctttttgtccattgaaagaaaatggtatgggtagattaggcattaaatgaaattttaaaaaggtatactatataacttcagcagttatctggtgataaaaattcagtgcttgattttgcatctcccagactgtggacagtcaagcatctcatagcatgtaaatggtgtccaataaatagtacagatcataaagttttttttttttgtgactactagaggtagtaatactaggtcaaatcttcaggtctccgcaagtactgctgtgtgcctttgcgtgcctgtgtgtgtttgtgcatgcatatgctactgtgtgctagatattatcataaaaagttgaggagaagtcctcagtgtttccacctgcagcacctttaccttatatatcaaagcgtttctgcagaggaagagaaataaggcgcaccttcaattcctggagttttcagtctaacatcttcatctggtctcttttatgcaggctgagaggacacagaagaaagggggcatggtcatgtgtgcgactacccttgtcattcttatcttcatcatgatagtcctcctgattttaaagaagatccttttctgacatagatatatatattctttatggttgatggatggcttccaagtgaacaacactcgctgagtgattatgcagtgcctgcgtactggaacagctgcagttcagttgcatgtttacagtttactgatctcaaaattcaaagacggttcagcccatatccataattgctgggcctgcaactctcttcagtcttccacatttttttgcagcactgcaagtgtagagatatcatattcataggaggctctttttttttaagagttgtgttgacacaatttgccctacctgtttgtattggagcagccaggtttggttttgtatgctctgtacaaagttgtactatcatccaattcttgaagaaaaagtagctccactttcggtctcgattacgatttctcacacacggtctacttatttactggctataatgtacctggctaactttgttttcctttcaatctgatagtagaaaacattttataggtatgtgaaggtctgttagccattgattcttgtatctgaatattttactgaaaatacaattgtggagttttgtttttcaggtgtcggcatgcatgcatgggggtgctgtcactttggtatttgtctgtgctgctgctaaattggaaggttttgcttggcttttgaggtgggagccaagaatcaagaggtgatggatcccctgtcggccatcattcactcactccctcaacctcttccataactcaggtctgcaggccgtggtgttttcttgctccgattgcatcattttgaccagttggtcccaaatcatgcagcatgtactgtgttttggtgatgtaggattttctgtgccctacatgtaatcaatttaatctcccctagtgtctctctgtgtccctttgcccccatttatgggggtgtttagatcaagggtgtaaaaagttttggcgggtcacatcggatattatataaggtgtagcaaggggtgtttacacactaataaaaaaactaattaaagaatccatcagtaaattgtgagacgaatttattaagcctaattaacccgtcattagtaaatgtttactgtagcaccacattgtcaaattatggagtagttaggcttaaaaaatttgctcgcaaattagtcgcaatccgtgcaattagttattttttagcctatatttaatacttcatgcaggtgttaaaacttttgatgtgagagggtgaaaaattttagggtggatctaaacagggccataggctctggttgcttcagctgtttgctgcaacttggacaggaggctatgtctctcctattgggcacctaacttaggttttttctttcttttctatagcttgtttcacctccctggtatgggtacccctactaggggcataccctacagaattcctacctcaaggtactagtaggagtaacatataggctgtgttttggcgcatcacatcggatatacggatatacatttaaagtattaaacgtagtttaataacaaaataaattacagaatcttcctgtaaaccgcgagacgaatttattaagcctaattaatctattattagtaaatgtttaatgtagcaccacattgtcaaatcatggcgcgattaggcttaaaagattcgtctcgcaatttacacgcaatctgtgtagttatttattttttttctatatttaatactctatgcatgtgtccaaacatttgatgtgacagggtataaaattttgcgggaatctaaacagggccatactgtaggagtgtataaaacatagagagagaaaagagagttgtaccagggaggaagatgatgagtttggggggcatgaaatattcaaatgttgtagggtactagtagtaatatcagtactggtcgtacatattcatcatcttgaatgctctgcctctgccgtaccgtccctttggctctctccagagctggagagtggtgataggagtagattagattagcttaggttaggagtagtatgaggtttgatttagggggctaataagatttattaggatctgtacaaaatctttccagcttgtagacgtgcagtactactagctcgaagcaaatgcctttgggtacatccgtacatgtcaggtcaaagcaagggcttgggatttgaatggtgtttctttatcttttgaacgaacgaaatggtttgaatggttttgaggcccgtccttttggtcatcatgctttggaagtttgtacttggtggatcttatccgtatacttcaactgattagtggaatggatctttgatctgatatactgtatgatcgagcattcgagccttgcttgtttcagctcaggtttataagttgcagccaattttgaattttagaacttaatttatgtgcttttatcgcaatcgtcacgcaacttgggaatagctatcatttgtcgttaaattttcttctacaaatttgatatatgtaaatataatataatcagtgtaattacattgcaacttgcatgtagctacaatataatttgtatgtatcttttttttaaaaaaaaccgtgataacacactattttcatgaagcggaggatcgagcgttcaagccttgcttgtttcagcttaggtttataagttgcagccaattttgaattttggaacttaatttacgtgcttttgttgcaatcgtcacgcaacttgggaatggttataatttgtcgttaaattttcttctataaatttgatatatgtaaatataatataatcagtgtaattacattgcaacttgcatgtagctacaatataatttgtatgtatcttttttaaaaaaatccgtgataacacactattttcatgaagcggaggccgtgagaccgaatctcctagcctgtctgcatgctatgatttttttttcttcctaacttgcatgaatcttagggcctattcgtttcaaatgaattgcaaagaaaaagcataggaataggaatgggttttaaactattattcgtttcatatgaatgcaccataggaaaactacaggaaagttttccattcctccatttttgaaggaaacatttttgaaggaaaagcataggaaaaaataatccactccaacctaatgtttacatttctttggttagcttgctcaacaacataggaaaaaaatcctatgtttttcaatccataggtttgcacatgtattcctatagtattcctacattttaaagtaaacctaacagtttaaaattatgtgaaaattaaatacaaattacattgtagtttcatgcaaattacaatgtaattacactacaattatactatatgtacatttgataaatttttaatatatatagtataattacactacaattatactatatgtacatttaatatatactatatgtcgacaaatatacagcacaatcgactctaaaaagagtggtaaggctttacgtccccatcgtttggcgatatatttacaaacgaaaaataaattgtgaataaaatttttatatacgtgttcttagcaatgtaagcaaaggctgaaaaataaacttcgatgaaaagaaaaatccaaaatcagctctaaatttaaggttgaaaatttaaattttagctgataagtataatcataagaaaaaaaaaatgaggccgatactttgttagctaaaatgtggttagggttttggttgggtggtggtctcacctttgataagcttagtaaacaaaatgtggtaaatctagacaatcttaatacatgaatcatcagaattttattgacatgactataattgactggtgtttaggcttctcgttgcacaccgttttgatggtgcaatgatgcatattagccataataattgatagtataagtttgtgcttgatacgatgaatcctagacgccgagttgggaatgtagtactcggaagcaccactgcctgaacatatgatacggagtactacgtactccctctgttaaaaaaaaaaaaaactcggcctagaaggggatatgactcctgctaggacaatgaatttggacaggagaggtcacatcccctcctagattaagttcttttttgggacggagggagtaccctgtctgtcagaaaaaaaaacgaatctggacagagtatgtaaggatgtatcgcatcctattacaaggttgacttttttctggaacggaaagagtataattgtagtgcttcattttaaatgcccatttgaattgcaggattgtaaaaagggtggaataagaaacacatgattctgatggaaatgtaagcatcaaacaaagagaaatacacggaggaccatttgattgtaccgcagaaaaaacatagaaatcggatgaaagaggtagactaacgaaaatttccaagaggttggagctcttgttaagtttcctcaaaatctatatacgatgaggcattccataggaatttcaatagatttggaaaacttcaattctttaaattaaattgtcacatagaaaaaattcatataggattctaaatcctttgattaaaggggctataaaggttcaatgcggcataaaactttatatgattttcatgagcttgttttttccaccaaaaatcgaaaatatatcatacattctaaaagagttccctagtagtactcgtctcctaccatacttcacatgagctataagcatggattaacttgtacccatcttgtttcaaaataaataaaactagacttatttatctagatttatagtatcagtgttatttttatattagatttatttattttttttaaaaaatttctctttacagtatacatttgtttattttaagatagatttttgggacgcactccctccatctagaaaaaaattccaatcctagcatcccaatgtggaattggtgaagagtgagaatgactaaaatacccttaatcactagaaaaaagtagtaagagtagtaggtatgtaaagggtattgaagagataaaacttctcattttacatgctgaaagcaggtagaatgatagaagttagttttctgtggaataaaattaaaactctaaaaattttaaaaaaattgacggagggagtaactcaacgtaggagcaagcaacaagatccactcactagtcaccgctgtcctaacagccctagataaggatgagtgcagttcatttcaggaaggggaaaactcgagattgcccctgcaagggtgggctgggcatgaggaggcaggcaaggcaactgaaccaaagggagggtacagcttacaagtaaagacaggcagccggccaatgtggggcaacccaacccagcaaccatattattatactaacagtagtattagtgaactattatttactccttctgttcaataaaaaataaatataatacgagatgtgatacggtactattaatttggaccagagatatctaaattcatagtattaggatgtatcacgtttcgagctgtatagattcgtagtactgatgccgcactatgttttttataggactgatggaataataataatttcttgttagaaccaagttaatactaaggtggtgtttagatccagggacttaactttagttcctgtctttagacactaatttagagtattaaatatagactacttacaaaactaattacataaataaaagctaattcacgagacaaattttttaagcctaattaatctataattagagaatgtttactgtagcatcacataggctaatcatggattaattaggctcattagattcgtttcgcaaattagtccaagattatggatgggttttattaatagtctacgtttaatatttataattaattttcaaacatccgatgtgatagggacttaaaagttttagtcccatctacacagggcctaacttaacatccatatagatgtaggttttgcttgaagagattaagactgtgtttagataaggggtgtaaagtttttgcgtgtcacatccgatacacggacacatatttgaagtattaaacgtagactaataacaaaacaaattacagaatctgcctgcaaattgcgagacggatttattaagcctagttaatccgtcattagcaaatgtttactgtagcaccacattgtcaaatcatagagcaattaggcttaaaagattcatctcgcaatttacacgcaatctgtgtaattagttattttttcgtttatatttaatactccatacatgtgtctaaacattcaatgtgacagggtgaaaaattttaccaggagatctaaacaaggccaaagatggtaagacacaacttataataataaaaagaattggtcatatcaatttctactctgtcctaaaataacataacctagatgtgtccaacgattatggacatcctaaattaaattattttgtaacggagtgagtaacttctagcttctattttagtagtttactccctctgtcccataatataagggattttggtgggatttgacatatcctaggactacgagcctgtccagatttgtagtactagaatgtgtcatatcccgttaaaatctcttatattataagacgttatattataagagggatggagtattttctaggattatgtaactacccgtttaaaaaataattaaaattataatatctaattaaaaatttagaaagctaaacaagacctaaataggtatagatactctaggaggaagaaagaagcagatccccctctcctctccctctcacactcacacgctgcagcagcagcagcagcagcagctttcccaccgactcctccccctcctccattaatggccgccaccaagaaccctccaacccccacgtgacctcctcctcccctccccctccccctccccctcccgacctcgccgccggcgacctcccttcttcttcctgcttgcctgctcgcttgcctgcctggttcgaccgatgctgagctcgtcgccctcggcggcggcgccggggataggagggtaccagccgcagcgcggggcggcggtcttcacggcggcgcagtgggcggagctggagcagcaggcgctcatttacaagtacctcgtcgccggtgtccccgtcccgggcgatctcctcctcccaatccgcccccactcctccgccgccgccacctactccttcgccaaccccgccgccgcgcccttctaccaccaccaccaccacccctctcgtaagctctctctccatcttttttccacaaatggtccatctcttgtttgcttcatgcttgggtattcaaatctgagaaaaatttatatatgtgtgcgcgtgtgctttcttgggactttttcttttttttttgtttcttctttcaggacaggatctctttgctgccctgctcattgggattgatttgctattgctctcacgatttattgatagatgaacgtacacggatctttgcttatagtatgtccgtttaagctgttcgattgattctttgctcactcttatatcctaagcaaattaagcatatagtagttattaccattaccaactttgcattgggttgatgaaatgttgaagtggtgcattttgatctagttttaatatgaacaatgatgaatgctgatatggattcaatgtgcctgtgctcatgtcactgcagtgagctattatgcctactatggcaagaagcttgaccctgagccgtggcgttgccgccgcaccgacggcaagaagtggcggtgctccaaggaggcgcaccccgactccaagtactgcgagcgccacatgcaccgtggccgcaaccgttcaagaaagcctgtggaatccaagaccgctgcccctgcgccccagtcgcagccccagctgtccaatgtcacgaccgcgactcacgacaccgatgcgcctctcccgtcactcactgtgggtgctaaaacccacggtctgtcccttggtggtgctggctcgtcgcagttccatgtcgacgcaccatcgtacggcagcaagtatcccctctaatctcattgactctgtgttgaatgcttatttgaattaagcttgcctagattgattgcatattatgctggaatagagctgatctggtagctttcttaaaagggttgagacactcaaaatagtatttgagctctaatgttgttgatgcttattgctcaagtagtgaacctaccctcattccagtaattataagtgtgtgaggctgcctaagaatttgtcgatcagagcttattcaatgagttagtcagatgagtgatactgccaatttacatgtgaccataaccccaactaaaaattttgtacctggattatgttagttaaatctgtgtattgcattccatccatccttgatgctacaaacctctgtgggcacaatgtcataagcatatgtctgttgcttgtgcctttagccctattatactgttgctttttgcagtaatattgtacgcttttccagatcacctaagccctagctgattttgacctttattgccctaactcctgattatgttttgagaaatagtgttaacagttgtcatgttctggggtgtttttggtccatgccctctaaaatcttggtaccgtcttttttatgctggaaaattttgcttgtgtcatcttttttgtgtgccataccttagtttagtatttcctcctctgctagcaatcacaaaataaaaatattgtaccttcgacaccatccttatgcttgtgctgcatgcatggcatatgttctagtttcgtgtcattttgcatttgcatcttgctagatgactgacaaagcttattttgctccttcgactatttttcgttctttttccttttttaactatagtaggttgtcttattatcgttttggtagcatttttcctatgcagctgcttttatgtcctccccttgagttgtagaaatcccttagctactgtgaacctgtaatcatcccattatattccatttgatgctgcgcaaatctacatgtactgtgtctgagtctggtgtctggtcctaattttcatgtatcaatggctatgcaggtactctcttggagctaaagctgatgtgggtgaactgagcttcttctcaggagcatcaggaaacaccaggggcttcaccattgattctccaacagatagctcatggcattcactgccttccagtgtacccccatacccgatgtcaaagccaagggactctggcctcctaccaggtgcctactcctactcccaccttgaaccttcacaggaacttggccaggtcaccatcgcctcgctgtcccaagagcaggagcgccgctcttttggtggtggagcgggggggatgctaggaaatgtgaagcacgagaaccagccgctgaggcctttcttcgatgagtggcctgggaggcgagactcgtggtcggagatggatgaggagaggtccaaccagacctccttctcgacaacccagctctcgatctccatcccgatgcccagatgtgggtcccctatcggtccgcgtctaccttgagcatcccttcaccaacatttctctcacacaattcattccattttctttgatgatgcaggtgattgagaactttgctgcttgtggcagcggggtggacctctaccccgcattttaccgctgctagtgagttggatcagtgattgcgcctcccctggttctttgttcaattgtatcgtgctatgaactagttaagagaaccctactttttttttctagtagaagagacagaaaactcttatccatcatcatgttttaagattccacgatgttttgtacctgcaacccacgacctgccggctgctggaagttactggctgtctgtaatgtttgtagtagatgatctatgatgtatcatgtatctatctacttgttccgaattgcggaaaccaaagccgataatctggcatgtgccaacgtcctccttaaagctcttgtgctatgtattttgcttttggtgggaaaaaagaagaaaagaaggttccatttttcttaataattcaagtttgtagaatcaaaaccaggcgtgacgttgtggtattcgttattccttttgctttgaaaagaagacgatgaaagaaagatatgtgcacgtgaactccaaaaggagaatgccgctcagatgttaactgcagccttttgagccgatatctgggagggatgatgcggcaactgcaatgcaaatgcaaatgccaaaaggatacaagaaggtaagggaaaacgagagagaaaaaaaagaaaaagatagctgagcctttggcaggagggagcacggcctgaacctgatgaacgtgaggtctccgtctccatctcctttggcaggca

SEQ ID NO: 4527 - DNA, 26621 bp, Oryza sativa
ccggcaaaggggcaagccccctttcttcccctcctttttcccttttcctccccgccggcgtcatcctccctgtcgccaatttggccgctagccggagcgccagctcgcgccttgaccgcgcaagtcggttctcaaaccgacattgccgccccctataaaccccagcccccccctttttcctttcctctcccattcacctccgcgccattaccgcccctctgttcgccgtcgccgttcgtcgttgcgcgtgtcggaagagccggcacgagcaaggacgcggaaggggacttcggccgcgccctctccttcctcttccccggcccgaggccggagagattactcccgcgccgtcggcctctcgtcacagcgcccctcctcttctcggtgatgtctctctccgttctccctcctcgctccgtctcctcccccctagctttcggtagtagctcgagtagaccccccgtagctagccggcgccgccccaaccgttgccttcgctcgccgtgtgctcgccgccgtcgccgcccgagctccgtagcacccgctcgtcgccggcctcgctcggcgtagttccgcccaatccgacgctagcgtcgagttcccgaagccgcgtagatgctctcaccgccgggaatcgacccctcgtagcttcatcgccgttttccccttctcccgccgccggttgccgccgccgcaatccgccgccgtcgagcaacccccggcaaatccgagccgttggctcgtctcccctcgtcccgtgcaaccgcccggtgtgctcgctcttgcccgtatcaccgtggttcgctccgacgctcgccgccgccgcccgccgtccattcgcggccgggtcgtcgtctacctcccgccagcccacgtggccgccacgtaggcgccacgtcggcgccagctcagcctagaccgggtcgagccgaccccggtcggtccctccccgtgcgcgcgttccacctcgagccgtgaggctgcgcgtgggcccgtcgcatccgcgtccaccgcaaaccgcgcgcgtgcaccgcgttcctccccgcccgcgcgcgtgcgccgcgtgctccctccgcacggtgagccgagccgctgacaagcgggtcccacccgggaccgcgcgtggtgagcccggtccaccggactctctctcctccctcccgcgcgcgcgcgcttgggccgtcttgggccggccggcccgttaagctcggccgagccaccccaaatctcttgggccgcaccctagccgcccgagaaaagtctatattccctccctcccttctttctttttctttttccaaaaaggatttaattaaatcctttttcctttagaccaaaaatccgataatcttagaaattcaatatcttcccaaccgtaactccgtttgactccgttcaacttccaaaattcttcaaatctcgagatctatctagtggcacgcttagaggtcattaatagggctttattttcgctgtatgttgagttgtcccgtttcgcgtgtagtttcggagcccgaagacccgcagtgcgaggatttcgaggatcaagctcccgatctcgagcaaggcaagccacctttgaacatcttgagcctatatttgaaatttaattatgttgcttgcaaaatattatgcattgataggatcacacttaatctgttgtcccgtctgcaaggcagattggcggactcacctaatttgtcgcatttgatccttccattgttaattgctataccatgtccccttgtaaccacccagttgcgcctcgatactcgtgcactctgtgcgagtatcgacggtcgccttcaaacttaaaatctgagtaacaacttgggtaaaactggagttttaaaaagagacttggaaaacccgacacttgggtcggtgcttgcgaactaaatgaatttccaaaaccgcggaccggggaacgtaccgggtgtacggtttcccgctctcgcacttaaggaccgattccttggaatttcatccaaacataagacaagtacgaccacatgggtggaatgggacacccctggctgagtaactagcttatcaggggagccttgatgccgagagacatgtggattcgccggggtggtgtaggggaggacccctgggcttcctggcacagtatggtctgggacctaacctgttgttggtctgggacccctctcgtcggcatatggtaaacctgcatcggctttcgaaatgccttgtcatgaaagcttggaggtctcccgacgtggctgatccccacgggctgggtgacccgggttagtaatgtcgtgtgggtaaagtgtaccccctctgcagaggtcattaaactgttcgaacagccgtgcccacggtcatgggcggatgtgaggtgattcctagcgtagttttgtttgactactgcttgtgaaattgctgtagtgaaactgggttcgatgtttggaaaacctgcagctgatgggatcagctaggcccgggtggccgtttaaaaagttgctggcccgggtggccgtttgaaaagtgttggcccgggtggccgtttaaaaagcttttggccgggtgccaatcttgttcaaatctaaagactgatacattgcacatactctgaccggacgagacgcactgtctcatctgtgtcgtttgagaagcactcacttagttgcttttagaaaagagttcaaacaaaatcaattgcaaaaacatcagccattccttgaagcctgcattaaacacttatttcccctggcttgctgagtactcccgtactcacccttgctctatataaatatccccccagttgctgaagaagatgaagcgaatcctgctaatgaggagttcttccaggagcaaaccggctacgatgagttttagggtttcggcctagttcccaagtcgcgcctacttctactgtgatattctgtctccctgtgataccagcactgtttcctgggactggtatcgattaacaggttaatttggagcggttcttccaggagcaaggagcaaaccggctacgatgagttttagggtttcggcctagttcccaagtcgcgcctacttctactgtgatattctgtctcccaggagcaaggagcacctgtgataccagcactgtttcctgggactggtatcgattaacaggttaatttggagcgtcacgggttagttccggtcgagactagttcggggcgtgacatcgcttttcacacaaaagaatcggtgttacacgtgtttaggcaaacatccttatatctcggtgctcctcaagctagctaggcgaggtggtactattcggtgaacagtgactcgcgtgctacagtacacgcgatactacagtgtctaagctgctgctcactcgttgcttgggctgttgctgcgcttgcatggttgggccaagccaagaccaagctgctgggatgtcacacataaacatcgcttggcatgcaatcaataggctttatttgcatcgtcttttgaaaaagacttcctatgagctaattgttgggaggatgcctaatgttgcctattttcgagtttttggttgcaactgctatatttatcgaaaaggtgttagactaaccaaatttgaaagttggtgtgatgaagggtttcttctaggttatgcctcaaatagtaaggcataccgggtctacaacaagaacaaaggtattgtggaagaaaccgccgatgttcaatttgatgaaactaatggctctgaagaggggcacgagaatttggatgatgtaggtgatgagggcttgatgagcgccatgaagaacatgtctattggagacatcaagcccgttgaagtggaagacaagccttccacctctactcaagttgagcaaactacttccgctacgccaagccaagctcaagttgacgtggaggatgaaaaggcacaagatccacctatgccaccaagaattcacaacgctctctctaaggaacacccaattgatcaagtcttgggtgatattagtaagggtgttcaaactcgatctcgtgtctcttcgatttgtgagcattactcttttgtttcttgtcttgagccaaaacatataaatgaagcccttggtgatccggattggataaatactatgcatgaagagctcaacaactttgcaagaaacaaggtgtgtactttggttgaaagacgtagaaaccacaatgtcataaggataaagtgggtttttaggaacaagcaagatgagaacgggttggtggtaaggaaaaaggcaagattggtggctcaaagtttcacacaagttgaaggtttggattttggtgaaacctttgcccccgtggcaaggcttgaagccattcgcatcctacttgcatttgcatcatgctttgatataaagctttttcatatggatgtgaaaagtgcttttctaaatggtgaaattgccgaacttgtctttgttgaacaaccacccggttttgaagatcctaaaaatcctaaccatgtttacaaactctcaaaagctctctatggcttgaaacaagctcctagagcttgagagattttcttttatcatagggtttcaaaattggcaaagttgacacaactcttttcactaaaatcattggtgatgatttctttatgtgtcaaatttatgttgatgatatcatattcggttctactaatgaggtgttttgcaaggaatttggtgatatgatgtctagggaatttaagatgtccatgattggagagttgagcttcttccttggacttcaaatcaatcaactcaaggatgggacctttgtgagccaaaccaatcaaggacctactcaagaggtttgtcttggaggatgcaaagcccatcaagactccatggcaaccaatagccacctcgaccatgacgagggagataaaccggtagatttaaagctttatcgttctgtgattgatagcttgctttatcttaccgcatctaggccggatatcatgtttagtatttgcatgtgtgcacggtttcaagccacccccaaggagtgtcacttaatggccgtgaaaaggattctaagatatttaaagaattcctcaactattggcttgtggtacccaaaaggttctaagttcaagctagtcggctattccgattcggattatgtcggttgtaaagtggataacaagagcactttcggtagttgccaattgcttagtagatctcttctcgatcctaatcatcttctgctgcttctccattctttcttctctgtggcgtcaagcactgtcccttctgacgatgtcaaccccttcgcggcaggctctgtggccatctcggcggcgacggcgcaactcatcaacatcaagtcccacgttcccgtgatccttgatctcggcgactccaacgtcggcacctggcgcaccttcttcaccattgctttccgcaagttcggcctcctcgatcacatcgacgacacgaccgacgcccgcctgtaagccagcgccgacacctgtggacacgaaggccaaggtctccagtacgacagggcagccctacagtgatccgacgttctatcgtagcatcgtcggggcactccaggacctcacgctcagacggccggatttgtcttacgctgtgcaacaggtctgccttcacatgcactcgctgcgggacgtgcactggtgttgatgcgaaaacacgaggcctgggagatctgcttaactccagtgcaggtccaaaaatcttgcctttgaggttcgtgagcgtgccaattgatttgatcctgcaatcaacaagaaataaagacaaggaaaccgcagttaaatccataaacgatagccgatcggccagctaccgatgacatatcatttatctgagagccgatgtcatatgtgaatcgatcggcagttggctgtagatgttaacagtatataatctttatgtcgatatatacttaaattaagtaattgggatagatcggtcgccatgccgagacagtataaatcacttagatcgaaatatatattaccaaggagactatagacgtttacagcatagccgatcagatagatctagcgtgtatcggctaatactccgataccactctatatcaagatattaaagcaagtaaaatatatcaaacataaagcttaatacacctaaatgcaataggatcttaacataaagggcggatctagcatatcaattaagcatataaaacataaagctaaatcaggtaagattggctgaaactccgatgctaccctaatcggaaaccaagaagcaggctagagattatagttctaagcacgacttatgaggtcaaacctaactgatgcagccataagtatgaaaagaaagacaatatctagacaatcaagccattgggagcttcatagagtggtagatattctatataatctaagtcaacgttggtatttaacctaatcggctgccttctagtgatagatgttagccgactgaaggttagataacaatattgccgaagattatatagaatatatgataactcgacaacttacagagacaagattagagtatcataatgatggaagcactaatcccgagaacgcaagccgccataacaagtcgtacctctagttgaagatcgaaaccgatgcagctcaacccgaaagcaagaactagtcgaaagcaaaacaaaagtaaagggtggcaatgcgccgagattgttgttgaacatgtgttaattgaatacatggggttcggggtctatttatacccgagattacaaaatatgtccatatcggacacgactgttatctctaaccaactctaagataccataagtctttgcagcagacttttgcccaaacttatctctaaggaaattatataaaatatcctaattaatagatacaattgcctattcaggactcaatccgagtgtggcaatccgtgtgaagcacattaactcaacccgatgacacacaccgagtcgtattgtcggaatcggcttaatcggctaccttgtccgactcgaactcagctgtctttgatcgtagccgatttggatttcagccgaatcttgctctgtttccgaaacgatctttgtcttcgattccgcatcgatctaatcttcttcttcgatactcagattaccaaatttggttgttaacaattggacacttgtcaagcggatcctccgttatgttcgtggcacgacgcacaaaggtctgcaactccggcgttcttctacaccgtcgctcaccgcgtactccgacgcggactgggccggctgccccgacacaggccgctcgacgtccggcttttgcgtcttcttcggcgactctttggtgtcgtggtcctccaaacgacagtccgtcgtgtctcgctccagtgccgaggttgagtaccggggtgtggcgaacgcgactactgaatgttgttggctccgtcaccttctcgacgaacttcacatcaagctcgacaaagccacgcttgtgtactgcgacaatatctccgccgtttacctgtccaagaatccagttcatcatggtcatgctaaacatgtggagctggatgtacacttcgtccgggaaaaggtggctgttggggacatccgcgtcgtgcacattccgactcgacaacagctcgccaatatcatgacgaagggattgcccacagcgctgtttgaagatttccgatacagtttgtgcatcgtcgacgacgcaccaaccgccggggggggggggggtgtcaagatggctgatcatgtagataaggataggctagattacagtttctttttgacctattcttccgccgtgctcagtctacgatccattttatcaggattccgttggcactcttgagctgcaccggcatgtatatatgtatactggatgtgatcaatacacctgtgcgttgcaactcaaactctttcaagattgatgtacctcatgggcgtcatcggtgcactcggcgtcaaaatcgtccttggcagggcacctagtgctagtggtgactggtgaggctggcaggcgaagatcagccgtggagagagagacgcaagtggccgaaggcggagaccgcacagaccggggtgggaaggcctccatgctgccggatccggcgatctcaagcatcctcgacagcggatcgcctccgccaccctgtagcgagcactccctccatggccaccgcgctcctagatcggccgcctggacccgctctcgatcacgttgctgccaccaacagctctgcaccaccaccgcctgggcctccaccagcggcccgccgatccgccgccggtgcatgctatttcgctcaagatgcggatgtggtgcggtggttgttcgctctttggtcaatccggcaaaatatataggatcatggtggatgggtttcctctttgatttgttacgttacatatctatataaatatttagtttataatagggacgcctaatttattggcaagagcggaaatttttgaattggcatattttggtagtgatcaatttatgtttagttaaacttgaagttgacactttatgcatagttgtagtacgtgtacacgtatttgtaagtatgtctagattttttttttatttgttagctggtgtgtgtggtaactgagagtgcactcaaaacttgtgggtacaatacatgtttttttttttttagaaaaagactagcggcccggcttatattgaaagcgcgcgcgcgggggggggggggtgggggaggtgttgttttggggacatcccaaacacaaagtttacaacgcaggaggcatagcctcactaaaacaaaagatgtgtacaatacatgttatcgggttaaatgtggcaacaaatcaaaaagcctttagtttccactttgtcattgtttaagcacaatttcaatacaattatttcttcaatttgtaataaattagttaattacagtagcatttggaaatcaaattacaccccgcgaaatgaacttagctgatcaccccttgatgccggtgctattcctggagcacttaccggagttcttgtacgtctccgggcaagggccgccgatgtagcggtcgtgggtcaggccggcgaccgccgcctcggtggtgtcctggctgcacgacgccttgccgccggacacctcgtagtagctggagatggacaccggccagcagtggatcaaggtgaagttgtggccgcgcttgccggcgctcacgccgcgcgcgccgccgatggtgaagctgagcgacgccacggcctgcaccaccacctggtcggtctcgccgtcgtagagcctcgcggcgagcgaggccggcagcgcggaggcgttcaggaacgcggacttggtgacgaagtgcgactcctgctgcggcacgacgaacgccgggagcgtgaacgcggcgagctatccgtctgcgccgcggcgccgtagatgaggcggacgaggttgtcgccgccgaagtggaccacgacgcggccgctcgggttgaaggcgcggagcgtcaccttgtacttgaccagcgacgcggccgacggcgactccggccgctccacggacaccgcgcagctggccaccgacaggtccagctccaccggccggagcaccatcctgatggctgttaagatattaggggtagtttagtattttcgtatcacttatatacatttatatttgccctttagggctagatcaatcttactgttgaatccccaaattcttctcctaaagtcacatggtatcagagcaaggatccaaactctagttgtcgatctgatgttctcgccggcgcgccggcggcgggctcgccgtcggcgagccatcgtcttgtcctcttgtcaagtcgccatccgtcatcttcgtcaagttgcaggcacagcatcgtcgttcgtcgtctcatcaagtcgtcatccgccaagttgcaggcagcagccaggagcattgtccttgcctcgtccacatgcatccacgcgcatcggcgacggcaaccccgtccatgtcatcagcccagtcgtcccccagctgcggctcgtcgtcaatcgcaactccgtcctcgccggctgttgtggatctggctgtcgtcatcctcaccggtgcgcttcgcagggccaaccgtcgtcgttgtatgccctcattcgccgcatcaagttgacaagtcgtcgtcccacgcctgttgctcgtcgagcgtgtcatccgtcttcctcgtcgcaggtcgtcacctgcctgccactcgtcgcggtctccacatgccactgcctgttgccgccgctcgtcgttgcggccactgccgacagtagatcctttagtcttgagtgttgttgcctctaaaccaccaagtccaagttgcatacaaggtgttcgacaaaatgcttcaaagggttgctcacagtttcctgatcatacttttgctatctaaactcgtattatactgaaagtactcgtggtctttcattatcagctgctgctctctgctaccaaattggatagaatcggttaatctgcagttccttggcaaccaccattatatcttttgctagcatatcaatgtcatctacaaatcgattttctttgttttctatctagtgtatccattcaagttctgctgcagccacgagcctcttctcggcagttatcatccacctctgctctgctcattctctatccattgctttgcatgttgcgttgctttgaatttattttgggatatgcatcaatgtttgattattcatcaccttcatcttgtgccaccactattctccatcatcttcagactgttgtcctgagtcttgctttgtccaatgcacatgtggcttgttggtgattgattggttgtgccaccaggcacatcaattgttgctactgctgtggtatatcaatatccatgtgtcttttgctactaaattagtatcatttacaaatcaatttcctatgttatccattgaatccagcaaattccattgcatatccttcattttgtcaaagttgtgccagtccatctcttcattgtcatttcatcatgactagctccacagagttggccttcatcatatcaccagctccccatcggagttgatatcaacatcaatcaatgaaggaccgaagaacaatttgtgaaggtccttcatcatcaccatcgtcatcgtcatcaaatatgtggagatccgaagaacagtttgtgaagggccctccatcatcatccacgtctctgaatcaatgaagagccgaagaacggtttgtaaaggctttaaggtactgagaactgaagaacagtttttgaaggctccgaggtccacttcattgaggaagagatacatcttttcttcttcatcatccaagaattgacacacttcgacgacatcatcaagactttggagatagaccaatatttagcttgtgttctcatatttattttacactccaaatgcaatgtgtatacacattgcatttgagtgggggtgttaagatattaggggtagtttagtattttcgcatcacttgtatacatttatatttgccctttagggttagatcaatgttactgttgaatccccaaattcttctcctaaagtcacaatggccagcaccaccgttgccgccaccgtcgtcgcgagcaccgcggtcaccgcgtacctcgccacgcccagccacggcaacttggtgcgcttgccgtcgccacccatggtctgcactgtacactgtcaagcacacgcatcgcctatacttgtcgctagctttatatatgtgcaacacgttgatgcaatcgccaaatcgccattgtcaccgctatgtcatctctccaatgttcgatctctgcaggaggaagaacttgttctgctcacatgtcgtttctgtgactgtgatcgaattgacagtccacccactaatgcaatctgctaatcacgagctgtttctgcatgcaagaacttattctgctcacatacattgatttctcagcttaggatcagagtattggtcattactccacctcatggtcctaatcgaaattatacgcactgctaatatacagtaatggctttattcgttgtcgctttcatcgggagaggtccaaattttaaaagaaactccactactctttgagtcccactccgatatgctctctactggtagtagaaaataatctgaaccattaatttcatttgatcgaatggttcatatttatttctactaccacctcacttaatggtagttgaatcatagaagggtattattgtccagggaaaattatttacagaggggtataatcatcttttagactcactaacccaagctgccctctctcctcgcactcgccaccttagccgccctcgatgactcgtccgccctcgccgccttcgtctcactcgcctcttccgacgcctgcactgccgcctccaccaccgtccccgtcgagcattttgtttgcatcgtttctgacatacgaagctgcttgcatgccattgaaattgaacaggctaagggagagcttgctgaagaaaattgacagcagcaaaacctgacaacccattcattgcttagccctaactttctatctaaaatatagtatggtttgtactgtatcactgtcagtgcatttagcaaccatcgagcaagtctacagtaaaacgatctattatattattaaagaaatagaaaaaggagcctccacgttcgctctcatggcctagaaattctcacattaatcagagaaaaagaaaaagcagagtccatatagaaatacaatttacaaatagctgaaattcggaattaaaaaataaggaatattagaagaggggactagagtccatatagaaatacaatttacaaatagctgaaattcggaattaaaaaataaggaatattagaagaggagactagagtccatatagaaatacaattagaaaatacctgaaattcggaattaaaaataagaaatattagaagtagagtatagactccatatagaaatacaattaggaaataactgaaattcggaattaaaaataaggaatattagaagtagactatatagtccatatagaaatacaattaggaaaaaatagaaattcagaattaaatatataatttaaggaatagaaaaaggagcctccacgttcgctctcatggcctagaaattctcacattaatcggagaaaaagaaaatacagagtccatatagaaatacaatttaaaaatagctgaaattcggaattaaaaataagaaatattagaagaggagactagagtccatatagaaatacaatttagaaagaaatttggaattaaatatataattaaaggaatagaaaaaagaacctccaagttcgctctcatggtctagaaattctcacattaatcggagaaaaagaaaagacagagtccatatagaaatacaatttaaaaatagctgaaattcggaattaaaaaataaggaatattagaagaggagactagagtccatatagaaatacaatttagaaatagttgaaattcagaattaaaaaaaggaatattagaagaggagactagagtctgtctatatagaaatacaattaggaaataactgaaattcggaatgaaaaaaaggaatattagaagaggagactagagtccatatagaaatacaattaggaaataactgaaattcagaattaaaaaaaagaaatattagaagtagagtatagagttcatatagaaatacaattaggaaataactgaaattcggaattaaaaataaggaatattagaagtagagtatagagtacatatagaaatacaattaggaaataatataaattcggaattaaaaataaggaatattagaagtaaagtatagagtatatatagaaatacaatttagaaaaaaaatagaaattcggaattaaaaaaataaggaatattagaagtagagtatagagtccatataggaatttaaaactaactaaaatttggaataaacataataaaattaaaagtagagtttagagtctgtataaaaatacaatttacaaataactaaaattcaaaattaagaaaaacattggaagaagaatttaaggtcaatataggaatacaaatattggaatataatttagaagcaactgaaattcgaaattaaaaattaaagaatattgaaagatgagtttagagtccacatagaaatacaattagaaataataaaaattcataaataaaaataaataatattggaagaagagcatagactctatataaaaatacaatttacagaaaattcggaattaaaaaaagaaatattaaaagacgagtctagagtccatataggaatatatataatttacaaataactaaaatttgatattaaaaataattaataactaacacgtatataaaatataatataaatattacacattagtagttttgtaaagttattgcaaaatttaaaattatgttgtcattttaatatatttgaataatataatgagaaaacatatatactattatatgagagaaaatataatgatgctagccgcgcaatctgcgcgggccactatgcttgttttgctatataagagtatacaagggtgggatttcacttaaatatataagagtggcagcttagcagattgggatttcacttaaatatataagagtggcagcttagcagattgggatttcacttaaatatataagagtggcagcttgagggcaaaatatttacttcatgcaagcgatccaccagttactagcactgcaagttactagcatagtggtttgtaaaacgctctcgcatcgccctcccctaggggcagcacgggaggcatcgaaccccggccgccccctccccccatcttcctcctccgcctcgccgccgcctgagcggccgccggcaaagccgcgcggccacaaggacggcggcggcggggctcctcgttcctcgtcgagctcgcctcgtttcgggcggcaaggggagcagcccaggacggcggcgacggtgaccgctaaatccgcgccgcctcggccggatctggcggtgtggcagctggcggctggcggcggagacggagacggagacggcggcggggatggcgacggcgacggtagaggagcggctgggtcgacggcggcggggatggcagaggctgggtcgacgccggcggggatggcgacggtggcgacgtcggcagaggcgccggatccaggcgcactggaggcgggtccggccccccagcggcggatctggccacccggctgccggatcgggcgagctcgtggcgggggcagcagagctcgcgacgacgtggtggcggtagcaaggcgagctcggggcaggagcgcccgtcgcggcggcggcggcggcgtcagccgccggcaggagctcctggaggtggtgctgtcggcggcggtggccgccgacggcggacgcagtatcggcaacgtccacggcagctctcggccggatttgggtgtggccgagtggtggtcggctggcgacgtctgttggcgacagcggcggcggtgtggtcgtggcagttggcggcggcggttgctcgctgcttggtggtggagggcgacggcgcagcggcggtttgcggtggcggtggctcgtgtcggtggcagcggcgacggcggccgtgactgtggaggcggtggtgacgtcggcagcggggaagtagtcgggtgcgaggtgaggatggcgacggcgaggtggctgagcgttcggcagcagcggctgcggtggtggtgaccgtgtctgcggtcatcagaggcatggtggcctcagacggcttgccgagggcgtgggagatggctgcatctggctagcgcgacatcatttggtggagaggtcaaagaccggcttggcgcagagaagcgcagtcgatggcagcggaggtcggctcggcgcgagaggcacgggcagcggagatggaggccggcttggcgcgagaggcgcgtccggtggaggaggccggcttggcgcagagaagcacggccggcggtggaggaggcgacctaggtgtgaggaggagctgctggtgtgtatggagtggtcttcggcgcacgaaggctggccggcggggggtgccggtgcaggggtcctatatgtcggcagagctagtatggtggtggagcatcggtgcgctagccgtgggtccctttgttagtctagtggcggtcgatcccgcttagcggcggccggtccggtgctagccttctgctgggcttgtgtgttggcgatgtcggtgtgtgggtggtggtataattttttctttttcctggctacaaccctccagtgtcataatcttgtaatttttttctgttttatcaatagaactcgttaaaaaaaaagttacaagcatgattcttcagataagcccattcatctctgaaacggaatgccacacatgcagaagaatgcaacacataaattgtgacatactagctagggtattaatccatatccatatctgtaacgaagtgcttcatatctagaagaattcagatacatgcattggaccaaaatatcatatcggtcgccctgcacccctgtgaatgacaacccatgcgtgtatggctggttgacagcagcaaattagaagaggttttttaaagatgagatgacgaattcgaaaagggttgtacagtacagttaataggcaaacaaattaagttttatttcttcgtgcatatatatatatatatatatatatatatatatatatatatatatatacccacatggatggaagagtacatatcaaagcaaccgctaatctggctcatacatgacgccagccagctgatcttgtagcacgtgtacgcatacgcaaaaataaataggaggaatcaaattaaagacgcgagcgctcgagctttatgaaaattaaaaggtatcaccggagcaagagcagctccggcctgtagtagtagagtcccgatcgagacgtcgggggcggcggccggactcagcaggcggcatggcggaatccgacgagggcggcggggatgttgtagagcacctcgagcgtctgaagctggatgttgccgatgatcccggggacctggtcgttggggccggcggtgaaggcgaggcagccctggaagaggacgcccgacggatcgagctcgacggcggcgttcttgtcgaacacaagcgtgatcctcggcagcgcgaagctgcggacgccggccatgtcgtagcaggtgtcgagcgggcccttgggcggcgccggctggtacatcgccatccggtccctgaacgcctgcctcagcgcctggtacgccgtcggcggcagcctggtgatggcggtgcgggagtcgagcgcggcgccggcggcgaacacggtgggcggcacggcgatccgctgcccggcgacggcgatggcctcgaggcgcaccatgtagaacgtgggcgggatggccgggttcttgagcatcggcgtcagcacgtacctccaggcggccaccctcggcacgccgagggtgaagaatccccggcgcgtcggcggcgggaagcagtgggagaagacgcggccgtaggtcgccgccgtctgcgacaccagtgactccggcccgccgccgagtgccatgatcccggcggcgctgctgccgaagctgaagctgccctgcacgccgtggctgcagccgaactggaagctcctgactgcggtggcgggggtgatggtcagcaggtcggagatgtaggtgcccgccgtcgacgtgccgtcggggtaccggacgcggtactggcactggttattgttggtgcagccattggcgtaggggccgagctgggtgcacgtcggcgagttgcaggagaagacgccggacgacgacgacttggtggggtcgtagaggacgtccttttgcgggtagcacggcggcgtggggcacggcgagcactgcacccatgtcacgtcgctcgccgtgtccagcaccatcgtctgggtcactcccggcccgccgccgccgccgccggtggcggccggattcatcgcctgagatcggacagctagcatgtgagtacgttttaatatatttcgatccctcgaggagatgtccggtcacgttgttaatttgcatatcacttaaatggttatgaaaaagtaatttgacaagatgtattaacatgtaatatatcactgcacaaataatatgtaagatcaaattgaacttctacatcttaaaaaagaagtttttttaagaaccacagcagggaaagccaccaccgttaagattttattaatatataaaagaaaaaataaattataacatcagaatccagttctttactacatcttgatctctcatttaatctaaacaacaacaacaggaaatctcttcctcccttaagaagatacttccaggaagaaaaaggaaaattgtaaaaaaaaaaggttaaatttatttttttcgttactatacgtagaagttgaatttgaatttgataagcagcatgtacgtcaataatgtaataagttctagatctattattcttttcatcagatcaatcaataatgcataagaagttctagccaattttattaatattatatattgtgggtaattattaaccttttttaattatataaacttagctttctaattaattactagtaataggttaattattattattgttatataattattttacttctttttgcatatgtgtgggttaaataattttacctttgatgacattggtgcaggtgcagggtagtacgtgccatagttaagatctccttctatggactgctgttcgtagttagttgacaccggcacgtcgtcggccggctgcagcacgccggcgaccgagccggagagcctccactgtatgtagtcggcgcggtgctggtccgaccagagcatgccgtcgacggtggacggcgccgccctacccttcgccggcgaggagctgcacggcccgtacggtcggctcaacgggacccagttggtcacgttggggtgtgggctcactaacatccacgtacaacaattatatttattaatatgatatattaataataattattattaaatgccaaaataattcgtttcatttgttagagaggttatttaccaaggtaaacaaggaagaatatatagttaaaagttgcccaacgacggcaaagtctagtaaagagtcgagaagataaatgatttatatttataataggaggaaatagtataattgctctgacttaactacttattaaaaacgttcaagttttaatcttaggtactactacctctgtttcatatataaagtcgtttttattttttttctagtcaaagtttttttgtttgattaaatttgtaaaaggacgtagcaacatctacggtcccaaattagttttcaattaaatgtaacattgaatatattttgataatatatttgttttgtgttagaagtattgctaattttctataaatttggataaacttatatatgaaaaaattacggagagagtaggaagaagagagagaaaaattaagacggtactcaggctggagcagacggaatttggcttgagccagctgctggttagcaccacgatgtagttgacctcatctacacctgcactgtggtcagcgagagatgtagagccagagagcacaacaagaagcaacagtagcaacggcactagtgctgcacaagccattgccatagccgggccgctcctgtatttgtgctgtgctactgatgatgatgtgctgtgccaagtctagctagctccctgttcgactatatatagggggggggggggcattaaaggcattatatatatggcgtgcatgtggtacgtagggaataactttacaaaataatggagagttgttgttgatcatatctccaaggcagatgcttattattactctacttactaattactctctccatttcagaatataagtatctaactagatgggatactacaaatctagacaagctacctattcagattcataatattagaaaatattttatccgattttaaattcttatattttgggatgaagatagtaaagagttaacaatttttatctcttttttcatctcgtaagtcattttagctagtcttattctaagtcaaactcatttaacgatgaccgagatggttgatgaatacaacatctaaattaataaattaaataaatacactattaaaacatatatcatgcatggtgtgtttgtggaaatattttggcgttttatattggtgtattttttttataaactcgatcaaacctatattagttttattagaataaaactaatgacttaaattatgaaaatgagagagccatataatatgggtgctaatcttgaagcattaattgatatacgctcgaggaagcacccatatttatgtgtaatataaaaacttgcctttattaattgagccttttgatttaagaacatggagaagataattcttaaatagcactctagatgcttgattgcatggataattggacatattaagaagtaagatggagttataatcgtgatcgagttctcttatgaaggcgtcggcaaacggcaagcaaccaagattcctgaggtgctagctgccttccgaggtcataagagtaagaccctgtttggatctatagactaaattttagtcattgtcgtatcggttgttttgataataattagaagtattaaacgtagactaatgataaaacccattccataaccctaaactaattcgcaagatgaatctattgagtctaattaatctatgattagcctatgtgatgttacagtaaacatgtgctaattatggattaattaggcttaaaaaatttgtctcgcgaattagctctcatttatgcaattaattatattattagtctacatttaatacttctaattagtatccaaacatccgatgtgatagggactaaaatttagtccctggatccaaacaccacctaagttgtttttctaaacacgatacaacactacaagaaatatgaccttctgtgatgaatttctcgtgacatcggagctattagagacgcatgataggtgacggatgaattttcgtcacgcgagcgtcacatattacaaaacgtgacgaaattttatgttttttgatgtaaatgaagcgtcatctatcataagatttcttgtagtgaacacaagcggtcacaaatgtacgcacacccacgcttttgaatagtggcagcagtagaaatttttcaatgggggtacaaagattaaaaatataccgagccataactaaatatgatatactagtgggctacatacccaaatccggggcaggaaggagagcgccatgcacgcagagatgtcaacgccttcacaaacctacttcaaagattcggagatgctactggtctacgcacaaactttcaaaaatccttggtggcaccgattaggtgtgatgatcttgacatcgataacatcctggaggagtcgtaggttacacgtgcaactttcccactaaaatacctgggcctgccgttgatgctagggcggctgcacaaggttcacccacagcccctcttcgataagtcagcagggcgcatggcgggctggagagggaaaaacctgggtctggcaggaagaacaaccttggtcaaatcagtgctcacctcgcaaccggtttacctgctaacggctctcaaggtgaacaaggatccctcaaagtcctggataaacaacgcaagcgtttcctgtgggctggttctggtgatattattggaggcaaatgcaaagtcaactgggagaagatctgctcaccgacggtgaatggaggtttgggaatcctgaatcttgacaagttcacaagggctctaagactccgttggttttggcatgagtgaaagtcaccagaaaaagcgtgggcggggatggagacaccgtgtgaccagaacgataaactcctattcgcgtctgctttgaaaattaagattggtaatggagacacaataaaattctgggacaacgcatggcttgatgggcgctggccgaaggatgtggcaccactcgtgttctcgatatctaggcggaagaaccgctcactcgcgcaggcaatcgaaagcggccagtggctagatgaccaagccttacccatcaatgatggaatgacaattgagctcctgaaccagcttgtcactctctggacgacaatccaacaggtcacactttccccggatgaagacaacaaaatcacttggaagctcacgtgtcatggagaatacacaacgtcctcaacctacaaggcacaattcttcggatcgctcaaaacaaactttgaaaccttaatctggaaagtatgggcaccgtgcaaatgcaaaatctttgcatggctaatcattcaaaatagaatctagacgtccgacagattggcgacccggggatggcagaacaacgatgtttgcccgctatgccgacacactaatgagaccgctattcacctgctggcagactgcagatacaccaagaaaatatgggatgccattgtcaaccggttagcctgtgcgcccatggcgccgacaaattgggcacaggcgagcgtggttcacgaatggtgggaatctctcgccacatgccaagggttaccaaagctggggaccagatccctaattctcctaatctcttgggaaatttggaacgagcaaaatcgccgaatcttccgaaacaaggagctaagcacggcgcccctcaccgcaaagattaaagaagagtaaaaaacctgggctacggcgggaaccaaacgcctagcagagatgttaccttagtgcctattcggtctttgtaaatattacttttactccttacatgtaaatattgctccctgctttattcaataaatggcaagctttgccgttgttaaaaaaatgatatactagtacagaacaaagcatcctgaacaacccatctatgacggcagtcagcagcccgttatagaggcactcatttatgacgggccaaaaaaatccctcttgaatattggtcctcatggccaaacccgtcaccgatgacccctcatctttgacgagttgaatttgcagcccgacacaggacatctgtgacgggcctcaaccaaaccccatcaccgatgaggggtcaacggtgacgggtgcaagctattcgtccgttaccacctaagttgaattagctctaagttgaggggtcatcgatgatgggcttcatttaaggaacgggttttagatatatatcgttagagatgaaaaatcacatctaactggtttgatttttaacctgtcactgatacgacggtcagccgatcaagatcaagatggagacagtgcgccttatctattcgagagtctttttttttacggttaaaacagcaggagaggctcgtactgcacattttattaaaagagccaatatacgaggggaaactgtacaggggtacaacaagagggaaaaaagaaagaagaaaaagactgcctgaaaggcaagctaattaagatatgctattaatccatgattgccacaaaggtttttctgtttcctttacactatgcatatgcagagtaaactcatccttgaaatcagccttccatttgccaaagtttgcttgaataccattgaagatcaagtcatttcgtctactccagagatgccagcaacagattgccaaaacttccataaagaagggatgagggaagttcctattcgctgcaatgatcatgttcatgaaattcaggtttagatcccaatttataccgaggatatgccaacattgctgggcaaaggggcagacgaagaagagatgaagagagtcttctgtgattgagttgttgcatgtaacacatgtagctccaccttgggtattgaaatgttttcattacagcaactctttagtgtttaatctgtccaataagaataaccaaagaaacactttgaacttgagtgtgcatttgcttttctagatgagagttaagggaatttcaggttgaatatgagtaaaaaacatgtcataaactcttttcgattgatattgaggtgagttccagatgtatgtccattgatcttccatatgatttaaatttaaggtttgcacagtgctggaaagaaggtgccattcctgaattgcttggatggggagtggagtataaaatacctcttctaagtgactcagagattgaaaacctttgacacagatgtccttatttttagcaaatgagaatagggtgctcgatcatcatgtaaaaaactccctgaccaattatccttccagaaaagcgttgtcaccaagcccaacatgtaccaaagaaatggctctacaaattggaatcaatctgaaaacatccttccaccaaaaggatcccttttccacatgagcatgcggaggcagagcagagtttcacttaacacgagtgctcatatttacggctagtttcttttagttgtcccaatatacccgtcgacagcgagacacctgtgtgcacgttgtgagcgcgtacgtttgtactctgtttctaaaataaaacctttcgaagatgatgctaaagtaaaacaaatgttccccattcattttatattataagtcactttaggtttgtcctaaatcaaacctctgtttctaaaataaaaccttttgaagacgatgctaaaataaaacaaatattcccctttcattttatattataagtcactttaggtttgtcctaaatcaaacctctttgagtttaaccaaattaaaaaaaatatagcaatattttaacccaaaataaatataccataaaaacatattgaatgatggatttgattaaattaattcgatgttgtagatttatgtgtgtgtatccgtctcacgaaaagctcaaagtaaagtattgcgaaggacaaggacagatcatttgcctctccacgtgcatgctaaagcaaagtatagtgctccctccctttcagattacgacgttttaactttgattaaagttaaactgttttaagtttaactaagtttatagacaaatatagtaatatttataatactaaattagtttcatcaaatcaataattaattgaatatattttcataataaatttggtcaaacttaaaacagtttgactttaaccaaaattaaaacatcttgtaacctgaaactgagagagagagtacatgtaaatactaataccattaatacccgacttagctctttctctaacaaaatttgttcgagctcgtgttgtagctagctggctctatatctatagcacatttaatttctctctcctccaattaaacacaaatataatttggtggcttttgcttaactccagtactcctcctagctaggtgcttggcatcaatcgagatcttgctttattagatatgccgccaatcatgcatgcttaagcttctttttgtacagaaatatatagatgcttgagctttggaagctactacatcgtccttaattattaatttggaccacaaaaagcacgtgtgaatattaacacgttgtctgtcttaatttagggatgcttgatgctttttatacatatatatagtttctcaggagaggccagctattcatgcaacaactcgatctcagtacaactggcttacaccttgtttgctttttcaacactgatcaaaggaaaaggtttaaacttggtgaaagaaaaagagcatcgatcacgtgtgttgtattatactgtagtgatctgtaagtatgtatttatatattgtcaaaagctgaatttctttttcttacgaatacttagttatgaaattcattgatcgtttcaagattagagagatacgtacacagctacgcaatatacaatattaatacgaaagtactgattaattaagtccatgtctgatcttcggctcgattagatcagtggcggagccaggatttcaaagttgggtattcccgtctaagcgttgagccgttgcccgtccctgccccttgcggccgccggccatccaaccgacctgaccgccttagcttggcggagtgtcgggcgccgcccgccgcggcaatggcctccccctccgcggtagcacagtccagctcccgccgccgattgccgtctcgccgcgccgccacctagggtttgcaaatggggagtggcgcgagggagccgagccaaggagggatgggtcacggagggagagcgagagggggctgtctgaaagagtgctagctaagtgggtcaactgatgtttgatgggtcatgacggagtaggtcgggttggttggaggcatcgcaagagaccagttgtgctatgtttggatcaaagagttgaggatttaggtgtacaaatatgtgtacatgtgtatatactagaagtatacttgttttctgataaaaaatgttgggtattcccgggaatacccgggaatcacggtggctccgccactggattagatcagtccccttttgcctcacgtcgcgtaatattgcacatctggtttcacgtacacgatactgtggataacttgtgttgcactcttggcatgccttgagtcaccggccggccttgatccacaccaggggcggatccagaaacaaaaagttggggggactcaacataccgagtacattgatataaacacataatctcagtattaaactatgctaaaatgctattataagacctttagcacctcctatcttatcaactatgatgaaaaaattgaagggagggcttaggggggtatccatgggttttgtgggtg

SEQ ID NO: 4528 - DNA, 109586 bp, Oryza sativa
  unsure (1)..(109586): unsure at all n locations
cttactctccattcaaacaatatttatgcgggacccaatgatgagtgagggtgatatgtgggcccgagtggcatttgggaatgaaattttgggagagtggcatttgggcactggcatttggcaaatagtaaattctcccacacataactaaccgctgacatgtggggcccacacagccggccgagacataaacgacccactgacatgtgggccccacggagccgtcccgtccccgcactttcccctacacacaccagatcccctcttctaatcccaacctccaaaactcataaaactactctaaaccctactccactcccgctccgctgtcactgacaaccatggcccaccacgtcgctcccctcctcctcctcctcacgctcgccgccgtcgccgccgccgcgtcggaggaggcggcggcggcggatacagaggcggctgcggccgtggaggccggcctgctggtgcggcgcgaggcgcagctcgcgcggctcgaggagctcaccgagtcgctcgccaagtccgtccaggcgctggagtccgcgctcgccagatccgtggagcccgatccgccgccgccggcagccgccgcggcggcgcccggcgaccggagggcgccgcagggggtggccgtgacgaagcggaggccctactggtccgagcggttccacttcgccgcggccgcgcggctcggggacggggcctacgccgccgcggcgaccgcgctgccctacgaggacgcggatgggctcaccaagtacttcgccgtcggcgactcccgcggccgcgtcttcgtgttctccgccgccggggacgcgctgctcgagctggagcccggggtgtccggcgagccgccggtcaccgccctgctcgcgtacctctcgccgngccgcaccgattgcttcctcttcgccggccacgccgacggctccatcgccgcccaccgcctcatcgagtcgtccccgcacggcgatgactggctcaccctcgccgccgcgtcgtcccgcctcctcgtccgcggcctcgacgccgcccccgtgctccacctcgaggcccaccacgccggccgcgcgcgctacgtgctgtcctgcgactccggcggccgcatccgcgtcttcaccgagaacggcacgctctacggcaccgccatcgcctcgtcgacgcctctcgcctttgtgaagcagcgactcctcttcctcaccgaggccggcgccgcgtcgctcgacctccgatcaatgtctgtccgcgagacaccatgcgagggcctcgctgaagctctcaatggctccctcccaaaggcctactccttcgatccttccgagcgcttcaaggcctatggtttcactgatgccggcgatctcgtgcacgtcctgctgctcggtgacattgccagcctgaaatgcagggtccgggcaatcaagaaggctgagatcgacaaccccgtggcgatacagacgatcaaaggctacctcttggtagccagccaagataagatccttgtgtacaacacatcaactcagtactatgggagggttggggctccccgcctgctattcgccacatcaatcaaggatatcaagtctgtgtttgcgggttctggtggcgtgatgcctgcttcaccagctgggaagccgcttgttgccgcggacagggagaagctcgtgatcttgggactcggagatggttacattgctatatacaggtccaacttcccggtgtacaaaccggagagcaatgctgtggtgtggagtggtccagcgctgctcttcctcctgttcttgattggcatttggcaagtctatgtaaagaagaaggattcgttgggctggactccggaggagacatttaacacctcagtcacagctcctacagggagcattttgaatcattcgaccagtgaccgtgccttcgctgatagctcaacaagaactggtgagcgaggctatgttgatggcacaacaagagccagtgatagaagctatgtggatgccaccacaagagcgacagaccgagcctatgctgaggctaccaggggtgtggacctacggggtggggcgttgagaggtgctccaagaaggtatgtgtcccctactagatatacaggggccgcaggaattccatatcgacctgtttcaacagagcctgtgcttcgaaccacaccggagctgaagtatcgaggcccaggtatggagccccctggttttcccaagaaaagagacacattgttctcaagcaaccagacagtagtagatgatcatgttgattgactgtttaattagcggtgtagacaacacgctaaattttgaaggggttttgaaaatcctgcaccaatgtgggcagcgatccacatgtgtgttgttgtaagatgtaactcaaaaatgttgtatttgcatgagtacattacagccattgatatgatgctgcagatggtgaaataactttgaaatttatgggttacattatagctatgaaagaagggattgttgagctgttttcgtatgacttccatcttcaacgatgtaggaaaattggacaagtttacaataatttttaacaatgataggctggtaggatgtactatggaattgctttaattatacagtggcgtgttgagcatcagaaaaattcagcaagttgcatttgcaataattttagccatagacactacaatatcagtgagatctttttttttttcagaattcactaaagttattaatgacacagtttgcaaactttaaagctcaacacatcacgtgtaacattttaacttgattttctatcactatctgatctctctattacctttttgcttccaagataaggaggatctgctgactgccattgcagatattttttagtggttgcaactgctacatcatcttaagttggtgacaatgacatggggcttagaatggtagcctgtgttgtctaatttttgtgttcttttagcatgacaagtgattccttcaatctgattcccatctatagatgataaccaatttagttatctgggagatatcataccagaatttattctgacagttttacatgaattagaatttaatctgacagacatgaactctgctcggtctgcagactgcaactacaggattcaccggttcagccattttctgcaggacagcaaaaggccttgcattcctttgttcactgaagtactgtttagcaaaagaccagcgctgtcagcagccggatcaacatctgtcacaaccggaatatgacaaccctagagtttcagaagttgaaagcgggtggagcattcaactctttttaggtaggtaggttcagactttcagtagcaaatcgtttcgtaggcgagcaggatcagctgcctgggccttgcatcctggaagtaacttcatgcttctaattgtagagcaatgctcctgtcgttatgctaaaacaagttcagattcgttttggttaacattaacttccacttcctcccttgtagtgggtattattccgttctatttcagtgggcagtaattcattgctaggcccttgcattatcaaacaagatttcaccaaaaaaatgtagacctgatatatcatcgaaaataaaccggatagcagcagaactgaaactctgggatgacaacataatttgagcacaaatgacccactatcattgcctctaaaatgcagaaaccggaggcagtgaaacagcacaaatttgaacttgagcaacaacttactgaaacaaaaagatatgaatataggaaaacaatgtaattctttactgcccagtggaaatttttcaccgaggaacagaattcatcaaatgtgagtataatgtaagctccaatgtttgctcacaggtgaagtgaaaaatgcaaaacgtatcctgactgttgcatcttattacaatctcaaggcctagaaaacaaacttcatattcatggtaaaatcacgacactgaaccagtttctctcgtctaagtggacttaacgatgaagttttggcggctgatggggttcatgatgactggtggtccagcggtgcgaggccaggcctggaacttggtgtcagtggcttgccaccactccttgtcagagacagtctttggaatggaacctgcgtccaatgaatgaagcagattaaggtccaatcttccgggaggttaagcacatgcctgtaagactaaactcacctccaaatgccttcttgtcagaaacaaatgtgtcacacaggtaagcaatggcgaaggatccaaccaaggacccagcaatgtatccggccgtcatttttgctgcacaatcatgaaatggcatacagattatcaagtctgatagaaaatgaatgttacagattattcatatgaagagaagcatgagtgaacatcacagtctagaaaaacaagtcccctgctaactgtagttgttctcaaactataaataagcagctttcttgttcattggtataaacacaacagacagacaaaaggaaataagctccagcgtacatatagtcaagcgcaattgtgtagaaatgcagatagtcaaatatgattccaagatatacaacttaatctccagctagtttaacaagttagattagtgcaagatcaaatggcggtcctcttgaaacaagtgatatgataaataatactggacttattgtggaagagtaaatgtgcagtacgactcaaaccacagcctacatataccttaacagaatcagttatagataatagagtagacacatcatttattctactgataatactccactatctcacagccaaaatgcaggagcaaactagacccaagggggcttattgctaactgtcgaagttgtcaaaactataaatcagctgctttcttgttctttggtacgatggaataagttccagtcttccagcacatacatagtcatccacagttagaaaatataactatcacgcctcaagcgcaaatgtgtagaactgtagataaggaatatgcgattccaaaatatacaactgaatctccagctagttcaacagattagattcgtgcaagatcaaacagttgtcctcaaacaagcaatatgtgattcactggacttattgtggtagaataaatgtaattaaaaccacaaccatcatatatactttaataaaaatcagctgaagatatagacaccttgtttatttattctcctgacaaatgccctactctctcacagtctcacatagcaacatctagacccaaggggattattggttgaagcaacgggttaaaatgaaagggttggcttgggtgggagtggatggttcatccaatcgaaaccagtggtagtatcgatggggccattcttcaactataatggtgtcaaagtatatgttcacaacagcaattttctattcgtaatgtgtattaatagtgggattagcaaaaagtcatttgcctccgcccctgctccaattaatcatagtatttggttaagaggatcacagagtagactccgcgatcgatcgatcgatcatccctgaggaatcggtagcttgtaatcgatcaaacacgaccacttcaaatctcgacgattcatgcacaaattcatcagagaagatgaaactgggacccccaaaacgcaggcgagctcgctgcgcaaacacggcaggacccacgaacgaacgagttaggaagcccagcttatacgtagagaagtccgacggagaggcgcagcaccatggaggagatgaacggagagagcagatccgcgagagatctgggagccctaggtctaggggggcgggggtcggcgagcacgtaccttggttcggatcggattccgccgccgccgccgccggagagagaagagaagagaggagaggagacgcgttcctggaaaggaggagacggtggcttcttggcttctctctcgtgcgggttaatgatcgattcctatatgggcctcgtgggctttttttgaaggcccatagcatgtttatgcaaaatggcccctggattaaaaaaattgcaaatatccaaaaggaggaaggggcagaagtcagaactcacaagcaaaattctgtgtataataaacctgcagctagctgcagactgttgattaattgaaccaaactgaacatatatatatgttcacagcaaattaagcagaatgatatatatatatataatatgagatgataaataatacggtgacactgccaatgttgcaagatcgatcgatcgatattacgtacattacatatggctggcacataaaacaaacttgctatacattcgatcagcgtaggactgaaacggcaacatcaacgaactacgtaccgatccatcgatcgatcaacattgcatagtactctctcgtccgtttctaaatatttgacgcctttgatttttttaaatatgtttaactgatcgtcttatttaaaaaaattaaataattattaattattttttatacatttgatttattgttaaatataattttatgtatatatatattattttataaaagtttttaaataagacaaacggttaaatatgtttaaaaaaatcgaacgcgtcgaatatttagaaccagaggaactataaattattcatggtgcagtgcatgtagatgtagctaacctatatatatattccctccgttccaaaatatttgacgccgttgactttttttaaacatatttgaccattcgtcttattaaaaaaaattaagtaattattaatttttttctattatttgatttattgttaaatatactttaatgtatacatatagttttacatatttcacaaatttttttaaataagacgaacggtcaaacatgtttaaaatggttaacggcgttaaatatttaggggatgagggagtatatagctagcctattctagatgatactgattaataagcgcgacaaagccggcgaggtagaagacgatgagcggtatgtcgagaacgacgtagtgggcgaccagcatgtgcttgtagccggacgcggcgcagaccccgccggcggcggcgaccacgacggggaccagctcggagaggacggcggcggtgtacgcgccggcgaagtgcgccaccagggcaaagaaccccgacaggaaccgcgccccgttcgcagccgcccgcgccgccgtcgccgccaccgcctgcgccgtcgccgacagcagcaccagcgccgccccggcgcgcatgaacgtggcgccgccgctgccgccgccgtaggcggcgcagggcccctgcgacgacgacgcgtcggcggtggtgatggcgaggacgaagagggcgaacgccaccgccgcccagcccatcaccgcgtgcgcccacgccatgccgctcaccgacatcgtcatcctcaacactagcgaagctgggcagctagctagctagtgagtatatagtggttagtgaagtggagatcgcgatgcagcatgcatgagaacaaattaagtgcaagggctacatatatagtgcaaagggctaaagcacaagtcaattcacttgttggtggcataggaaatatgatgtgaacgaaacattacaggggcgtagctagctaggtggcacctatttaattatagtatatgttctagttaatataataaaaattgtatagtggaccacctatttaattgacatattacatacaaatggaccacctttactcaaaattatagctacaccactaaaacagattctagctacaccactaaaatataagggtattccaaaatcaagaaaagaccatgtcgcaacttctcaccaaaatacatgacaaaatcaagctatgaagcatgtggggggcaaaaaaaaaaaaacattgccaaaatacatgacaaaatcaagctatagagcatgtgtggggcaaaaaacattgcgagaatatccgcttagattttaatttagtgtgtgtttctttttatgttttcttcctgtttcttttattttcctctctctttcacgtcccttgatagtatttagtcccttggtaatattgtaaatactttctattctcttaatataacttcagtttagcgtggctacgatttcaaaaaaacatatatataatgctgaggtgagcttgcattggcatgcatgctcgatgatcagaaagatgagatatggatcagcagcaactaataacttaccacagctgatcataatctctgcaaagttaattaaacacatgatcgatcgattcatcggtcttcgagattggtatagtaggaaagattacttgatgaggctggccggctggcttttgagatgagcagagctagcacacatgtgaagtcgatcgtacttttttccccatttgcattgcattgcctgctacgaatcctaatcccgtttctcttaattacgtacgcgtccaatctctcttattaatttggctctgctcgatcgatctgctcttcgtcttttgcttaatttgttaatttgctcttgaggccatcgcacacatcatgagtgactacttgcttctatctttgtatacatctttcttctttgtctatctaggaggagtaggatttcctcatcacctcccacaccattaattgattgccaagaacgtatggctactttcttcgccggtaagcttaatgtccttgtcataatcatgcatatttcggcttgtttgcacctaatttcctcttctccattgattactactcttacttaggcctcgtttagttcgcgaaaattttttttgagtgtcacatcggatgtttgatcggatatcggaagaggttttctgacacgaatgaaaaaactaatttcaaaattcacctggaaaccgtgagacgaatcttttgagtctaattaatccgccattagcacatgtgggttaccgtagtactttatggctaattatggactaattaggctcaaaagattcgtctcgcgatttcccctctaactgtgcaattaatttttatttttatctatatttaatgctccattcatatgtccaaagattcgacgtgacgtttttttaaaaaaaattgagtaactaaaccggacctttttttttagataatggaaatgtgttacatctccggcctctgcccgtaggcacacagccaaaaaattcagacgtgaacagaaaagttaaaaaagacaagatgggacaaacccccaacttctgccgatgatatgatctactaaaataatattttttttcaaaatcacgtagattctatcacaaaattctgtaggtactacgccatccaaaatggaataaaagttccttggctactaattccaagcgtgtagcaccattgcgcatagtatcctgttgttcctgtgaaatcatcatacaccaagagtggagccaattggaacacatgaagataacctgcatgatgttagatatttttttatggttaaaaactatatcattacggcaacgccaaattgaccaacataaagcactagctccaaacaaaccggaccttaattagtctatttccatcgtcacaatatatgcatgtacaggatatatcatgtactccctccatctaaaaaaaagttaaccaaagaggggtcatacctcctctaggttgcctttttctgggacggaaggagcatgtaacttgggctccatgtgattcaattcctcgggcttggttcttgtttgatttcgatcgattaattaatttagtttcttggttattgcctctgctctgctccgttgcaacacagcttgtggtgttactacagtacattctgatagctccatccatcgacttgaaatttccagaggaaactcgcttgctaggtatcaccaacaagcacaacgatgtgattggatcctatacagataaataatttagagtaaatcacgtggccaatatctagatttgttcgtgtgtgtcatttagatcctgaactcttaaaatttatttttagttttttaaacttattaaagtgtgtcattctggtttcaaataggcacaactcctccaagatcaattggcgtggcatgtcacacggatattttagtcgtaaaatttatttttccttctcctttcttttcctcttcttttcttttttgccatacttacatgaaggaataagaaaagagagaggagatgaaaaagaaaaataaaaagagtcaatatttacgtggcatgccacataagtgtcacgtagaatcttagaaggatcatggcaacctcggaccggaatgacacattttatcatgttcgtagatctgaaaatgtattttaagagttcggaaatcgaaataatatatacggatgagtttacgaaccaacgaaccaaacactttgcgcaataatttaagaaaaaccatttagattttaccaatggagtggttacatgcatggctgatgggaaagaagggagcaacagatgaacagtacgtagaagttgggagtgtaccgggcaggacgtccaatctttttatttcaactacccacacaagatggtgcggaatttcatattgatataacagaaaaaaaaatcacaacactacaatcctataactaggaagaagaagaaaaaaagatcaccccaccacaagctagaggctccaacacataccttgagaagcactagcaccgaattggctgccgatgtgcgcgactgatcgccgctacccctacacggggaaaccaatttttcggttcaaaacattttcaatatctggtaaacattttaatgtactcgtcactgtaaaaaaacacttagaatttaggcttatttagattatctcaattacatatgattattgtagaaaaaaacacaatgaacgttattacttattggaaccaagatcatgcgaatgggcactggaaaatgaaacatatataaaaccttgtggtcgttgtctgatggagtatttttcttgtacttttttgaggaagccgatgcttcaacaacgctgagcccaagaaagtgtaaagtgtagaacaaatgtatggactgcatttcggaattcaccagtagaatcaagaatggattaattttgcaggatgatattgaccgcaatcaatctcaggagcattttctggcctaaataaaccatatcaagttcgttccatatttggagctagtgtttataattagctagcatatcattatggtttcttgatcagaactccacttagagcaacttcaacagactctttatttagctctccaaggtaaaatttagttaacacagagaaaaaacgagctccaatagcctctctatccggatggcttccggatggccaaattgctcctccggctagctaaatgtagccaacctcctccactggctaaaggtgggtcccaccaccactcccatccccatccaacatctctccctgccggcgacgaactgagggcatatgccggccatgagcgccccccgccaatgtcgtcgtctaggccaccgtccgccgtggcagtcgtcgtcgtcgccgtcgcgcctcacgcacgagccgtcgcagccatcgccgctgctgcgcagggagccaccgccgcctccgcctcgcgcgctggagccgtcgccactgccgctggatcgatgggtcgatgctgccacgcgggagaaaagaaatgggaagagaaagagaaagagaaagaggaggaagaggaagggaatggagatgggaggatgacatgtgggtttctttgtgattttggagatgtaaatagagagactgttggagcatacatctagtttgactacccaaatcagttggagagttggctaaatagatatttgaagagtctaatttaaagatgctgttggagatgctcttaattcagaaggaaaaaacaggtgaactaccagaaaagctttgccagcaaagtcatgacgtatacaactataagccatcttcagcgtactctaacagaactccatttatgccaattgaagaaatcgttgcaagttaaccgcagtttgagctaactattatgttataatcttttgagttgcggttgataagctgtggaaaataaacgaagcaaccaaaagtaatataacagataaatagcaattgaaaatttatatccatgttattagtgattgaaaagctagtcgatcgctagaaaataaactgacaaaaaaaactcaacataaaataaagttttaaaatctaaaatttggtcgcgattgatcagctaacgagagcagaagatggaaaatttgttgtccgaagaaaaaagaacaaacacagacggaaattaggcctgtttagatcccacccaaaaactttaaaccttgtcacattaaatatagagtatcaaatatagacaaaataaactaattacatagattacgtgtaaattgtgagatgaattttttaaacctaattagtccataatttgacaatgttgtgctacagtaaacatttgctaaagtttggggtgtaaagttttggcgtgtcacatcgagtatgccagcacatatttgaagtattaaacgtagactaataacaaaacaaattatagattccacctctaaactgtgagacgaatttattaagtctaattaattcgtcattagcaaatatttacaatagtaccgcattccgcgataacaacgcgaaaccgagcggtctggcggaatgaaacagcggtctcgctcaagcaatagcaatactagtgtcatgccgatttaattagcaattaattatcttgattagtgattaattaattcctaatccagatacttaatcactaattattattatttaattgttaattaagtaattaattactaatcaaacggagcccattggacagtgtcgttgattgcttgggcgaggtcgctcttccatccattatgcgagactgcgtggtctcgcgctttcaccgcactcgataccgctcgcgatgtcattttcgcgtaacggttttgcgagaccgacaatatgttttttgcaaaaaattttacgtctcgaatattcccgagaaaaaattgaatgaaatgtatattttcaaatttaattatgctttggtatgtcgaggacgacgtagtgagcgatcgacgagcatggacgcggcgaagacgaccccgccggcggccggcggcgaccacggcggggaccagctcggagaggccggcgacggtgtacactccggcgcagtgcgccaccgccgacagcaccagcagcgccgccgaggcgcgcatgtacgtcaggagcattttctagcgcctaactgtcactgcacattgaagaaaaaaatggcatgaaaaagtttgttcgatacttggaactagtgttaattacagtaccattttaatatggctcgtagataattcagaacgaaaaagtaggtaatttaattatcagtaaagctttgccagcagagtcaccaagtatacaactttctttcagccatcttcagtgtgtactttctcacaagactccgctttataccagttgaagaaatcgttgaaagataacggcagcttgagctgacgattctattctaatcgtttgatctatggcctatggctgaaaagccgtagaaaattaaagaaaaaacatccaaaaataaatatacaagtaaaaatttcatatgttattagcaatcgaaaagtaaatactagtagaaaataaactcggaaggaaaacaaacccctcaaagtcaacataaaatcaagtttgaaataatttcaaattttggtcgtggctgataagaccaacgagcaaaacgacgaaaaaaattgttatctggaacgaaaaaaaaaacacggtagagattaatactgtactaaattttcaacggttgggtcaccttcaattaccaaccgaagcaagcaactggtaaagcaaatcaaagcaaaagatgctagtagtagatacccaccaacgaaagaagccgacgctcctccctccttcctacaccgcgtccaccgcacaccgcccgagggcccaacacccggtccacggtggaccgcgtccacagatcgatccctcgcctcgagcaagcaaaaaaaaaatccgtactactctacgtggcgtggcagtcgtcctcctccctcccacgtgagcctcaccgacaggtgggcccggggagaccgtggtccccacctgcagtggcgcgcgtggtcccatctcccaaagcgagatgagtttgctgctgcagaataaaaggcacccagaaaaaaataaaaaggcagaaaaattcggcggaattcgctgttggagtgagtattcatcgaggcaaagctcgaatttttggtactatccgattggtggcgaagcagcggcggagcgagagaaaatcgctgtaggaatcgggggagaaggaggagtagatagagggaggtggattgagctgtgggaggttaggttggtgattggtagaggaggaggaggaggagatggagaggaaggtggtggtggtgtgcgcggtggtcggcttcctcggcgtcctctcggcggcgctcggcttcgcggcggagggcacacgcgtcaaggtgcgcagctacgtctctcgccgccgccgccgaggttcccggcggcggtttcttgaactgccttgttactactactactttctggatgaactcgctcgcgttacttttatagatctcggtgtgtctgctaagttgagcttttgtttggatctcgctgtttcccatcggggatttctgacctggtgggagtagatgcgtgtagcttatccgtggttgttcgctaggaaaatgcgctgtggcagaagtgaatctttgagcctttttatgcttttggttgattttcgctagagctagtgctgcgatcatgttaggtgtagagtggatgtttagttcaatctgattcgactagtgcgtgtaaaattatatggttgaatcagaatctgtccaagttatttccttttctggcaatgttcatcttgtttgtcaggatatagcactattagtctactatatatggtgaagctttacttattagaaatctttaaactcgttattctactgttcttttactcttgacaatgcggctagaacagcttaatcattgtgaaactcattacaaaccctagtgcctgtaagcacattgcagatattttcctctttgaggcttgaggatagactaattttgcactgaaatgcatgtaaaatcatgccgcgatgtaggaatataaggtggtacatgtttatagctttacataatgcaaatgcaaacctcaaaagtgtcaaggatcttatgctacgcagaaagttcttctgactgcaagtgaaactttactatagaataacttaaaaaacaaacagactggacatattaactgtggggctgtttggcagcgcttgctgcagctgcgctgcacggacggttagaagaaatatgagttcggttcctttagtagctggctgtggtgcagccgcagccagggcttctgaacaggccctgtagtattaactgtttcactatgtatgatcttagattttacatatagattcttgcaataacagtcataccatcgctaaagcaatatataattatcatgtcccttactctttttagagtgctagattgtaataattggctgtagctcttctgagcaaaggccgggatgttctattccattatctaaaaaaaataattatcatgtcccagttataatgcacattgcttaactcatgcaggtttcagatgtgcaaacttcttctccaggtcaatgcatatacccaagaagcccagccttagccctagggttaatatctgcggttgctcttatggtcgcccagtctattataaatacagtggctggttgcatctgttgtaagaggcatccagttccctcagacactaactggagcgtagctctgatctcattcatcgtgtcttggtaaaactctacccttgatgtttattgtgttattttacctttttcctctatcttgacgggtttcaacttatcttaccgatctaagagaattctgaatattattatgttatgttgaacctaacttagccttgacagtttgttaaacagtttttatggaaacaagggatcttggttgccaaatgcgttggagttcttgactctgtcattttggcactacaaaggttccttgcagttgatgccttatttcagtagtctttattaaaacatgtgtgtttttctgtgagatagcgtactagcattaggctgctgtttgttttattctttgcaaggaattcatatgagtggttcacatgatggctaaatagaataacttttgcatagatttcaagtgcaattagtaatgtgaagtgcaattctacctttttcttggaacatctttggggggttagctgtgctttattctaaggtagggttcagatcagaatgttgtggcttattttgcggaagtcctgattcctgaatgctatattttagcaaaatactctgctatttgttatttgccataacgtcgtcctggatattgttacattctgcagggccactttcataatcgcgttccttctcctactgaccggagctgcacttaacgatcaacggggtgaggagaacatgtactttggcagcttctgctacgttgtcaagccaggggtcttttctggaggggcagtgctctcacttgccagcgtggcactggcaatagtttactacgttgccctatcatcggcgaaaagtccaccaaattggggtccccagcagaaccaaggcatcgccatgggccaacctgtgatccctccacagagcagcgaaccggtgtttgtccacgaggacacctacaatcggcagcaattcccataaatcatgatctgtgcaagctgtttcgagggccattctgatacattatgtttggtttgtataggcctccaggttagaacagtagcagtaacaattgttgttaggtagagtcatgttttttgctttcttcttccccctctttcttgagcgctactgtcgcacgttctgcttcatcacagcggatattcgattttacatgaaccgggcaatgttgaagaaagcttgagtttcttgctatttgcaaattctgaaggttttacatgataattggatcatggatgtggaattacaatctgtcttacacctgtgggaacttgatgagcagtcattcagcacacagtggatgctagctgctccctgaaccgagcaatggtgtcgtggacgatggcgttggggcgcaccgtggcatcgaccacggtgatcccctccgcctcatcgatctgcagcaggtcgagctggctctggagcaagctcgccggcatgaagtgctccccttccattgatctcctcctgatcctgtcagcaatcacctctgctgatgcctccaggcacacaaacttcaccctgcagctggagtagctccctgaacctgacctgaagctgcagtctccttccctgaggatctccctgtacttctgctgcaatgccgagcagctgacggcgacgtcctcgccatgatccagccgctccctgacagcgtcgcggagggcctccagccacgggatgcggtcgccgtcggtgagagggatgcccttgctcatcttggctgttgtcagggacagggaagagcagagaagttcagaaacgaaaaagggaaatgtaggttggttggttgtgagatgatgaattcttcagagaagtatattgatcttgatcatgccagacctttgtttgcctgagaatggtagtcgtctgcttcgatgaagctgcagcctaaggtttcagcaagcagtgctgctactgtcctgcgaattcacaatgaaatgctaaattcataagaaaatgtgataaattttgctgaggacaaaaaaaaaagaagtaaattcaagatttaaagctgaacagtactattacaaaatctgaatgtaggtttgaaagtcacatcctaaaaccaactcttcagcaaatgcagaggttttctccgaggaaaagacacagcaacatccatttgacatcacaatgttgaattgttgacaaaatgcatatcagtgtactgataatgtctctttctgcttgcttctacttaatgtgcctaaaattgaccaacttgaccataatattaagcatgaactgagctgaggacttgaggttggtctaaaacaacacaatcagtttgaatacttgacagggtaatcagaaagaaagaagtaataatcttacgatttaccgcagccactgactcccatgatcacgattgccaaacctgcaaccccagatgttgaacaaagatgaattagcagacacccaagctctgctgattacgattagtacttgtaatgataatcccattccaagcaattccttgaattaagctttaacacttcaaaaagaaaacatcaattcagaaatcaacacagcacctattctgtcagaccaaaatcacaggtatggtcgcaatacatgtttgggatccatcacttcagttcgcaagaacaagaacatggtgaacatgcacatgaataacaggaaatctgaaccaattcggtgcagcgaaattgcgagaagaaactaaacagatcaaaagagttaaaaacgaaacaagcacgcactgatcctggtcactgacctggtcggtgcgtgagatcggaggcagccatagatgagcttggtggttcgtctcgatctgttcctacgacaaggagtacgacaagagcgtactaaacctgcgaataaacgaggaagaagacgacagcggcggcggcaacaactctacttggcttgattgctcttcctttattttatatctcgagattgaagaacaaaatctatcattttttgggagaaatttatttagtctagtctagaaattttgacttgcatgaacactgcaatttggcatttttgacgtagtgagtactatggccatcctcataaaaataaggagaatttttcacgaatccaaacatagaaagacaagattgttttaggattggacggcgaagaaagagacttgaagcgaattgtcgtctgatgactaaaactaacaaagatgagacgtagacgaaagcgtcttcagttcaaagcaagaccacctgacgtttcaactttcagttcaccgtcactttagactgggacctggtgtttccaaagactcttttacagttcattcatgtccatgctgtcgcattgttgttgctgctgactcagagcttatcacacatccttatccaagaggaacatttgtagtatcaacagaaatcatctttcaaaggatattgttgttatacaggatcctcccaagaaaatgacaactttctatagagaaaaacaagttaggacgagagttggtgatgatggaaataccaacttctctcaagtcttggttgattggattcaagttgatgctttcatgttcctctagctcagcaaagaccttggtggtttctactgaacttgtttctggtctctgaatctttcagcattgcttctggtttctgaagcaaggaagaaaaaagctgttgctaccggtgagaacaaagatgttaagatgaactcaaaagatgggggcaaaaacagaatccgagatatacataatcacatacagtaccaaattcatctgatctagtaatgtagtcacgtaagaacatgcaaacagctaggtaactatggctactttctgaaaaaccctgaatcctgaagtgttttgcaatattctaagatgacaggagatttcttcaccatgtcccagatcttcgctgagctcctcaaccagtcacgctcggtgagattcttcgagaatgacctcgatggccttgataagatctgcacccacagtaatatccacaactaagtgaattgtgtccagagtaaacgtagtactctgaaaagaatcgtttattctgcctttacatcagaatcaggacaagagtcatcattgtgttcagggtcagttctgcaccatattatttttatttttccatataccatgatatgcatctatcgattaataaggatatgcagaactattccttttcgttacttgggaaaaaaagaatgcgaagtgctaattctgttaaaatatgaaagagctcaacctgctgagcgccaacaaccagttaggtaaagctgcaagcatacctgatcacgaagcatccctaacatggatggacatgtccgatactcaaaatttgttgagttatcaggtgttcttaatggaagaagatatatgtcctgctgattggagctcagatcctcaatcttcatgcttgaaggaactgaggagtcagaaacttgaggtgttgctccagagcttccaatgctaaaggaggaggacttgaagtgtttttcaagaaccctcttcagaaccatgagctttgaaggagaaaagtcttgttcccgcaatctgttcagttagaaaaccacaccattctaagattatcaaattaattggtataaaagattggattgtagaattaagtgcaaaagtgttgtgttcatatcacaacaactaacttcactgccaaaataccggaaacaacaaaaggatctctttgttcatcaaaaaagaaatgagcatatgataacataagaaaatgcaaacaagcatgaaactgagcagtgttcacctagcatgcacaaaacagagatcagctatgtaatcttcaatgcctgattggttatcatttttgttttccttgtcttgggtagttgaggaggtcaataatgatggatcaggtatgttgtgcttcagtaaatcaacctgcaaaaattgtattaaatcaccctttcaactttctgccattggcagaaactaaattcatcaacacagcataaccacaaattttcataagtacaatatactaatacggagtttcaggtctgagctctctaatacgctggaggatataaatgtgttcttaactattcactgtaagaaaatgtgatcaagtggtatggatgataaaaacaaaggcataaacaaatatagacagacaacttaccgtaagaatgaggtcccacatggacaggtcattaatcccctccgatacaaccaacaaaatattgcaaacagatgccaagaaaacaccaagctacagcaattccttgcagaacaacataaaacactgatcaactattcggtactgtcaagctcagttagcagtgggtacaacccagtgcgagaattgaagtatagcatttacctggattcccattaactcatgagccaggtctgctgataatggatcaccactgaggataggaattgcggatgaaccatctggcttcatcatatcaattagtacggagggactgaatactggctgcaagacaaaaggtgattgttttttagaacgttaccagcaatatgtttaacagctctggcatttggaacattgcatagcagaaactgagttaaataactcttatcacctgagtgtctagaagtataacccgttcattagagatcctgatatcaatgccagcagtacagtgcttagccattgctttgatttcctcagtttgtgtagcaaaaggaggaagcattcctacaggcaatactcaactaaatgagcttcggtttgatctaggtgtccacatggaacaaattgctagccaaattacaactcttcactacgctttttcagcaagccaaaagacacaaaagaggttaggggaaaattgatgtatggaagaaaaacagaagcttaaggacttaatagagtgcatattatcaacagcagagtgcatctacaaaataattctgacaagcgcatgttttgtttgacacatgaaagtaacaacaatgaattgaactgaaactattggaagactgaatgctgaaactattggaagaatggatgattgtaccaggtgagcttccatcatatccataaagctcgttcatgatggttgacttgcccacaccagttggaccaattactccaatcaccatgaaatcattgttctcagtcaaatactgaaaaatataggccccaaaagaaacatgaagatctcgatcaatcaccggtttgacatttcaagaactctagaagttatgttatacaaaaatactttcatcaaaatgtcacaaaatatctgaatgttttgagggatatatctacagatacttttaaataatcttgtcatcattcaaatccagtttcatgcacaaactgtaacttttgacgtgctagacaaaggtcgcattggcatatatcatattactgcaagatttaagctttatcatcagggatagtattagaatgcatctcaagagaacctaggaaaccatgaactaaactgtataagagctacgagcctacaactaacaactgcattgaacaatggattattgcattaaccagacacaaaaaaaaaaattgtcaactgaatctagttataggatctcacacaattttatcacaatgcttgcatcgaaccagtaagtaaaccctgaacagcaaaaggaaatgaaagaaacaagaagcatatcctcgtagcaaagccacttgaggacgcacgcaccgggaggatcttgtcggtgtggacctcccacgcgtcggagacgaggctgagcgagccaggctgcgtggcctgccgcgagcggcccgcgcctcctccgccgccgccgtcgtcgtcggcgccggaggacgaggggggcggaagcgggggcttggcgagaaggatcttgggagggggaggcggaggcgggtgcgaggaggaggaggacgagccccggtctccgacgccggcgagcggcggcgctccggcggccatcgcgcgcggcgtgctgctgctgctgtgggcgtctctagttgaggaggaagccgtcgcttaattaatcggaataagttcacttgaggtcccttaacttgtcagcgaaatccggttttgtgtgggcccaactgtcagacgcggtgctaggaggcccggcccaggtaagcgtactctttgggccatcctactgggccggatttttttttctatactcttctgtttataccgtggtagaccaagaaataaacagagaaatttttactacggtcatgaatatcccgtccgttcctccggagcattttatgttttgcaagtacttaaaattaatttttattcttttttaaagttattttattagttaaattttgaattttgattacgtggattctcctcctcagcagcccattggctgaaaacgcttgatttccatgtatgagaatcggtctcataggaatgtttattttgggtataaaatttgaatacttaaaaatgcttagtatttaacatttcgataaagattcactcggtctttcaaattttggtcataataatttctaaaatgctcttgtagcacagtaataacactgttaacagtagtagtgcaggttcagccatgttgctccacgtaggagtatgttggtgtagtagggtgctgggaccgagacagctcatcgttcccctacctctctgctgcattctggaaccctctctctctcttcctgtgacccacaacactccaaccagacaggcagaaagcaagcaaaaggataggaaggagccaagaacaccaagaacttgttggagctgagacagcagcaccaagcaagaaaccggatccaatccatccatccatccataggtaatgatcgtcccttattaccttccctacttctttgaaatcttactgtcttcaattgctcttttgcccgtgaagttgtagcagttcgcagtttgtctgtttcttggggagtgagtgtgtcgatccctaaaaagttcatctttttttgccccctttcccacgcaatttagatgaactggtcaaggagagcgcgatgatacagccactggttgtacaaatctgtcccgattcgttcttatgttcgtggtctgtgctgtactagcgctcgttttgttcaagcgattcagaaagtgacaaaactttggggcattctcttcggccaaatcttttgtttgcaccatgcggtagaatctatcctagcttgacgattctggagccctgaccacgaacttgtaagcgaacaacctagagggaaaaggaaataggtggttccgcattgttgaattttgagtgaaagagtgtacctgaggctccacaattcactgctgacagccgtgttcaatccccaacatgctaacaatttcttttttaaaaaaatgtttggagagacgtctctccctccaaatctcgttttttcttttaattcattgctgaaagataaactgaaatgctgctcacatggcccggcttctctgatgttcaaaatacaaaatgtgattctaagtgttctgaggtggatcccatattcagaaaagattaagatttgttaacgtgggttggtttgacatgcatattgcatttgcttcttactagggggttggattgtgtgagcttctcttgttttagccttttagcttaactcactacatgtggtgtcctcaagtaagcatcacagttggggttaacagtcagataactaaaccgttttgcagatgaattatttgctaaaccagtggttgtagagatgaacccgataaattcttttgtaactgaaaccggattgctactcatttgacaacagctttttgcaactgtaaagggcagccagaaacaataaacagagtgtgtgcagacttaaaaccatattccctccatttcacattataaaacgttttggtctctccatccctcgtctagattcactagcatccatatgaatttggacacatatatgaaacacatacatggattcatgcagaatctgtttaaaacccaaaaaacgtcttataatgtgaaacaaagcaagtggcttagatcaggtttgttgtcttgtgttcaattttttcaactgaataatagtacttggtagaaaatcttttaaaaaaacaatagtaccaggaaagatattatgaatgtaggcacggttttgctttgccttgtgcaaatgatagtctactaataattcttccacgtagaccatacctaacatggctattttttaccatgtaattccctttttgttgttacaagtaaagcattagagtgatgatatttcatcgttcgtgtccgtaatctatagaactcttcagtcttcccctgataactagtgtgtacttaattttgtagtttccaatggctggcaagtacatcgccgctggtcttgttggttcctttgccatctcatatgtttgtgatcattttatcgctgagaagaagatatttggaggtatggaatctgatcccaagtacccgtttgtaaattgacagcacgcttaacatacaccgttggcaaatctgtctgtataaagaatatgtgcaaaacaatcatcttacttcttgatcaggcaccacaccacataccgtgtccgacaaggaatggtggcaagcaactgacaagaagtttcaagcctggcctcgcactgctgggccaccggttgtcatgaaccccatcagtcgccagaacttcatcgtcaaggatctcgagtcctaaggtagcactaatcgcgcaatatgcgccgttgcacccctcaatcaaaacaagagcccatttgaagccacgtttcatctttcatttgaggtgctgatgctaaagctcctttgcttgttcagattgtagtgggagcatatatgctgaaggttgcgccgtgactaagatggcgatggctgtggctacaaactacctacctatgccgtactcccgaaccagtacgtgagtacttggtctcaataaaacagaactattttgcctagtgcagcctgaacagaacctgaagcatatctgctttagacattgtcatcttggtgattgttcttatgcagtaacaacctctactttgtgcttgtgctattgtgagtgaatggaactatctgtctgtcacactggaatatgtgccttgtctactgatgcaagagattttaggccacttgtgtcaactccagaatccaggtggcctctctaatctcagtgtaggtagcaacagacagcatctcgccgttttcgtgaggcttcttcagtgattctgaagcttatgtgttttcttgcacacaaaagtagatcagctagcagaaacgtgttgctagtttggtcaagatttatgtgcgaaacatttgacactgctgccagtatttgtcagatgaaaacgctgagatctcctctatcttgggagattttgcacgcctgatttaactctgggtcgttttcgttttcgcatcagcatttcatcaaatacccatctgggaattttcccgagctttgagctgctttagaacaaggttcagatgctgatcatcagcagttcaggatgtgatctgaagcacggacagaaattaagaaacgaagtcattggaaacgtgtcaaactgtgggcaatacacgtcactcaccctgcatcgtagtccgtacacgatgtttatgtacatactcccaggtagtcatacgtggtgcttgcaaaatcactgaaaaaaatcgtgactttccaggtggccgtctgaatcaacagatactagttgacgtacggaaaataataaaattgaaactggtacggaaacacgtccttgatataccactattatagccccatcatttggcctaaacagccaaataataagccaaaatttaaatttttaacttgattttgaacttgattttgaaatacttataacgtaatttttgttaaaattggcttttaagtcgctacggacaaatctacaaaaattttacttataaattaattttaattttttataagctaaataagccattttggctaaatggacaaccgatggaagctttatattctactagtacaaaattaagggtcactttcgtaggtggtacctttttcatttttgactgggagaaaagaggaacaaataaacaatactatgtgcctttcaaatataaacatttgagggcatgatagttacaaatgaacaaaaacacactaaataatactgctctatataagtatttatgtgatcaaaatttatagtacccatctcataatgtataatgttggttagttcaatgtcaacaagtagtagaggaagtactacacaataagaagttttaattttgagcaacggcgtcatacattaaaatatggaggtaatatattttatgaaaaactttatgtataaatgttggcttaaaatattagatgaatctattttttaagtttataataactaaaacttaattaatgacattatcattttacatgccatctccatcagattccatcgaccattgggaccaaaatattagaacgagtataatattctctctgtcctaaaaaaacttaacctatgatatgtcctctcctaggttaagtttttttggggcgaagggagtattatacttgttataatattttggtctcgatggtcgatggaatctggacaaatagtagttcagattccttatcttaggaggggtcataccccttcccaggttttttttttttgggggggtggggggacggaggagtatttgtcattagattctgtgattgtgataggatgatggcaagaagggggtggcaccatgcagcagcattccctagtcggtcggtccttctgccgcaccgaccattcgaccccccgtcgccactacaaatccaccacgctcccctcccgcgtgtcaccacgccattacttacttgatccttcttccccttcatcacagtctagtacttcttgcacctgcatcatctgcattggcagcagtaaactaagggtgcgttcgttctgagagattgggtgagaaatggatatcgtttttcacgctgcttcctaaactattaaacggtgtattttttataaaaatcttctatagaaaagttactttaaaaaatcatattaatttatttttaaagtttaaaatagttaatacttaattaatcatacgctaatgactcatcttattttacgtatcttcctaatcttttctatctccttctcctcgaacacaaccttggtagtaactagtactgatctgaggataagctccagccattctgaaactctctgctctgtctgtccgtgcatcttcttcctgcagctgacgacaccattgcaagctcggtaggagtagcagtagctctgttgttcggttgttctgctcaatggccgctcgagcactgtctgctgctgccgccgccgccggtcgccggatggccggacagactggcttccctcttcttgcctcctgcaggtaactggctataactgaaagaatgggagctctgtttcatgtatttctcctgttttttttttttttttgcttcttcattggattgtttctgctatggtttatcagtgtccagtacgtcagtttagtgtaggccgtgaatcgtgatgagctgatggcgacgccagtatcttgccttcgatcttctctttgtactatttttttttcctctttggtttgcaaccctcaatcgatgataaacatgccacctttttatgtggaactctgaatgaacgttcatttgggctgatgaactctgataaactctgatggagaaagaaatgagccaagcaagttcaagttcctttggagatgtttctctcttctgtttttttactgttcattttccagacagatcctgatccttctagctgttatttagttactgctccatctctaaatcatttgggctgtgtttatggtttagctgttgattgagctgtcatgttctttttagatggattgagagtgttgttgtcttgtagagtagatgccatattttgagagaaaaagaatgttcattttctgatgaaagtctgtgtgagcaggagaggagatcaagctcatcagaattactcgattagcgcacaggcccagccggaggaggagcagaaggccatccacgacggcggcggcgccgccggagcgcaggtggaggcggcgctgaaccgcaagaacgtggaggtgcacccggaggaggagacggtggaggacgcgtgggtgcccgaccacgagaccggcgtctttgtccccgccgacgaggccgccgtctccggcaccgaaaaccacgaccactgcggagcggcggcggcggcggccggcggctcgccgtcggtgcttgaccaggcggtgttcgtccgcgaggaggacatggaggacgtcgagaggccggccgtcgacatggccgctgccaatcacaagcccaaatgagcatcaactcagcagtagcagcaataaccaataaagccaaataatgccttctgaaatctcatgtacaactagtactagaaaatttccagtgaaaatcttgcgtcgttggttgtatgaatcttgttatctacagtgatcaatcggataatctgttctttgatgaatcttgttgtggttttatcggatggaatttgctgggattgctttgaattcgtgcacgacgccgtcgatctcgatgaggctgcagccggggaccttgtcgatctcgttcctcctcatctgccccctcaccttcaccgcctcaccgtgccggccattcgacgcgtacgtgttcgacatgagcacgtagtcgccggcgtccgcgtcggccacgcgccgtcgcatcacccgctcggcgcgctcgacgtcgccgtgcgcgcggcatgcggcgagcagcgagctccagatgagcgcgtcggagtgtactggcattgccgcgatgagctcctctgccttgtctagtctcccggcgcggccgagcatgtcgacgacgcagccgtagtgctcgatgcgaggttccggcatggcgttgagttgctggagcccctcctcgacaagtccggcgtgacagcacgccgtgaggacgccgaggagggtcacctcgttcggcgtcacgccggctcgttgcatgccggcgaatagagacagggcgtcctcgccgcggccgtgcattgcgagccccaggatcatggatgtgtaggtgtacacgtctcgccgcgccatgccgtcgaacacctccgtggcctggtcgaccgcgccgcacttggcgtacatgtcaagcagcgcgttgccgacgacgccgtcggcgctgtgccccatcctccccatgtatgcgtgcaaccacctgccggtgtccagcgcgccgagctgcgcgcacgcgccgagggcggcgacgaacgtcgcgtcgtccgggcgcaccgccgcggcctgcatctcctggaacagcgcgagcgcctcctcgagctcaccggcgcgcgcgaacgcggacatcatcgtgttccaggagacgacgttcttcttcacgggcatcctcctgaaccaccggtgcgccgccgccgcgtcgccgcacttggcgtacatgtcaaccagcgcgttccacgcgacgacatccatagcaaccttcctctccgcgacgcgccggtgcgcctcccgacccagcgcgaggtccccgatctgcgcgcacgccgagaacgccgcggcggcggcgacggcgtcgatggccacgcagcggtcatccgccatggcgaagaacagcaccacggcctcgtccaagaacccgtgcctcgcgtggccggtcaccatggccgtgcaagagacgacgtcccggccggcggggaacccgtcgacgagcgcccgcgcggaggcgagctcgccgcgagcgaggtagagctcgacgagcccgtcacggacggcgcggcggcggtcgaggccgagcttggccgcgtgggcgtgcacggccggcgcggcctcgccgtgctccgcggccaaggccttgatgagagcccggaggcctcgggcgtcgtgaggggcgccggaatccacggagacggtgccgttcttgtagccgccatgggagcgatgaggcggtggcctcctcggcttgctgctgctcgccggaggaagctgctgctgcggcggcgacggcggcggtaatggataaggcgccatggccggtgcccggtgatgaggtgagaatgagtttgggtgggtcaaaaagtcaaaacataagtactgacaggtggggacggatacaggttgggacttatgtgccgcataagaaactaaggcccataaaccaaccggcccaatacatatgggcctcacgtgagaagaaatccatgagctacgagccgactaacatgggtcggactcaggacttcatcaagattcagatgaacaacatcgcgtttgatttcatcttgattttcagataaacagcgtcatgctgaatttttaccttcatcatccatctgatcctggaaagcctcagggccatcgaaatcatcttcatgtatccaggaatacaaaagcatgtgcctctggacatgcatattttcagcaagctggaagagctgaaagcctgaaaatgctttttccctttggaagaaccaagctgtaaatgcatcgatcacatccaaaaaaacatcgttgcacacatctcatgcataataaacatgttggaaggaaaatcaaattgaacgcacaagtaatactgcatttaacacggaacaggatgcaataccatttttccccttcacaacaaggtaaatattatttcttgtagagagataaaacaaggttcagacattcagagtaacaggcacaacagtttgcctccagaaaactaacccaaataacaaaacaaccattactattatttctaacagacgataattaaaacgaacatggcagttcaccaaaaacataaacatcctgcaagccatcccttgcagcctgttcagaattcagatgccatcatagatatagtagcttgagttgcaaaagcccttctgctctgcagcacttgaggagagaatttcagcagaagataaacccaaacaaagcttccttgtagcagctaatgatcgcaagagagtagcatcctgggcttcacccagttgggcagcaaccctctgcgattgccttgatttggcgccaaggatgacacacagtatgaatcatagccgatccctccccatctctgtgggttcttgcaagacaatggtggccgtggcctgaaagcctccctcttctcatcgaagaagaaggcccattccttcaactcttcctcttccatcttcacccacattgcaggctgggatgacaggtcaaggcagaaggcctcgccgatggaggcggcgagcaggatgagcatgtcatcacacaccaccagcgatggctcgcagaggtcaggctccgacatctcgacgctccagacaacttgtacttcttccaggctgagctggggttccagcttgacggtgtaaagctgctgatactcgagggcatagagctggcctttgaagggcacaaactgctcaagagctttagaattgggcgggcaactgcactgcgaccaatggtcgcttccaactcgccatgcgaacagggagtgcttggcctcgacaaggaaatgcgagttgtgataatcaaggggagctgtgagggcacaagagttgacaaaagtaaagaatgggcagggtggaggtgaaacactagtgccggtgaacacgtcgacgatggcgaaggttgtgtccttcagcgagggggcattgccagagaagatggcatggccataagaacagcattcataatccatccccgccagaaaatctggcggagtcacgcggtgtatgcagatggttggcttggctggatcaaagagctcccatactactggatcatcgccagaggaagcgcagctgcggatggcaagaggacggaagagggtggtgcgtaaggtagattttgcagacctgaaggcagcatgccaattggggcaggtggcaatgaaggcagcaaggtcactgggtgaactcaacagagcaaggacacactgcagtaggtcatctgggaggtctgcccatccttggagcactggcatggagttgggggtgttggagatcctcttgcaggtgttttccatgatagcaggctctgcaagtcaataatgaagtcaatgggagcaatcagaacaaagaagttctggttaaaggacaagcaacatagtccactaattcactacgtcatgtgggcgcatgaaaaaatgagtattagaaatcctagccactaagtgacaaataagaagtggagtacagtggtgctacaatattttgcaatgttatgaatgcagtatgtagttacaagactcgacaattgaattcattcacatttcaaataacattgaagaaaacggatagttaatgctttatttcattctataatatgcatgaatttagtatcgacacattgcatgtgtgtcatgttggtagcaatacatccttgacttttttatatcgtttataacttaaaatattacacacaacatataagtaataaaaacctgtatcgttataaaataactcgtgttttagccatcaacatacatactaagaaagtatggggtacccccttctaccttgcttgatcctcaaccacaataactggtcctttctttgttccaatcataccaaatatcatggtaaaaaaaaaacatatttgataggatgttagtatttactatgagaacctaaaacattgacaatttgtgatacaaaatagcctaatccaaagatcacacttttggtggagacgtattaagtattaactgctgaaaaacataactctataagtatcttcagtatttctaaaaaaaatcttcaataccaagacatcagtggaagttctcttatttgggatttgattaatagaaaattaatgaacaaaaattgcgtacatattattttgttgataatcaaatattgtctcaccaccacccgagtcagtatagattttgaagacttatgatgtactcatagtccttaagaattcccctatcctccaagatttgaacgtacatcttagaggagttagcagactaataaatagaaacaacgagacaacacaaaatgggtggacaaagtacgtggaagaagaagtttaccgatgaatgaagataacaacgatagtgagggcaacaaagaagccccaaaatggttgccgtcgatgttaatgaggacgtatcgagggtctgcaatggttacgactagcgagtagggaagacgaagcggcggcggaactagctaatgattagggtttggggggaacgaggcaaggggattcaatgggttttatatggtatgacatgttaagagataagatgcatatgtccctcctcggaaccagttcacatacacacacacctcctggtaccagtacacacatagacccttttcattattaatttggtagtaaaccctaggctttgctattccggaaatttctttggtaccagttcacacatagacccttttcattattagtttagtagtataccctaggatttgctattccggaaatttccttggtaccagttcacacatagacctttatcattattagtttggcagtgaaccctaggatttgctattctggaaatttccttggaaccagttcacacatagacccttttcattcgaaatttcgttttatctgtgggtaccggtagggagttcttccgatcgaaattttcaattcattcgaaatttcgttttatccgtgggtaccaatagggagttcttccgataaaaattttcaatatgatttgaatttagaaaaaaaaaatagccgtgtcagagtatagaactcctgtaatggggaagctaagtactccccctttgtgagttcggccgaggtgcaagttttgagatcgagtgtttgatcgcacggtaaagataaacacaagcacatatacaggtttaggccgcggtggactatggatgattggaggaattataaggtgacgtaggaggagaaactcaactccttgcttgctgaattctcggtggcatgaattctacttatatacatgaaggagagtccacaataccgttgcatgcatggagtggagcctactcctctaaacttgatatgcttagtcttgtaggtcttgacactcttcttaaaaccttgaagatgtagatattgtagatctcgataatcttcttgaaaccttgaatatgtagatcttgtaggtctcaaactctcaatactcttcttgaaaccttgaagatgtagatcttgtacatctctatactcttcttgaaaccttaagtgcttggtggggctcgcagtgccccaagcccccctacaccttgagctctccagggtaaagggaacccctgctcccacttctccgacaagcagaattcctaaaattttgccaacaccgcccctccccctaggtttatgctttttgaaatagtgaaccctagtacaccttgttaatgcttttttttttgtcacatcaccaacacaattggagatccacctaaagccttgtggtgtgataggagtcaccaaccaccttgaccttgagaatctccttgatatccccaacgagctgctcagcgaccttaaacttgtgctcaaatattcttccattccgctcttttcaaatgagccaacaaaccatcaggaagaaagaatcaaaagcgttcctatagcttggccgaaaaaagcttcgcgcttgctgcgaacactctgctagctgcaaaccgctgtggcccagtgggtcaaaagccgcattaggacaatggtattatttgtcatgcacagcagatcttgcaaataacgtcaggtttagtttagtttcaaggatttctgaaccagcacagttacaacaattggtttctactctgtatccgctaaaaacttatgggcagctgcttccaagcgtaaatgggggaaaaaacttttcgtgtgtcttgcaattcagagattgaatgttcaacatctgaaaatctaagcaaagagtggtcgatttggtcaagttctggtggctacaaaacaaccagatgtgtgtcatcaaacaagaaaggtgcagaagaacatctcaaaatgttaatcatatgttcctaaggacataagaaatctgcttttgataggtgcaacagctttttgttggtccatttggctaaacagaaacggggtaatttttgacaacaagatggtgacttctcctttgcaggttattgctttagtcacccagtggctatgcatctggtctatcctccacaaaccaggtctttaggatactattgtggtggtatcacgtcgtttggatcaagtggcacgggagttttttttaccctggagcatgggtggtgatctagtctacggcttgatagtcactaatttctttgttttgtgttgagggtctagttagatcatgttttgtagctgtgtgcatttcatgcagaggccgggagtgagctcagttagaatgtatcatcttggtgtatttgactgagttttaataaagcttccattatcgaaaaagaagaatatctcgaaattaagatgatcatgcattccacatagaaggcgatggtcgaaaaatcaatggaatagttcagagaaatcaccttttgctcaaccacatatcctgattgcaggtgcattcccttcgtccatgtgagcaattgagcatatatcgacacgacatggccgttttctgtcgaaataatgatctgagagcaatctagtagtgagaaacataaagcacgcaaccgatgaacgcactgatcttcagcaaagtgtatagttgaagagcttttcacaactgattcacaaacatactgaaatcaactcaactggatatattgcagaacagtatatgttgagttgggataatacctcccctcattgaagaagaagaagaaggtgcatttctccagtttgggattccttctacaccttcactcgcgttgcaggttcagctgataaagaacggcggaaggatcccgcgagattcttcgacgaggacccggccacactgccgaggaagaaagatcttgcgccatggctgacgcatccaagaaccagtggtgcctgactgcctggaatggccggtggtcaccatcccatcccataatgcccctgtgctcaacaaacagcgcactcgcggcggagcgcctcggcggctcggcgccctcaggatgccgtagtggacggacggccgcggtggccggcgaggcggcggagctttggctgtggggttgagaagcggcgggtggacaggtgggggccagaggcagggcggttgacctagtgcgagggattcggaaacgaaggtggtacaagcggacggaggtgccccatggcgtccctgaggctgagggtggtggccgtcgccggccaggacgccgtcgccggtgaacgcggaagcccggaatctcggcccggtccaagccaaaaaaatatatgggccgtacgtacgccggagtcacataaatgggccgcacgtaggcggcactagaggtgaaaactgttggaattgttagcatatcttcagaaatgatgctagatcgatcgataattaaccatatttactatttaaattactcagtattgatatttatatgatgaaaaataaattagaaaaaacaaaaattataaataataaaaaacagcacggtcggaaacagtgttaagtcgaacgggaattttcatgaccgttttcaccccgcaccactcttccgtccgcgctgctgtctccatttcccaactccgcgcgctggttgttcacaattgctaactatttatttatgaaagacataccggaaattctcgatagatcgagcgtcatttctgtataagcggtgagacgtcatggtactgtttttcgattccattcatgtataaaatttgaattttctatttatttttaagcatcatatttttatgcacgctaaatattggtaaatgtggttaatttcatatcaaccaagaatctctttttttaaaaaagatgctcaacatgaatcttttttctaccgatctggaccattctgctagccgatgtacaagtaggttgctgatgcgacgacggcatggatgcagcatcacatcacaaagcttgagacgaatcatggtgcaaaatcccactcagcaaattaatggaatagttctcttacattggatgtgaggatcctctcaaattccccacaggcactgatttttctcaattatacttctgaacaagcacaaaaaattggaattgggttgcagctagcgatcatcgattcttgagaaactaatctcaagacgtgaaagaatcaagttgctagaagcggacggaggtgccccacgtctggacgtcgcggagggtggaggccagccagtcgaggccgccgtggaggccgtcgccggtgagcgctgaggctccctgacagtgccacctccggttcttgagctcctcgtacgcccccagccgctggcacacctccgacgagctcatcgcccctttctgcatcatgcatccacatgtcaattgttgtataactaatcgccattggcaaattgttcattgattcgtcaagcttttagcaattaccaggtcctgcttgttggcgaggaggaggatgacgctgttgagcatgagggggtcgcggatgatggcctggaactcctccttggctactcctatcctttccctgtccatcgaatcaaccacgtagatctgcaactccccacacattcagtttcagacattcagatttcagaagcaaagcaatgatcgatcgagagagagattcagaagatgagatttaaccagggcgtcggcgtttctgaagtattgtctccagagaggtcggagcttgtcctggcctcccacgtcccacaccgtgaaggccacgttcttgtactccaccttctccacgttgaaccctgatggaattcgttcatttcacaggatgaaagaatgtatgtctgtcaatgcaggtccaggaatggattatgtcatgcccatttcggcgatgaaataaatgacaatgaacacgatgtatcactaccgattgtgggtatggaggacagaacttcgccaatgtgcagcctgtacagaatcgtcgtcttcccagcagcatccagcccaagcatcagaacctgattaagcatccatcagaagagaaaaaaattctgaacctggttaagcatcagaaaggatgaaaaactgagaatggtgaacgatttcagaatgctgacatgatgttaccttcatctcctttgtgcagaagctgtcgaacagcttcctcagggactgccccatgcctgaatatgatatatgattatgatctatctaccattagttctttcctcttgattaatctctgcttcttcttcttcttcttcttctgattcaggctgccttttattgctttgagaataggaggtagttctcatcgtgcaaatcagcagatgacaccccattactccgattgtttttgcaatgcgcgcgttgccgtttgacttgcacctaccgacgaactgaataataataataatacttgctttgtgttgctgggatgctggtcgatctggagatgatggaaccaccagacagccacaaccgacagtgtttaatctaatttatttattgccggattctacaacattacaacgtaccctgtttcaactagacatagtaaacttttgtttggatctaagcatggtgattgatcatacctcttagtgaaaccttggaataaattacactccatgccggtcgaactattagtatttttaccttcatcctgtacaaaaatgcaatttactcttcgtaatcatctgtttatgaagtataaactacactgtgaataaatgattaacggttaatttaaaattgatatattacataatcaagcaaggtcgttgtagtatagtggtgagtattcccgcctgtcacgcgggtgacccgggttcgatccccggcaacggcgattttactcctttttttaatttgggccatattagattggagcccatatcgatcagcccacgggccgaaccgctatatggcgcccatgttgcccatattagattggggcccatactcctatcggcccacggcccgaagagccttatagcgcccacgacaaagcgttgggtcgtcgcttgctgcttctagacagttctacaacggtcgaggctgctccgtgctctcctccgctctgctttcattctactccccggaaaaatgtcctattcactttggtgcccctgagtccgagatgcttgctgattctccctctttttgtttccacagtttggctttattttgttgcttttgtgttgttatgaaaaggatctactatacttctttttctttccacagtttggctttactttcctgcacattgagtaggattaaaagaagagctagtaatgatgcaatacatgtttatgtacattatcacattgggtttattcaaaagagctaactgctgcagcgctgcagcaatagctatagtggctatattagtcagccagcaatgggctacaaccaacacaaaccatatgcatatgtaaaagtattgtatttaattttattcaaaatgcagcctagcctaaatcgctgccactgaacggttggatgtgcaacacagtctagacaactgctattaagagctaccgaacaatcattaaggccctgttcggctgcacatgcttcaactgtggtacagccaattcgaatagtactatgtgtctgtagctgcagcagcaagggctgcattgtagtgcagccgagcagaacctaagtgattttgtacctatatacttttataacttttgctctatagtttttcatcgagagtataaaaccttaatagtagttccatgtacggtattgaccaagtttaaagatctagtagaagaattcttaatttaaccatactatgaaatgaaaaccaaccactgggtgtacatgttacataattgaagcttcatactacgagattttgtacttctacacctttacggtttaatacgttctatagtttttcgttgaaaaatatttaaactttattagttttgtgtacgtatgacagagttttaagatcttatagaataactcttgttttaaataaaccccaaaccaaacgttgagtgcacatgttacatatatagtcaaaaacaaaaacaataaattgaatacgatttacaagtaaacatagtgtatagaaagttactagctcagctgtgtgttgctgcggctgcaaagcaatgacaactacggtatcaacatgagcaccaccaatgctaggtaatgcagctgttgcgtttgtgtaaaagtagctagcagaacctagccatgtcgtgggagcttttggcaaccgtactgctatagcttctttcaaagtatcaaatttcttgtacggtctaaattatcacctgaactttaataattcatatttttagattttataaaataaactacaagacaaaagataggaaaaacaaactttcgaaattctcatcgtatgcttctcggaatttgagctgctacaaacattccattttttgcctataatcgattatcatttcagacttggaaaggtattataacggcccatcgtctctcctgcttatttaacaaccattatttttaaatcttatatacatatatgtgtttgtgtgttttttagcaactttattaacttttatgtttttttaattcaaatttaaattatggttaacacgctaaaaagaaaatgatgaacttgtattgtgtatcactttatttgtttcaaattatgaggtgtttgttcaaatttatatgggtgtgaataaatctagacgagagataaataaaccaaaatatcttataatttagaacgaaggaagtagttcacaatcaattctcccaataagaaaagaagtcaatactcatgttttgcatgcacgagagactgacaacatgatcacacttagactatgtttaatttctaatataatgcacacttcttaaacggtttaacggtgcatatttttgtaattttttaaatgcaaataaacccttattcagggggtcagacagaaaggtagcaagcgcttttgcaaaaccctggcgtgtatttaagacctcatcccttcccctcccccttcccccaaacccctcctcacccgcagcgccccaacccaaccctccccgaggtcgcagccttatcctctcctctcccctccgcgaggtcaggtgagctcaaaccctatcccctcctcctccacctccgccgctcctccccgccccggggcgctgggttctccctcttccggtggcgacgtggtggggtgtggtgtgttgacccccgcacgattcggttgccgcgtggttggaggattcggtggatagttctcgccgcgcgattcgtggggggcggagagctcgaggtcgcgccccccgcttggttttgaggggggccttttgatggttgctcgtgcgggctaattttgcgctagaactgttatatcagtggaaattgttggtttagttagcacggggactacagaatgtatcagtggaaattgttggtttagttagcacggggactacagaatgttgttggctccagcgttctgttcgtctggttgtgacttttggcatggggtgttctaattcagccaagtagagtggagtaggagggtgcatgcgatattctgtttggcagttggaatgctagtgttttcatgtatgctagtgatggccagccatttgaagctgacgtaactgttagggtggttgaatggcaaacatttaaatttgaaggtgtagtttcaagtgctagaatgtattggttggccattcatgatattcgagaaggaatcctggcagcagagatgctttagttggtctctttttcgttcagttttagctatctcatacatatgcaggttatcaactcactgtaatataccctgaagtccagttgttaattaatcttctaccttgacactgtaagagatgtagtcaatgataatatgtggtaatatgcagagagagcacaaaactatgtttagcttggaaaatacatttgcacagaatgcacaacaattttaagctcttagctttggttggcaatacatgaactttcatgtgggacctccacctcagcttccattttctgaatagaagcttaagcatgcttatgattgttgctccatgttaatgttgtcattgctgaacaggaaatcatggcttcaacattcggtgccacttctacggttggcctcatggctgcgccaaccggaattgtatcagacaagaagccatcttctctatcttcggtgtcatctgtttctgttgccagccgaccacgcaatgcacgccttcagaggaagtgcaacttcagggtaaaagctgccaaggagttgtacttcaacaaggatggctcggctatcaagaagcttcaggtgagctccaaagttcttggacacatcttatcaaattttggtcactatgattcttagccttgaccaggcactcattagttatttctacatgtcagactggagtaaacaagcttgctgaccttgttggagttacactgggaccaaagggaaggaatgttgttttggagagcaagtatgggtcccctaggattgtcaatgatggtgttacagttgcaagagaggtatattacagtgtttattgcgtcaaatagcattgaatttccttacaatttgcttgtttgctgtatgctatacttccacagaaaaaaaatgtttgttttgaaaagtaaaacagtctgcacatttgctcacaagtttcatgcgcaagtgtatttctgtttactattgctggttgcatttttgcacaccatgttctatcataattacctttgtgggttctaatatatgatcctctgacaagatgaactaaagtttgatagctggtcattgacttaactatagtgattgtgcaccatttgttttagtcatgatataaagaatttttcaattttattttcttattgaacaagtcaactggaggtttctggattatctgtgtaacctagttccagaatttgagcagaattttcaagtaacgatctctgtactgcaggttgaactggaggatcctgttgaaaatattggagctaagttggttaggcaagcagcagcaaagaccaatgatttagctggagatggcacaactacttctgttgtgcttgctcaggggctgattgctgagggtgttaaggtatgctattagttgagacatgagacctctattacttgtatggtcaatctgttaagagtcgttaatttgtgaactaagtgaaaataattcatttgctctttttcaggtcgttgcagctggtgccaatcctgtgcaaattacacgtggtatcgagaaaactgcgaaagcactagttgaagagctaaagaaattgtcaaaggaggtaaaataatcgtcaggctctaatgctttcagaatgttttagttgtggttgtggcaacctggtgtttgttgcaacaatgcttagctagactgagtcaaatcagatgatttatctatgtagtatatgcttttttttgttctacttataaaaaacattttcttgctttaggttgaagacagtgagcttgcggatgttgctgcagtcagtgctggcaacaattatgaaatcggtaatatgatagcagaggctatgagcaaggttggcaggaagggtgtggttacccttgaagaagggagaagttctgagaataatctctatgttgtggagggaatgcagtttgaacgtggttatatctccccgtattttgtaactgacagcgagaaaatgtctgcagaatatgagaactgcaaggtagcttcagcctgagcacacatacccctgctgtatgctgctttaatctgtttcagtttcttattgcactatgtttccactatttttcagcttcttttggtggacaaaaaaatcaccaacgcaagggatcttatcaatgttttggaggaggccataagaggtgcatacccaattctgataattgctgaggatattgagcaggaggctcttgctactcttgttgtcaacaagcttagagggtcattgaaaattgccgctatcaaagcccctggttttggtgagcgcaagacccagtacttggatgatattgccattctaactggaggtgaggtggacttgcgatctggtgcatttggttgggtgatcattaatgctgcttatttatgatgattctggagcatctggctggatgattaatgctgcttatttataatattttttttctctgcagcaactgtaatcagggatgaagttgggctgtcacttgacaaggcagacaaatcagttttaggaacggctgcaaaggtggtccttaacaaagagtcaacaacaattgttggtgatggcagtacacaggaagaagtgactaagagggttgcacaaataaaaaatctcatcgaggtatgttatatctgtttaccatggttaatttggcacaatagtgcctcgcaaatttttttttttggcacaatagtggttctatattccaccatttctttaatctagttatagactgtacatatctggaaatgtagcttgattggttacatgcttcatctggtttcaaactgaaagctttctctattatgaggctgtatattgaatgtgttgtttgtacaagaaaagaaaagcatcagtcctgctcctgattgcttttttatctatccaatttgcaggctgccgaacaagaatacgagaaggaaaagctcaatgagaggattgcaaagcttgctggtggtgttgcagtcattcaggtataataagaaatggacaaaatgccatgttatctgtatctgttctttttcttggttctttgtttggaaagatagatagatgtggttatgtgggtcgtaatccaagttttgttacttttgataggtgggagcacaaacagagaccgaactaaaagagaagaagttgagagttgaggatgccctaaatgctaccaaggttagtctgttgttataactgctttgagatagaaatagattaatgtttgcttcttaaggaagaaaaattaaggtagtttgttgctcactgagttgatatcaacgttcttctggctttggatctttaaaccgcttcctctttgtcaggctgctgttgaggaaggtattgttgttggtggagggtgcactcttctgagactggcagctagagttgacgccatcaaggacaacctggagaatgatgagcagaaggtttacaaccatgatctactttattcattgtttttgttcgagtgttctataaacctcatctctcaaaagttctgtttttgtgcctgctactatgtatatgggttagaaatgaccatctcgaatttgttgtcctttctaattgacttgttgtatgtattgcttgaactttttaggttggagctgaaattgtaaggagagcgctgagctacccgcttaaattgattgctaagaatgctggtgttaatggaagcgttgttaccgagaaggttagatcttgttcactaacagaaaatcatatgttcacatgtacatctgaataacataaaagatgatgttttaccaggttctctctaacgataacttcaagtttggttacaatgctgcaactggacagtacgaggatttgatggctgctggtatcattgaccccactaaggtctgttgctccccattgatttccgatatttttgcataaaaatttagattggtggattccctatattttagctgaaataattatagcagtgtggactgtgcagttacttttgtgttcacccttcagttcttacacatacagccattgttttgtgttgatgttagtagtttctaatgaaggttctagatccaaggcttagtgttgtggtcctagaaagattgaattggatgcaccatacaatttgctaggtttgatttagttactgcaagagagtgaaattaactttgggaaacgctaaaggaaaagcatgaacacaagtaaaagaacatagaattagactgtagcccttgcacatggttgacacactacgattgttgattcccttttccctaccatgcttcatgagaactgcgatgagctaaagactatgctttcctgatgatgggcaacaggtggtgagatgttgtcttgagcatgctgcgtcggtggccaagacattcctcacatcggatgtcgtcgtcgtcgagatcaaggagcctgagcctgcgcccgtcaccaacccgatggacaactccggtaaatgatattggccaaacgcactacacttcaatttcatgtgatcaaacactccctgaactgttgctaactttaaatctgctccgtctctttctgtccaggctacgggtactgatgactaagttacagttacttgttctccgggaaggtcactggccgtcaatttttgggtagtaggcttgaatctgaattttggtgagatttgagtagtttcgagacaatttgatttgttcccatgggaagtgaaataaacagggtcactatagcaaaatttgtggtgtaactggaacggctgtcaaattacgaaggaagatatttgaaagatttcatgctctctggggtttaccgttgacattcatccatttctggcgtaatttcctacagcattttcttggcaggcaggcaaagcagcgcagcatgggcttgcacgtcttcaactcttcatgctttgtctggtgactcgtgtgcatcagtaagaatttcatgcgagtatacgtttgtgatgacagcaatatccgatgaactcctgtattattacacggaccgatgactgataaagatgccgccggcgacctttcaccgctagtgtagggcctttttctttcaccgccggcgacctttcatcggacgtcgccggagcgagagaaggtatcgttaagagaaaaaaaatcggatgagtattctatcaaatgccatataccaaatccgttttctctaatgctgtaagaacacacgcaaattaattttagttcagtagaaaaactattgcgctccatcagttctcgtcgagagagaggttaaaaggcagtcactgaacatggggcccacatgtcagttagaacccaagaggagagctcgtcgatcgattcccccgcgaaacagaaatctcgctctcgccgccgccgccgccccgcgtctcctcctcctcctccctggccggcggcgtgaatttgaactactccgtccggccagcctccgccgctccatgccatattcatcccctcctccttaaatcctagcaccctgacacctccagtcgccttccctagccctatcaacccttgtgtttgtgaatggttggatggattccatctcggtgaatgatctcgcgggatttttttttgggcacaattgcgatccgatccgggtatcccaccgatcgaccgaagccgggagggcacgggcgatcaactggttggtttattccgcgacctccacttcattccattccacttaattcctgtacggaattgcttcgttttactcagtctggccgatcctaagcatctttcagtttgttgatcttgatttgtctatgtctactctatttcgggttatataagctgcagtttacctcccaggatttttaactgcggcttatgctttctagcaccctccgctgttagcatttggatgtgtatgtcgtacgtgtagccagtacctacaattaatttctgaggagatggattttggtgctatttttctagttaagagatggattttggtgctatttttctagttaagccgtcactagtaggttgtccttgcttcctgaaaagcaccggtagattgtttgatacttctgatgacttctcctggtcagtgtctctgaacattgtacatggtagtcatacgtctgaactttttgacacagcacatgtatttgctacttggttttgtttgtttcattctccattgcgttatctgctgtctattgcatctcctgcataatctcacttaatatattactctactgtatctcctctgtagtcaacagtataggctatagctgtattaacatggtctgtctatcttacgtaagtgatatgtcgtgttaaacatttgttcttggcggtgacagaacatcgtctttgacacttcattgtgatcccaattagagactaaaggaatgctttccaatgcaaaaggttgagcttacgaacgatcttgtttttgccactaaggagattcagctatgcttgcctacaagatgatttctgacggcgttgatatacaaggcattacatcaaatactattctgtttacaaaataaaatgaaattgattttcagtaggcggatactgctggagttaattcagtagactacttgtgatatcaccaaactgcagaagcactagtcactaaacacagatagatgtccgatcatgtagattcttatttatggtaaaccaataaatctgtacctctagttaaaggtatatttttatgccaatcgtctaacttttgctgcccaagtactcccttaattccgtgaggcaaatgtgactacttccggcatacttgatgccagcctggttttaggtctagtatgaggcttacactatgtgctgcatcagcacttaatttaagtcgatctgttccagatggctttatgcctcttctgttatcctgtgaacttatgaatgattctgttatcctgctctagtactcgtatctactttgtagaaacaaaaaattgtattcagtttatcggaatctggtggtgttgcaggtccgaaacaatgtgcttgctgatgtcacaatgtatataggattggcaacatgatcagaggctatgagcatggttatgtgctgaaaataacctctgttggtgatggtaggcagtttgattgggttattctccatagtttgtaatagttagtgaaaaatagatcagttgagcatgaaaactacgatattatcgtctaactggtattatcttccaattgcttagtcgcagatatcagtattctggaaaatggcataaaatgtgggcatccagttctgttaattgctggtaatattgatcaggacactgtttcaatccagtccttgtggccaataagattggaagtgtatcggagtatggagactgcaagaaaacctggatgatatcactttccaattggaggtgatatgagcttcaacatctatatactgtttttttctttcaagaatacaactctatgtaatgtgaatagtcaagtggagatacactctaacccccccccccccctacactctttcagtcagattctgtatctatatttctcaatttctgatcttcctgcttgcacttattactacgattggcatgcaggctgaaagtgagctcaaaggagaagaaattttgggtggaagatgctttgaatgcaatggaagtgttatggttggtacccactatagtccatatcagaaggtgaatgttctttttagatcttcaatccatcactcgtggtgcatgtattgttcatcagccgtcaaattccctgtgtcagcatttagcagtgtcagttcatatacttctggcacttttatgaactgcattattgtcttagttgcactactttcttttgtaatccactgctaattcagttagttgtttgctttcttgctaggatgcagtggagaaagctattgctgttgctggtgtctatactcttttgaggctggcatctaaagttgacttcatcatagaatctcgagaatgattagcagaaggtgggtgaatgaagctatcatttttgcgacacatcgaaagtgattatttatgggttcatcttattttctttggtggagattattttcatggtggcatattgtagaacctttttggtcaattaacaacagatcgtatcgcccttcctgtaggttgaggttgaaattgtaaggaaggccttcagtataatccctgaaaaggtttgaagtttgaacaccattttagttactccaagcattattaatgcatgattcaatattatgcggctgcgtactactgaaaataatactattagatctctacagtcaggttcttgctaatgacaacttaatgctgctactggcaagtacgaggacttaatggttgctgggactattgaccccactaagagcaagttttatagtatagtccattgctagctctaattcatatatagtcaatttaatagccaattcatataatatttgtttactatactattaatatctggtcccacctaccatacgcacattacgttttggagtccgtgctgtagctggctacaaatctatagtctgctgcttttctctatcttcttttatctttttaaaatatgtttacagctagtttatagccttctattgtacctgctctaaggcatgccattatttgatgaattctagttcctggttactgtatggatcttatcatttcatttaagccatgctcaaatactcacaataatttttgttaactatttttctcctttttcttttattagtcattttatttttcattctgatgagctcattactcattagccccgtagtagtgttttcttggtcagtttaagatgtttgatagtacgaaacattaacctttcacttacatatccataccctaaatctttttacttattatttgtgcttagagagttacttttgcaaaaggaacataataggcggtgagttgaggtgtcgcttggagcattctgcattggtggcaaattaagacattcctggcttgagagttgagacgtggttgtcgacgccatagagagcgagaacgtacacctggtcttctgcaacctgcaaaccaatggcagctagctctggtaatctctgcacctgatcccatgcacgcctttgactgtgctatcttgcaaatctagcatagggataccacgttgcagaatatggattctgattgagcaacggcacttggcttttctgtgaaactgtggcaactaaatcttttgcttacatacagataggacggctgcacttagcaacactacacccgtagctaagtgaagtgatttcatgaatgggtgtagcgttttctttaaccttcagtaaaagaatacttgatgccaaataggagtagttttcaacttaacatagggatagaaagtaaagtaaaatgggggtgaggggttcattggatactcaagagaagtctgtgattatgtaaggcccggaattttaaacaggtgcgtgcgcatttggcttgtcacacacacataggatgcccccctctgcttggctgcgtgttcgcttgtttctgcgtgcgcctgcacagctgcaaattttcaccagtgccagcagttgggaggtagcagtagcagtggtaaactagcaaaggcaaattcacagtggggggcctggctatccatccatctccttgaccttttttacctggagcatggaaggaaattccaaaaaccctcttgagctctttcgtgcttagacaaaaagaaaataccgtttgctccaagtccaaaccattgtacttttactgtaaggcaacccaagcacacatatagatactgctacattatgtctgcgtatgcatatagtgaccgttgttttgggtctttgtggttggtaaccactccttgcactgacagtatgactctacttattagacctgtgctgccgtgcattagatgtagtagtagtataacgttactgctagtagtattttgtttgtgaaggttagtaaaataattgatggattgtaaacaaagtctaccactatagtagcagtagtaatacaagaatagtaaaaaaacacaagatccgggtcggccggcctaggggtggaaggtggccgtccacgctccgtgcaaatgtgatcttcttcttcatcctagagaagaggagaggccaacggccggccattaatattccctcttcgatgcctgcataaaaagctgtgtactgtactactacccctctctctctctctctctctctgcctcactggcacctgtagtttagcgccgttgcacgctgcctctgtgtgtgtgacctggctggctggggctgtatgactttgcctatttggtgcctcgctgtactcttgggcccggggtctacttgcgaaaaaattttttaaccaaacaagatggaggaaaaagggcaaggattgaggaatatctctgtggtggagatgggtgattatacttgaatttgctggtgtttttttttctcattacttttgcacctccaatctttgcaactttcctaccttttggggaagaattaaatgtctgttcaagtctacaggggaatttaggccctgtttagttcacaccaaactttccccaaacttccaactttccattacatcacatccaaaactttcctactcacataaactcccaacttttttttccaaactaccaactttccccaaacttctctccaatttcagaaactaaacacacagttagtttttttttctatgcacagagttgaatagaaatttcagttaccccaagatatactattttaccagccatgatttttgaatcagtagtgcattagacatatcccaccaacaaatgaatgtagttgtagattatcccccaactaataatgtgcgtgtgcaatgattctgtcatttgcaaattgcaattgccgcctcaaaacgcaaatgccaatatgtgacacctgtgaagtgaaaatggtgttggcatcataaaatatttaaccaaccccaaagcatgggtaccttctaagttagccacacaactaatttaacagtgtactgctatcacacagctgtacaactggcatatcattgctatacaccagtacaaagtgctcgtgcccaccgttttatgctgtaatctctctcaacaactgaatagaaaatcaaccacaaaactccagctggtcaattcttagggatattcttgatgcggcgaaaatctctgaaagccaatctttggtgccacctgggtattgtgcactttgtactttgagctggaacgaacggcttgtgtcagttttggccgttggtaagggacaaacaatactggagaagagtattcatttccctcctgcaatatcttctcacagtgtagtagtatggtctaatgcgatccatacggaattgtacacaggagtacatccacatacatagaattgggtggtggccccaaaagtactctccatctacttgtagtagcctagtataatactggaatgtgatgttttactaactttgtaagcaaatcatgcatgtagccatgtaacttaggctcctttggcacatggtaattttcagaaagttgttacattcatccattcatgtaaaatccatgcatttctagtatcttcaaaaggaatatataggagtatatttcacaccattgatgtgtttatcttgtgtcttacaatactcctacctaaactagttcagttggttccagcgggggatgttaatacatgccgcatgagctatcagtcatgattgcagccaacatgtaattgtaatgcttctccaactgaaattgtcgagttgggaggtgaccctgacctgcacaaaaaggtgaaaaaaaagaaaaacaatcttgcagagaaagttctgcaatattatccatcgagcaaaccaaagcacaggtaggagaaaaactcccacatgtacattacctactcactaccggccagatatacatatatacagagtagtgtgtagcctggctaatcaattactaagagaaaaaaaaaacctccaatgttgctgctagcaatcttctacccatgctcatgcaaaggacagctactgagagcaagtttagtagtacaacccactacttactataagccaatattaaagctaacatgtataataggttagctataaggttagctttatttttttttcatcctctctctttatctctctatgaatttaatgcttatttcttggagcttgtgtggagctagctcttgcatgagagccatcactccccacttttctttatctcttccacataagcatttagcttgcttatagctcaccattatcctttctctcagagattgttgcaagggaggaggatatgcattgttttttatctttagttttttctttaagcaaatagggtagtgtagtactttgggtcatggggaacagcaaaaacagctgtctggggttgcatatgattagtagggcaaaagctagtgagtgtgtgtgtgtgtgagagggagagtgtgtgtgcaagagggaggaggggccttttgtgaaaataatgataagttttggggagcaaaaggtgagaggggagagggttttccaatccagcttccaagtcaaaagggtcgcccgggaacgaagaagaaagctcaaagctaagctgggctggctgctgcgggcatgccagcatcattgccgctcttttctgctctgttggcatccgagacgcctcctctgtaaaggcacaccaaagctctcttcttggaccctcaacaaaaattcagcaactgcaaatactattagttattatagttatgtcagttagtagtattagatacagggatcaattatcccttatttaattctccctaatgatccttttctgtgttttgtttactttctctctggatatatggtgtgccattcacaaagtgattgacttgctttatttcattgaggattctttccaaccttgtttaggctctggcttgtttgcccgttgattgagttggtccaagaatcaggatatatgatattcatgacttactggaaagctgttaagcaacagcactaacactggtactaagctaggcatgttcttttaccagatcagataattttcatctgtttactttctgttatgtgaaaatgatccgagatttattgctgtggagagcacacaagctggaaggaaaagatgagtatgggtgccatttttgggcttggagggtggtccttttctctgctgtacattttttttctacaggatccctgctgtacaatggtagtagcttcttgcttcaatcagggcaaatggaggacagattttagcttgagctaacatgtgagcaggctgctggccacagtgcatgtttgcacacatggtaggcccttaactgagtggactgaatgggggtaaggtaaggtgaaaaccagactctcaaattcactttcattttttccagttccattggaagatgtttcacatgaaatccaactgcatgatcctaaaaggcacttattactcctgtagtacattgcttgtaacatctctaataatgcgcgggtcattgtcgccgaaatcttaacccgattcccttttatgtgtctgtactcctattagtatatactaaaacatccatgttgttcatgaaaatggctcattgctggtgacatgctgatgatcgcatcacgggcgtatcgctgtccgcagcaatacgttttgatgcgaactgaaaacattttatctgtactcgcatgcctgcttcgtaatgtaatgtaatgcttgtgatgttattgcaagcgatgtttgatataattgcttggttttatgtcatgacagggaagagagggaggtggtcgccgtcatggactgatgagggccgtgcgtgttcgttcgccaggccaggacaacccagcaagcatgctaactggtaagcatccatcaaagcttttctctggaaaacaaaacttggcctcagaaagtgggttctgatgaagaaaatgggtaggaaaaacagaaaaaaaaatgggtaggaaaatgaaaggggagatggttgtaaaacccttatcctcccatggctccatgccagggaggcatggagtgatggacacaggtcaagaggagaggtgcaagtgcaagaaggctgttttctttgtaaaccagctagtagtaaaaacttgcaattctctaatcagtgagccagtgacccctcctgggtgcaggtctcctaggagatagggcaagggaaatgaggccaggtatccaaaggcccatgtctctatttaccaggaaatgctatgggtccccatccatgcccccctaaaacaatcactgctttcctcctggaacaaaacatactattataactttataagggatgtaaacatgttgtatggtaaatttagctagccagacatgattaataaggatatgcgctttacaatacaaaggggtgttgtgtagtatgaaagatgactatattgtattataatttgatgatatctttaatgcaataggtttatatttaatcattaacaagcacaagtgattatagctatgttaaaatgactagttttatgatcttctataatcgatacgagaagacagggcagatgtcccttttgccaaccattcaaactcatctcgtttgataactacaagattgaccaactctactcttgaacttatgcatatgatccataaaaacccaagcatatgtggtggtcactattctagaagataccaaccttgtgaactatttcgtctcatgtgctgctaatatgctatatacgagctacgtgttgagtacctggtatattttcacaacacaccaatatctctagtatttcacctcactgcataaaatcgcaaaaccaccaaagaacaccctaatacggctgcaactaccaccataaacatttggccatatgtaaaaacaaacgtcaccaaatcacaagggatgaagtcacaactcacaagtcataacctcccagcccaaccaaggaggaaggagggacttaggccaactcatcaacaccaaacagtgtccaccctctcttggtccccctagcagatcccacccccataaaactgcccctccattggttggctccattggcacaagcacaaggccctccacttctctcttcactcccttccagctccccccaaaaccccatttcattccaacctttcaaatccgccatcaccacctttttttccccacacacacacacacacacacacacacatatacacattgacacatagcagtagtgtgtgtagtactagtacaaacacacacaacacaagcttctctcttcccttcttggttttgcccaagaaacgaaaaccaaaaccaaacccaagaactctcctcaaaagaaccacctcacttcatagctctcacaaggctcacgcacacatagagcttgtgagagcttcttctttctctctctcttgtccttgtggtagctggtgcttaaaggaggaggaggtgaggaggaggcgcaatgtcggagcagccattgccgcagcctcggagcagcatgcgggaggcgctggagaaggaggacaaggagaaggcggcggcggccaaggagaaggccgccgtccccaagaacggcggcaacgggggaggaggcaagaacggcggcggtaacggcggcggcaacggtggcgccggcgcccagcccggggaggagacgacgagggagattcaggtggtgagggaggcgtaccggagggagccggcggcgccggcgtacgtgatgccggaggagccgccggccatggtggagctcgtcgggtggtacctctacggcttctgctcctacttcatcacccacctgctgctccccgtgctgttcccggccatcatcacccaggtcgccttccccgcctccgacttcaccccggacaccaagtacatcgtcaagggcgccacctgctccatccatgagatgtccatgtaagagagactcagctcccttccctccactgtttgttcaaatcttttcacttcttcttggctgttttctctttgtttttttgagggggtttggtggggttttttggtttgagttttgaaggggttttcagtttgtttccttggtgatttgttttgttttcttctgggtgtatttttctcactccttttttttttcctctcttcaaaatggttgagaaaaatacttgcatctgtgtgagctaagctagatttaccaagttactatcatttttcccccttgtgtttgcactggaagtagtactattagtatttattctttcctttttactagaactttgagcaacttgactagtgatgactcttgcagtgaggtttttcttctttcctagtgtttcccctctctagctcctcttgtttaagacctctacaagcttatgtctccgctttttgaagtttccacctgatgtcttcctaaaatatgcttcttgttttgtacatcaaacgaacaggcatagtgcacttaggaaaaaaaaacttactcttttttctctgtagttttcttgctagtctcttctctgctcttgttcttggtttgaaagttttgagctcgttttaactttacatcgtccttcatcttgtgatctgtactcgtagttctctactccacctttttttaacctcttttacccacacatcttcaaggtaccccaaatgtgaaaataaactggtgtatagtacttcaaagattggatttttccgggctgcactttatatgtggcgtatatgcaaaatcctaaaaagaaatagcccgtgattcctgagattccatgtttctttgctctccattattagcagataagagattcttgtgcaaagctccaaaagatgctactgtttggtcctagatattgttcagtgaggctatttcccacatcccacatttctcttttattaatatattttcgtttttcctgagattttctctacctagacacgtaatgaactgcatctttttttgtcagtttctttttgttgtactactactagctgtgctcttgtgactgtgagagacaagatttcttgggaggaggataaggtcaaacaagaaatccctaggggtgcctttgtaaatttgttttaaaaatcttccgaacgttgagaaacattaggtggtgagatcgaaaatgtagtactgaatggacagtggaagccataagtatgaaatttatgaggtaccccaagccgaggcctgtgtgtctcattaaatatggcctgtgaaacttgcttccatgcttcagataactagccatatttcatttcaactactagtagtactgcaaaatttcttttgtgatccatgcagtgccatatacccctggagatggtagtagctcatttccttggctgatagatctagtttgtgtagctgagggttacattgcttttgtctcacttttgatagaaccaagaaaaagagtgcgcaaaagcagggccatgcttttgcctattctctttggcctgccctcctccctcccttttatttttttctcttttgaacaggaaaagaggcccctaaaccgttgcaattttgcctttaaccccaaatgctgttgagggctagccgcatgaccagccaactggtaggtgcaccacagtatggcatgcttaaattgcatcaggccaactaactgcccttgattgcaagggagattgttgatgctacttaaatgtgtcaacgttgacacctcaacacacaaaagttaccatcttttaacgggttaatctggtatgaacccctggaattctagcacggtgactttcagcaggcaatgcatgtgcttcttgcagtttatgttcacgcattgtttgtacaccctggaagcttttactgcataaatttcatagcatgcaatgtttacctgtacatgttcatgtgatgcaaccaaaccatcatggtcacaccaagtttgtgaaatgttggcaggtaccagaggctgaccaagcattcgattgccattgatggatcccggctgtccccgttgggctggagtggcctatcatgggcgattggaatcctcattgcggctccgatcctcacccaggctgcacaccaccttgaccgtggccagtatcagtcgctcatcctcattgccgcgacatcgtttggctcattcttctgcctcctcactggcttcttcaagacagtctgggtgttcctcttctacatcctgttcattggtgcatccatcattgttgctgaggctgtgcatacacgcaatcttggactcatgatccgtggccttgcagcacatgactctggcaagcaccttgtccttcgccgtcgtgctgctgccagtcagctcaccctgtattgcactgccattggtggcattggggctgcgctcatggctgctttcatgtaccacatgcttcggcgcactgaccagctcacaggcctttgggtcgtctccatcttcagtggccttatctggttcattggtatctgccatggtctcttcacaaaccgacccagcagctcatcgcccaccacagcatttgagcctaacttcttcaccaagctcagctacagcatgacccttgtgcgatacccacaggccatcggaagcttggttgcagtgttcctttcatctttcgccacaatgtgcatcttcaccagtggcacattgtatgctattggtggtgtttgcatcaagccagtccttgtgctcgtgctctggatactctacttcctgttcccgttgatctcacttccgctgctgcacccaatccagatcatcatccgtgctgatgctgttcgcatgcagctgcttgggttcatcatctgcctatttgtgtctggtgctggtttctacttcaagagccacaggtggagagccgctcacatcattgtgatcgctcttgtccagagcacagccaatggtgtgctgtactcatttggtcgcattctgctgctcgatgcctcgccaccagggaaggagggtgcttttgcggtgtggtatgcatttgtacgctgcattggtgctatgattggcttcgctgctgcatccgctgggcctgggcgtgctggaggatcgtttgctgctgcgttcctaggcagcttcctcggcatcattgttctgatctttggtaatgtgagcaacatcggggcgctgaaggctgctgggcatctgaagggaatggaagacgagaagaggctgggcatggagaaaggggaaggcatgagtgcggttgccgattccggcgagggaagggggagggtatgatgatgattaaatgggcttgtgggaaggaaagattggaaaattgctgtggaggttgtgtttgtgagagggatttgttcttctttcttgtttctttcttgttcatgtttcagtgacactgttaattcggtgctttgccccccttggatgcatgatgatgatgacatagtggtagaggaagtgtgctagttgttaatgtgttattctttgcttggaagacaattgtaactgatgatatggttctttgttcatcgccaccgaaattctctctggcagtcatgcttcgtggttgcttttctgttgaaaatgtgattgtcaaagtgaaataaaacccttatataatatttctattgcattgtgcaaacaaatttgcgcaatcttgtcacctgatttctggagggtgaaatgcaagatactattgtcactatttcctgtcaaaacaagaattattaaaaataagtccgggagctggaaactgaccggtgtaccaggcaacattgttattccgggtcaaattctattattttttttccctgtactctatttgaagttacctttgaattttcaactttgcccagcaggttctttagggttagggtttagggttaaactgaaagagcactgaggcttaaactgatttcgtgttcttgaaacctggataagggctcttttagaacgcaagagcaagaatttacaagaaaacataaaatccctatataatttctctatatcaaataaaacataaaaaaaaaaacttatgctaggtatgctggataggtcatgttatatcatcctatgtattttttctttttcagtaattatatcatcctatgtatttttttctttttcagtaaatctctattctgaatttttatttgcacgtttcccaagctcttaaacgtcatgttttgtgtaaaattttctatataatttttttagaatatttttctaaagcaactttccaactttgcaactagctaattcattacttcatatcctcaaatagctatcacaggagtcggattatccataaattttagctattttgttgttcggatgaaaatatagatattatcaactgttagagacacatggattttggcatcatttgtgatgccatcctaatgacttttctgccaaatgataaggtttgcagtagccgttgtaaactgtcgaacccttgaggataccctccatacctttgtcgaaggatgcatccgggcttatttccagacaaatgtgatgtaatccttctgactttatcagctgatcattgcacaaaacattgtacttccaaccatttgtttagtgtaaacatcagcacaaatagttgaacacaagcagttactagttcttacttaaaagctctggataattttttctatgtgcattacgaatgatgatcacctgacacatcccctttgcatgacaggttaatgaagggtttaagagaacaacctcatggcaaaatgaagccttaatttctctttcagagtttgttgggatgaaatcagctttgtacattaaatagtttgtattattttttctctaaaatcataaaagagtttgtttttgtgttgtgttcttctacctcttgcaattaaagaaaatgtacctgctcaaagaatctctcacctcatcaagacatcaacagcagaaacacatcacaaaccaggagacgacttatccaaatcaacaaccaaatgggactgcaatttagctcaagttgcagtccatctacggcagaattaacaataaaaacaacaacaaaaaaagagaaaaatttaaataatggtgattaggtcaagaagcatacgtacaatgaggtttacggagccgtccatatcaagccgtctcgacgtacacatcgggtcatgagtaattagtctcgtcggctgcattaatatactaccagtactactactaatgacttcattattctcattgcgcatgaagggtgtgatggtcaactcggttaattaattactatttggacagatcatttggagaatttagaaaaaaaagtacactatgatttatgggagttcatatatagtccaaaagttgcttatgaaaatactctatttgacaatttgtgccaattccatagtccaaaagccatcaataaagtggactattgtgcaagctctagatgcttgagtggccatgaaatcatccatgcatttttataattttatttagtggtagactttggatgcgtgaagagcaaagtttatgggggcgtattagagaagattaattgtgattttgggggtccataactgtgactttttcctacccaataaaacaattattgatggcaaagactaaactataagccagggaggcaagttgatcttcccccctattatcaggatttgttttttttttgaaaatagaatttgaatttaatctttttacatatatacacccggctacatatgtactaactacaagtaaagtaaagatatatacaaagaatttgtattattcgaagctgaaatcatgcttgaaaatttctaagttccaaacaaagccttggactaaaactcatattaattgtcacttcaacttaaaacaaagtagtcaagcattagctttacagaagaaacatggttagccatgtgttgatggaccacttgttgagttgagaataattatactagtttatgatggtaaggttggttaacctactcaaggagtagatatttatgtggtgttggcatgacatatttagaggcagggagacagggaggcaagcagcatgggttgggcatgatgatgagcccctgtttcctaatgtgcctgccctggccctgccagtggccagtagtaggtaacccatgatttctgtgggttgcacaccattgcttgttttcctctcatcacctcaagaatggagtattcttgtttttaaaatatcaccctaagttctttattattttctttgaaaaaaagaataaaatggccatgagttattttccaatggagtagtgtttttttctactgactccatttcataatagtgcttggcaatattaactaactaactaacaaacaaatggtttaattgaccactgatatcttttaaaccgttcgatcaagttggatgggactaatatatttaaatttaccgtgtaacatactttactaatattacttgtagatttatttataaaacaagagtagtcgaactaaaacaatgataagttaaattttgagaattgttactatgaaacagagaaattagaagaaattcagaaagagaaagagggagaaggagagcatgtagtatgatgattgcacatgtgcagtgcaggtgcagggccccagtgtcatctcctgcacttcacttgtgccatcctcttcacttgtgcagtctttactgtaagaattttcttgcaagttgagaagaaacagacaaggggagctcttctttcataccgttgccagcacggctattcaagcaaagtctctttgactttgacctccacgctggcacttgccctacgctttgctatcccgtcccaaacgtttttctcctgtttctacatcactccatcaaaccgcccgtctaacactccgaagtacataatccgtacttcacgtcgatgcctaaaaacgtactactcccccacattccaatattaatatacaacggactataggattaggtttttttttttaacagagcagtaatatacaaggttgcacttatattaatatggtgggattaagtatttataaccatgacttaaattgagatgtacataaatcattttcttatagataatggattgtttcattagtcaataaaaacatcctacacctttacatcaactcatcaaggatgcacacatgcagtaaaaataaaagtgaaagaaagatgaaaaaccgtagtaggtaacatgaacatgtcatgttgtctagcgatattttgctctattacaatcatgaagagaatatcgggattatatgctatactttggaacaacgccttcagaaataaagatcttttgatgatgtcaatttctaaaatgtatttgaatttaatggcattgccttctaaaatcaaagtgaccaaagaatttttaaacttaattttgatttattgtatttcaccgtagtttatttttttagcattgacttttaaaccacgaatataaatataaaagctttatctataaattatttttaatatctttgtttgtttttctatgacataccagcctagcttaactgcttaagtgctcaaccgatcagacacttcgtatccggctttctataacaagcaattgtccttttaccgttttatctgctattgcttgttatagccgttacgctgaatttaccacaggtcactcacgtatagatactaatactgtagagtgagctgtagtagcagtaaacgtcgcttaaaaggcgggaaaagctaccgttgcaggcaacaacactgaactacatgccggcaattgcctgtcttcttcttgttttaatcattcaatcacctcgtcttttcttgcttaatccatccctctggcctcttctcttcttcacctgccatcctcattactttactccattgcattcttgtttacaagcttaatcaccataggttattactagtcagtgttaactaatgcaagttgataatagccgttctctgatcgccggttggaaggtaaagatatgaaattaaggagttgaccagcgcaatttctgcactagacaacaaactgatgttttggagtcattcatacatcagattataactaatcaagatgcctctaacccaaccaaagcctgcgtgttctcttatctgcattaagccctgcttgctttgttgtttctttcaggaagaatgacgaaacttgagccggcaagattccttcctgcatcaggttcagttcagaattgtagtttaagaacaagtttcagttgatcagcagcagcatcagctgaggccaaattctcctgtttgtcaatgctctggccaacagtttcagatcatgatattattatctaaaaaagatagtttcagatcatggtcagatttcagagggtaagaaaaaaaaagtaagtgataataataatacaattggttaaggacagttttaacaagtaagctcacacctgaccttgagagcaaaagttctagagctgctctgattcaaaaggccagccatgctcagattgctttatgatgtccttttgattaatcaatccaaactaaactgatactagtactgcaaagtcatcaccaacacgaacaaaagaaaataagaaacaagaaagcaaattaaaggacagaacagtcaaagcgagcgcgccaactctttttgaacggcggaaaaaagaaacaaaaaccagcacaaaaggtgaaggaggaagatgaactcattcctcaatcctccagcgtttacctgtcgctgaaattggggcgaccctgcaaatctctgaagaccaggatgatattcagatttgtccatacaaactattatattgtttttgtaaaaaaaaatcagattaactgttgaattagattgtggtggtttcaactttcaggtgtggagtcaagaacaagtcatgtgaatgcaaagtgcccaaaaagcctagatttgaagtcacataggacacctatcctgagcactaactgaaatctgttgtcacttgatgcataagatttgtgtacccatgacagccaacaatggctggataatgttagacatattggttgacatcacaccaggccacgaattcctaatccctaatccttcttccttttagtgccaaagttggtgtaggagcagtaaacagcaacatgagtatgtcctaagaattcagaggtactgtagaaatgattaacatatcttcatttattttactgttctactaacttgtattagctcaaattaatgcctagcaatcctttgatgggttttgcaaaaattaaaaaaaaacgtactttttttctgtccaaactatagttgttgtaggacaatagtttataaacttttcctatgtgcgacatgattattattttgaaggtgattggaggttacaaaaaaaactttctcatgcagtagctttcagtgtgaacagtaagagaacttacacatgacatcttccatctagaagtgcaggtatcatgaagaaaaaaaaggacatggcaacaaatccatttatttcagccaaaatagattatgtaagcagcagccagccatctctctgcaatctagataagaaaagagaaaaagaaagaaaattaaagttgaggtgacaagtgcacataaaagtcttttaaacgtctaggtatgaaattatgtgatcctttcgcatcttccaaactccaatccgtctcatctgctcctcctcacatcattttcggttttcctgtgagcgatgcaaagtctactcttgtgtgtgcatgtgtggagactcagagaccacgattctcactgcaaatatatcattttctttctctctttttttttcaccaccgttcaactctctctttttgacacaacagcgatctccctgtcgtgttgtcaacttgtcatttaggaatatgtgtgtgtgtttttcttactggatttcacctatatattttgttcattatgatctgtactttttccatgttatcaatttgaaggtagccagggtttttgggattcactgatcttacttaccatctgagtgcacactcacaagaaccataaaaaggcccttgcatgatgcgtcttccatgtaatcgaaaaaaatagctcctgcaagacgacaaaccatttagttacccatactcttttcgtacatggtatctccaaaccttgtcacataatatttaattcagttctagaaccggttgaccccaaaacataaaagcggcaccctccatttccatctagtggtagtcaaatacgatgaaaaatccgggtgcaggctagacttgaatttggacccggcgtacatatctacatacaatttggtcaatactctcaatcttttccatgaaaaaaatcaaaacttgtccaactcatgacgacatagaagctgcatctgatggtcacattcagctggctgggtctggaagtacaaccgctgggccagtgttgatttcttggcacaccaaagccaaagaaggccacaaggttatcttcaaagtctcaagtctagtcttgttccatatgaacacttgccctgtttgtcatttctcttttttttttctcacttgatgcaaatgttgcaacatcatcaagatgttgaggcctcacagggctccaaatgatggggcatgctggagagaaattaaaaggtaaaaaaaaaagagaggacaaaagatgatgctgatgagctttattccagtcattgttaaacagcaactggccggctaggtgtgccgtttggttttccatattggcaactaggtgagcatcaagccatttttgacccaaaaaagggatcaaagtgatcacatctacatgtaaaagaagataagagttgtagattcttacggagtacattttactttggatgtataattggagtgatcttttttaaaagcatgccttcgaaaaaaatcttgctgatgaactaggcatgtggttggtctgagaaaccacacatgtttggctgcaagaatacctttttttctctcagtgagatttttttgtccacatgaactgtaaacattgatagtgaaccatcattttgaggtcatgttggttacaggtaatactgtagcaaattttagttgggcttgcaagaacaggtggtgaacatcaaatgattagctttatgaagctgtctggatggtgagattaaaaatagttagtaaaagagacgaacttgtctattgtagagtggatatgcatgtactattgattactgccaataaaaaggacaggacagccatcatagtgggttaatttagaagactagcacaagtgctcagtgatttgtttgtgattttttttattttaaaaaagaagctgaaagtgagaggatggacacaggacaggagaattgtctgctacttgaagcctgataactacagatgctacaaacatagatcttttggcccagcccaacataaccaacacatatgagctttaggcccagcccatgtagccaaatagcccagatggaataaccagaaactggctaggctgcaccagtggtctactctgctgccaacgatttgtcttgtaaatttcaataagaaatcttttactagacaatcttttctcttgtaatctaaattgtaaaacaactgaagctcagataagtacaaggagcagcagagcacctatacattctgcatttatatacatgatcagtgtgacataccattgcaagaattttcactggaaatgggtttcagatatgtgaactgatgacccatagatagcataaacccccagagaagatctcctagcgtatatattcttccctaatgcgtctgaaaatttgatcagagatgcataagtcatgaattttatttaggccatatgataattcagaaggagcatgtagagttggagataactaatagtgaaatcgagactaaaaatatcaacaaaataatccctaacccaaactgcatgcataaacaatatcatggcccgtggaaattaaattcgataactgtatctcacgagataggtaggtacctgagtgcctgaatttcaaatctgtcgaaattaaaaaaaggaatacccactgatgaacacacacctgaatgtcatatgctcgtcagaaatatatttttccactgcacatctgcattcgtcatactgctcgatcaggtggccggcttacgtcatcgtggatgcaggatgcatatgcagacatggccggagaaggcagcgacggaggctgctcgtcgccggagatccaagaaggcgggggttccccttgcgcgactaaacaatacaataggagataattgtagggacttttaaaaaaatagaccaactcccggtttgatagtggatttatgcataaacacccctgttcccgttcgaatttacataaggaaacctccactgaactgcacgcaaagtttaagaaacgaattcaacttaacagttggattccgtttcgaattaacaaggaagcaatcggttcggaataacagttcaaattagatccggattcaattcaattcatcatgcaataaatatatgagctcatggcacctgatcggcaatcaatcaccaaacgtgggtcgtctcagagatcgatcagcttcagaattcgccgtcgatcaatttagacatctatcagctcgcgtgacatcatcaatggcggcggcggcagaagagaagaacaagaagatgatcaaggtgatcagctccgacggggaggccttcgagatgacggaggcggcggcgagcatgtcgcggatactcctccacatgatcgaggacggctgcaccggcgacggcggcgccgggatcactctccccaacgtcgccggcagcgccctcgccaaggtcatcgagtactgcaccaagcacgccatcgccgccgccgaaggtagcagcagcagccgcaaggcgaaggaggagctgaagaagttcgacgtggagttcatggaggtgggcatcgacatgctgtacgacctgatcatggcggccaacttcatgggcgtggagggccttctcagcctggcggcgcagcgcacggcggagctgatcaagggcaagtcgccggagcagatcagggagatgttcgggatcaagaacgaccacacgccggaggaggaggagcagatccgcaaggagtatgaatgggccttctaggctatcagggtttaaaattgtggaacgaaattccagttttatcggaggggacccctccgatatgatattatttcggccgaaattttaattttttttctttctctttatgtactaaaaaagatgtccgtgcgttacaacaggtgaatgatattttaatcttattattgttatggtttggctagcgtgaaattcactgtggaaattcgcttggatattttttttagaaaatcatgagctgtaattaggagtctgacattaatcattaggagtctgacattaatctcaagttagtatgtaaatttttttaaaaaatatttcttatacgactccttttatattttcaaaagcaaacaagtttaaaatccgactcaaacacaaatatgtattttcaaaagtgaacgaatttgaaaaccgactcaaacacggatgacgtactaaaatattggcaaaaacattttcaatttttataatagtagagatttggtaatattttattcaaatttgaccaaattttgttcgaacttttggaaatttcggtatatagacaccctttgctagaaacgccgaaaacaaaagattgaaccctgccttttagtagtacttactaactacgtattactacactcttcatcctaaaatataaatatttataattatgaatttagacatgtatttgttcaaatttatagccaacattattatattttaggatgaaggcagtacatcatacaattcacaaactatagtagagttaatacctccgtcccaaaataatggtcgctttgacttttttcttgcgacatttgaccatttgtcttatttgaaaaattggtgcaaatatataaaaaaaataagccatacttaaagtgcttttgataataaagaaaatcacaaataaaatagataataattctataattttttgaataagacgaatcatcaaaagttaaaaaaaaacttaaagggacaagtattttgggatggagttagtagttattattcagaagtaattagtaattgattttgtgcaatttatcactcgcatgcattgccattgcttaattaccttgtcctaatttgtatttgcaatgtacttagactcgatattcgattgaattcatggaaaaaaaaggatgcgcacgtagcatctgatcggcaatcaatcaccaaattaacataggttatagagatcggacagcttcttcgccttcgtatcgatattttacggtgccgatcgaataaattattttagttaggattgaataaattattcggagtcatgtgaccccgggtaatcgaacgtgggaacaccactacccgtatccgatgggaaatgtagctcttgatgtttttggcgccaagatatcaatatatggccattatatatcccccatagaacaatcacatatactccctccgttttgaaatatttgacattgttgactttttaacacatatttgaccgttcgtcttattcaaaaacttttgtgaaatatgtaaaattatatgcctacataaaaatatatttagcaataaatcaaatgataggaaaagaattaataattacttaaattttttaataagacgaacgataaaacatgtgcttaaaaagtcaacggcgtcaaacatttcgaaacggagggagtataaggaaaaaaaatctaatacacttaattgtctctgtaggaactactagagggaattcagttctaataaatcgtcttggttccattataaggcattattatgcttcagtaataaatatccatataagtcgctgcctttctttcactacgctgacaaaaatgcaaatgtttttttgcttctggcaactgtgcttctgttccgcaactaaagctgtatcactatgtgctattttattctgttcttgtctgatgattctatttttatgggggaaatgagctggacatgcttgtttctatggtttacaactgttgtatgtctattttgtttatctctattagtatcaagagcaatttgccaatggtctatgttataatcatcatggtttatacattatttattattggattaaattgaatggtaatttactgaaagatatttccaacattataaaccccaagaagatcttccctggcgcgtgtggaagtttgatcagatattaagcattttagataaagaaattaaataatctggccctcttcaccaaccgaatgtatcagagattagcatttttggataaataataaggcggccgagaagagggtagatttttttcttcagttctttgcgctccaatccgaaccgcacgcctctcatctgacggtcgcagttgagtcggtaacaaattaacaaggtgataagcgatccagatttatgaagaaacacccattcttctcttcgaatttacacaaggaaacgaattcatcttaacgtacatttggattccgtttcgatttaacaagcaaagcaatcgtttcggaatagcagttgagatattagactcggattcgattcgattcaattcatgcaaataaatagataagcacagatcacctactgatcattggcaattaatccaggtctgagatcgatcgatcgatcagcttcttcaataacaatttcggggacggctaatgggcgatcgatcccctcgagaatttagactatttaccatcaaattcgcgtgcctcaatttttttaccacccaatccgtatgccctttataatatgtcattaggactgctaattagtttatttggtaccacttttatctatctttttatctatctttactgtaattttcttttcttaattttatttgtatatattttcaagatttgtggacatttttacccctgggcccacctgtcagatcaaagaaagatactctgggtctggatcgattcgctccctccaggcgtagcgccaccgccgccgccacgcgcttcttcggcgtcgcgtcaccaccgacccgctgccctgcgccaccaccgagcgccgccccaccacccccgccggcactgtgcggcagcacctccagccgccccagctattaggcagcacatggcatggaaacgtagtaatccttcacaagaacatgccatgttttccatgttccatagctagctaagctttttagctttagcagcagcatggtgagtgagtgacaagattcatcggcatggtagcatctagcgatgcatgcaaagctactaacacagtgatgtttgtgtagccacagcgccacagatcgtgcagtggggccgtcgagttggggcggcgggggcgcacagtggcgccgccggcactcggcggggtggtggcgctcggcggttggggcggagtggcgtcgagtcagctgcggcggcggcagcgctcggcggttggggcggcgagctcgcctccccttcttctctttctactacaccataaatttttttaaaaaaataaagttagaaaaatttatgtatagaaatattatatataaaaatattgaattcaaattcaaattttaattggatatataaacttttgacttataaatattcgctatacaaactttagatgtgtaaaatttaggtgtataaacttaataaaagaggaaaagaaaaaaaaaacgatcgccgctagcgatcaatagctcagtaggactttcgaacaatttctccgtgcaaatcggttgctagcttgcttgacagttaatgtcatctatggcggcggcagaagagaagaagaagaagaagatgatcaaggtgatgagctccgacggggagaccttcgagatgacggaggcggcggcgagcatgtcgcggatactctcctccacatgatcgaggacggctgcgccgacggcggcgccggcatccctctccaagatcatcgagtactgcaccaagcacgccgccgtcgaaggccgcagcacggcggcggcggagctgaagaggttcgacgaggagttgatcgacgtggacacggacacgctgtaccacctgctgatggcggggaacttgatgggcgtggagggtgtcctggagctggccgtccagcgaacggcggagctgatcaggggcaagtcgccggaggagatcagggacaccttcaagatcgccaacgacttcacgccggaggaggaggagatcatcaaggagaacgcgtgggccttacagtaaatcataataatttgttaggcgtagtaataataattagtaataatagattttttttgtttatgcttttgcttaattattggtagtatcttttgtaattgaaatgttctcgagtcctaatcgatttgattagttacatttttgcaatattgttcaatttaacatgtgcatgttttggcgccaagatatctgagacatggccattattccccagagaacaatcataaacaatctaattcaccttaattaatcgtcttggttgcatatatatgatgcttcagtaatgcagggaacatatgtttcagtacactgcactcagcaggctggtgtagcaacatcaggagaaattttatggacatgatccttgatcagtatgtaaaagaaaaagggcataatcattcatgaaacaactctcagcgacatccctccggcgtcacacaacataaccattaaccaacgataatataatattaaggcagcattcacatggtcacagaacatagaccaaccctgcacagtacatgcaagaacctgcatttctcatactacagatacaacttcagtgtactcttacaagaatccatacatatgccacaggtcaagaaaccattaaatcacactagcaagtacggatatggcttgtgcaacgctggctaaaacttgatgagaacatcattggttgacatcataaatcaaactgggtaccacccacatgttgtctacttgaaagtctgggacgcggtctattctactaggaactggctgaccgagctcgaccgcagtccaaggttcaccagaatctccagatggtttcgcaacataaatccagttactctttccgccccatctttcagggctcgtgcaagagaatgtagggtccctcccatcaaggttgacaaagagagcctgattttccaacctttccatcttcacacactcaactgtttcagcagaaaactcaagacgaaagacttgaaaggtgcgaggcaattggtcgcggtctgttgacaaatcaaccatgagaagcatttcaccacaggccaccagccatggcccagaacgtgggcctgtaaccatttcttctcgtcgcagaaccgctacttcctgtatgctgagctcaggtgcaaattgcatggtgtgaagcctgccaagaacatccatcgcaaaaatctcacctttgaagagcacaatctgaagaatgtgctcaccgccataaccgtgctttgtccaagagtttgttccaacctgccaatagaatatggaagacctcgaacaaagtatcagatgtgagttgggtgaattaagtggagccgtaaggatgccgtagtagatatccctgtcgcccatgaagttgagtttgggagacttcagcttagtgctagtgtaagcatcaacaaagaggcagttcttctcatgataggagaagatgagatatccatatgagcagcccaaatagcgcatgcgatttggagcatctggcggagctgaacaacgaagggatatgtttctcttggatggatcatcaagctgccatttgcagtaagataaaagattgtccttcaaaaggacgcgaaggggacggatattaggtgtatttagtttgaggcagagaggtgggaagttgaaagtatatacggatggaaaggaagatagcgcagctcgccaagagtggcaggtggcactaaaagcaagcaagtcctggaatgagctaagcaaagcaatgatttggtgaaggaggctttccaggagacctggccaaacatggggttcacacaaggtagaagatgtaggcactgatgagtggcaggttttcttaaagggcctttctgcagcagcaacttccctgtcaaacaaagaaaaattcagagattactggagcagagaaaacattcgaagataaaattactacttcctactagtaaagattgagagatagagtggagtgatattgatccaactgtgttgtttcagtgaagcaatataaagcagtaacttcacctacagcttcttgagtcattacagtgacccttatgagttatgacacattgaggcaaataaaactgaccatttcattgaactgtaagtctgtaacgaactaacgattcccagaataagatgtgcatcaacgtcctagatgccaaccaaaacaatatacgccagaaccacctacagctttgatatcttgaacaataccacaattgtaataatctgtttatattgtgccaaacctatttttgtttttttcctcccttcccttcaaaataagacaaaatggtacttcgtattccaccctcccaaaattaatgaaaatgtttattttgacagtatgaatatgcggcaatacaccctatttatctggaaaaaagatagtgcatttgattaataatttattaatagatctggttggttcctttggcagccaacgcagcttcagccatcagtgattcagtgtcaaatgctaccatacaagaatgtcaggtaccataaacttcttggaactatatacctataatcaactagaaatctacaaaactaagcaaaattgaagcaagaacggaaaccaaattacctgtggccgagagcgctcagctccgttggcggcggcatctcctggcggctcccgtccatggccgctgctgctcctaccactcactaatccgtagcttcaccggatccgccggccggcgaggagaccgggcaaccggcggcggcgcgtccgagcctccgaggcgaggcgaagcgaagaagcggcggatatggatgcgtcggcgaggccatgatccatggcccatgggaggcccaaataatccgcaggcccgtagaacttcgcagtccggcccaaatattgagttgggcccataattttcggcccacatggagagaccaaactggcccacgttgaaggccataagacgagcaggagaaggggagagagagggcaaaccgacatcgccggagaggtcgccggcggcatcgtcgtcctccccgtcgccggagatcggacctcctccacaaggtctgcgctctctctaccctcccgccttctcgcgcctaaaccctgttcctcttttttttttcttgataaatttctcgatctcttgtgtcatccaaccctaaccaagaaacgggcgcgttcgctagggttggaatttccactggatttttgttgttagatgtgcttgctaacaaagtaacaaccctagattgatatggttgattaggtgggtttatcaatcgtgtcatgtaaatcaacgtgcctcttctacttttggggttgatttttttaatagaaaaatagtactctttggatgagcggtgttgatttttttaatagaaatttggaagccaagcatgagttgattgatgtacaaatggagagaggaatcagtacgcaaaaatacactcagatcatttttatgcgcgttatttgattacacagtactgaagtgctccatagaaaagctcaaaactgtactatgcaggaaaacatttcgattagagaaaaaaactagcccttttcctctatgatattgtatatttgtatctccctgaacataaaaatgcacctggttgaattgaaatcttctttcccattgtataatgacgatttaggctcagttcgtttgtgatggttctcaacctctccttctcgatttccgcgcgcacgtttttcaaactactattttgatgcgttttttgtaaaaagtttttatacgaaagttgtttaaaaaaatcatattgtttcatttttgaaaaaaaaattagctaatacttaattaatcacgcgctaatggatcgttccgtttttcgtgccagagccaaacgttcccaacctgctctttcgaacagagccttagatgtcttctgcatgtatttggtagctgaaattctagcaggcttccagattagtcagtttcatccttctaacttgtgatcaaattcgttatgtgttgcagggagttcggcaatctgccatcatgcaaagccccagcaagatctctgatgcctctggctcaatgccccctgccacgtctgtgcgcaaaggttccaagaagaactgcttcactccattgttcctctgttgggctccttcgtcgacattctcgcctttgctggcacctgccattcttggcgtgctgccttctcatcatacccatcaaaatctgcctttcgcaccttactcccaccactcctcgtccgacccaatgtccgcgtcaaatccccttgtatcccttctaccagcaatggtcctcacaagctactacgctcatgtcaggtcattgatctagccaaccgaaacaccccgctccgctgccagattcctcgagaaactctgcagaagatgctttttgcaggctcttctcatggtcaactcatatgctgccgcagtggttactgtctcgttgttgatgtgttcaccggtgctgaggtttcaccaccacgtcttccattcagcaaggaccatgaggagatctacttttgtggcactctgacggctcctatcacgtcacccaactcacatctccttatcagcaaccggtcatctctgttcgattggccggttggaagtgactcctggtctgagctcaagcttcctgttaatcgggtcgatcagattgtggaattcaatggtcagctcatcgccgtgattgaatacaagctgtacactttgcagttggcccccaagcttcgcctgaagaagatgaaaaccctgtggtgggatgacatgagtgaatgtccatatttgagaccatggctagtggtttgcgatggcatgcttctcattgttgaccactacataactttgtcatttggagcaccagtcaactacagaccgtaccgcctggacatgtcagccaagcctgcaaaatgggtggaggtaaagaagctggagaactgggcactctttatcgggggtgatgcgagaagcccgccgtttgctttcaagaacccggagcgctggggagggaggagcaactgcttgtactatgctcactactcccagccatggagccttcatgggttgggtgatgatgcagatgctgtgtgggatcctaccactgatgataaccttgtgttcaaaagaaactggtacagtcagctgcaggccttctgggtgtatccaagcatgttctattcagacggagacggccagtgattggcacacgcacgagtgctctgctcttattagcttcttctgaaattgcccccttgtgatgtagagcagagacttgtgcaacttggcctagaaatctaggagatcctcatggtggtctttatgtctagtttaacacttgcagtcgttttgtagttcagttattagctgcattaccatctgatagtagggtgtgactgcactggatgcaagtgtagttaactagttgttgcttttccactggtgatggtaggtaatgtttcgttctgtaagggtttggaacttttgttcttcttcacagcaatggtttggaacactaatgtaatgcttgtgcactttgtcttgtgatttggtgctgctccaaattttcttgcaggacaaatagattttcttgtactgggatattttctatgtacttctgaatcggaatcacattggtaactttgatctgtaattttggagtttcaggaagcagaaagaagcctagtgttccggtaatgggttgataaacatattggggcaattacaaatttaccacagttttaaattgttattgcaaaactacattcgaatagcattcttgcaaaatatcataaaaaccagagtcttaagttagattaagaaaaacaatggacaagtttgcaaatgccccaaacgtataagatttacataaacccctctcgatcagatcaaatccactccccgcaaaaaaaaaagaaagatcaaatccactcaactgcacgcgtgtgcatgtttcagaaacggattcatcgcaacagttcgcattgaaattagactcggattagatcggtttcatgcaattaattgatttctccgtgcaaaccggtcgctagctcgctggacagttgtcgtcatcaatggcggaagaagatatcaacaagatgatgagctccgacggggagatatcatcaatggcggagagggcggcgagcctgttgcggcaactgatcgaggacggctgcgccgccgccaaacccctcgctgagatggtcgagtactgcgccaagcacgccgccggcgaagctcaaggtaaggaagaggaagtattagacggcgagtccagcgacgaggaggagacggacatactcaggctggaggccagcttgatgggcgtggagaacatgctcagcgcacggcggagctcatcaaggactaggacaagccgccggagccgtcgccggagaacgtccccttccacggctttcacagtatacattcatttattgagcactgctacacagactaaattttcttattaacaatcatctcaaccatcttattatatagtatatatagtaaaagcagcaagctatattacacgagaatgcgccacatcatcacaaatataatagccatcagataaagggtttgggtaaactatagccattggatcaaacggatacatgtattaaaaaaaacataaatgggctaaacatatggaaatttccggaggtttctgttacctcctctagacacatgataaaaatgagtggggataaagagagaagaaagatgaggtttctagtgatttctcttattataaccatatagtacaacttggaaatcaatactttgtaaaataaaattaacttattatatcaaagccttcttcaaagcttacctaaactaatagaccatatagaaaagttcttaaacagattaaaagtcacgcaaagcgtgactacgaggctagtttaatttagcactgctacacagactaaattttcttactctctccatcccaaaataattttcttactccatcccaaaatgcttgacgccgttgatttttttaaacatgtttgaccgttcgtcttattaaaaaaatttaagtaattattaattattttcctatcatttgattcattattaaatatacttttatgtatatatatagttttacatatttcacaaaattttttgaacaagacgaatggtcaaatatgtttaaaaaagtcaacggtgtcaaacatttatggaaggagggagtattaacaatcatctcaaccatttaatttagttatatgaaagttataaaaaatcaacgtacactcatagcgtgacacgtcagttttagtaagaaaatgttaatacgtatagccttttccttgtttatttattattagttaaagacattattattcagagtaattagcaatagatttttttattccttgtaaaagattttgaatcctgattaatgatttatagtattttgcaacggatttgctaaatgtgtcgccagtttttttaggtttatcaggttttggaaaataatatcgctcagcagataaacgtgccttcctgaccagtataaaaaagaaggcaaattttcagggaacaatgctttcatgaggaatccatttatgccgagtcaataaaccgtagttaaatcacacaagcagtatggctaaaaacttgatgacaacaaaacgaagatgatagatagatcactggttgatgcaagccgacgcttcttcattcaggattccagggatgtactcacacatgacacattagtgttagtgttagtaagagtttactaataaaatttcagtgagttagtaaaccattactaaagcaaaagacatgattaaatgatcgtccgattttcggttctggaaactagtgttaacctatctatcatgcgccttcttgatcgctaagagaaggtaaagtaaattgcaatgccaaggcgttccgctaacgaagtcaatcatgaaacaactctcaacaacattcatagtacaatttagcctaaagatatatatatattgtgcaactcatgcgtcacataacattgtcagctatataatgtaagtctggaactgtcgaaacatgaattcggcaataataaaaggggtagtgcacgagacctaaaagtggatggatacggagacaaggatttagacaagttgaggccctctcaatgagaggtaataccctactcctgtttgggaatttgaatccgccgggtgtagtatagatctgacgatcatatgtgctcatgccccctagagggcctcctgcccaccttatataggatggagggcaggattataagatagaaaccttaaccaatacggtatcggtttactaaatctactttacaatcttatcaaaccaggactttagaccgttccgtaatatacaaggaaacgtaatacccaagtcatgatatgttacatatttcatagatatgagttatctcctataactagtcggataaccatgccgtgtgggtatggggtacccataatctccacagtagcccctaagaccttcgcagtcgaaaagataatcttctcacgaactagattattccaaagccgagtgcttcaatcatcttcgctatgatctcccgagtacttttaccgaatcagaagaccgtggagggctgaaaaacaaagtcaggtgcatcgactagatgcacctaataggtgtagccccgactatgtggttaattgaataaaccaagcatacagtcagggaataaataatccaaccaactgagtggtttttgatcattatagttaaccaagtgacttgatatcaatatatagcatatgcggtatgaatccccaaataacatgatccaagtgatataccgactgctttgtaaaaattgatgcgagcaatctaaagttgactacatcattgaaaattcacttagcaaaacagctataaaaaagcttgaatgcagtgaataaagaaatttccaaagtattgggcatacaccatgcgcacactgctttaacagatgtgcttaagtccttaaaagacacatggtttcaccacacctggaaatatacggcatatgtggtgtaacatccgagtaaataaactcataaggatttaccaaccgcctggaaaatgaccacaatatataatcagcctaagccataatattggtcaataaaaatgcacacttacgtggcaaaaagcaatgatattgtatccaatcaattgcttgataaacccaaatagcgccttgactatataaaaaagtcagcggggtagctataaaaaacttcactgttgggcaccttttaaaatgcattgtaccaactcctaaaaagttgagtaactatggtataaaaagattttaaggtattgggcacttgatcacgcgcactttggcctaagcaaaaagtgcctaagtccctaaaagaacgtgacaggtcacacctgaaaatatgggctgcagacatattaggcctaggccaaaaaatatgccttcgacatcctttaaaggatgacgcatgtaacatgctcccgagtaataaatctttcgggtgatatagaccaagtgtagctcatatgaatagcttatgatctgagtgattatcccttatgggatactcccaaatagatataataattgaatcccgactggcgtaagtattcggttgataacccttacggggaataataaatagtccagtctttgagcatagaaaatattggtggtagtgaagataatgataccaatcaaaagtgatgaagttgcacagccgtggaggcgaataaactagtcgatagcagtcaggtcagccagcaatgaatatgaaggcgcccagcgataaagttgcatagccatggcagcaaaataatcagtcggtgacagacgaggcagctggtgaagaagatgaagatgcccattagcggtgacataataagtcatccgtgaaggcgaggatatcggtcggtggtgacgaaagcaagccgagggtgaagatgtagacacgcatcaaaggcgatgacgaaatccaccaatcatgaagatgaagaaaatagtcggcgacgacaaacgcaaccgacagtaataatgattagcagcaacaaagatgatcgactatgatgacgaagttgcccatcaaacagcagtagaataggctatgttgaagaggcttgacaggatattgatgaagatgacgatgtcggtaatccagtcaatagcagtgtagcaaccaatgataatgactaagacgctcatcagcgtttgcatagtaggtcaaccgtgaaggcgaaataacaagccagcaatgacggaagcaaccggaggctaagacgtagtcatccattagcaacgacagagatgtcagggccgatgaagtagaggtgctggtgatgaagtcagtgacaataatccatcaaactgttaagaagatatcaaagctcaagtaattttcttgatgtgtgcataacgaagattgatgcaacaccccttgatttgtaaagatggtagtagaacttggagttgtagctgttgcagatgcttcacttgaagaaaagtaaatactgttatccaactcatcaaaactgagctgattggttgataactctaaactcccggacatgtagatagaatctcaaactttgatacttggaaaaatttggagcagattgtggcggcgtgaagaagccaaaattgccggtgtaataataagagttgctgaagtagaacgtctgctctgaagtgaagaccaaactgatgactcccgaagtagattccatagaactcgttggctgattgattgattgcttcatcttgacataaagcttgtcgaattttgagagtcttgtatttgtgtagcccccgactctttggttagttgagaaacaactgaacatagagtcgagaattgtagcttcttgtcgtcgagtagtcattgcttgagtgaagatacgcatagaagatgtccgagtaaaaatcttgaatattggaacaccacttgttatagtaaaataacacggcattatacttgttgacgcatgccgagatgttgaggctcttgtagacgtcgtggtcggcgaagtagcaaagcttgcgaagtaaaggcaatagagtttgccggtgccgaagataataaagatgaagttgctcgaagaagtagagtgatgatgaaaacaaagacgttctttaaccgcggcaaaataggccagccatgaaagtgaagacgccatgggcggcggcaaaggcaaactggtgatgacgatgacaccagtcaatgttgacgaagacatgtagctgtggaggcgaacaaaccagtcggcgtcagacaaggcagccagcaatgaagacgatgacgtccatcagtagtggtagcggtataaaccagccgtagaggcgaggacaccagtcaatcagtagacaagacgactggcggtgaagactataaggccaatcaatagtatcataatcatgcagccatggaagtgaagaaaccagtcggcagcagacgcagacaacttgtgttgaagataacgacgcctattagcggtggcggcgacgtggccagccgtgaagacgatagcaccagttggcgtcatacgaggtggtcggtcggtgaagatgtagatgtctaacgacggcggcataataggccagccgtgcaggcggagacaccagtcggcggcggacgaaggcaagccggcggtgaagtcgtagacgcccaacaatggcggcataataggctggccgtgcaggcggaagcaccagtcagcggtggcgaaggcaagccggcggtgaagtcatagacgcccaacaacagcggcataataggccagccgtgcaggcggtgacaccagtcggcggacgaaggcaagtcggcggtgaagtcgtagacacccaacaacagcggcataataggccagctgtgcaggcggagacaccagtcggcggcggacgaggcggccgctcggtgaagacgtagacgcccaacaacggcggcatagtaggccagccgtgcaggcggaagcaccagtcgacggtggcgaagacaagctaacggtgaagatgtagacgcccaacaacggtggcataataggccggccgtgcaggcggaagcaccagtcggcggtggcgaaggcaagccggtcggtgaagacgtaggcgcccaacaacggcttcataataggccagccgtgcaggcgaggacaccagtcggcgacggacgaggcggccggtcggtgaagacgtagacgcccaacaacagcggcataataggccagccgtgcagggggaaacaccggtcgacggcggcaaaggcaggccggcggtgaaagacgtagacacctaacaacagcggcataataggccagcggtgcaggcggaaacaccggtcggcggcggcaaaggcaggccggccgtgatgacgtagacgcccaacaacggcggcataataggccagccgtgcaggcgaggacaccagtcggcagcagacggaggcaggccggaggtgaagacgtagacgcccaacaacggcggcataataggctagctgtgcaggcgaggacaccagtcagcggcgaacgaggttgtcgacggtgaaagcgaagatgcccaccaacggcggcgtaataggccagccgtgcaggcggaaacaccggtcggcggcggcaaaggcaggccgacggtgaagacgtagacgcccaacaacggcggcataataggccagccgtgcaagcgaggacaccagtcagcggtagacgaggcggccggcggtgaagacgtaggcgcccaacaacggcttcataagccgtgcagacgaggacaccagtcagcggcgaacgaggcggtcgacggtgaaagcgaagatgcccaccaacggcggcataaaagaccagccgtgcaggcggaaacaccggtcggcggcggcaaaggcagtgtaacgtcccgccttcccccaggccgggcccgcttatatctgatagctttcataggtcatataacgtcccgccttcccccaggccgggcccgcttatatctgatagctttcataggtcatagactgccctcacagaccaacacatatcttttctgcacactttgtcctcactcatgtgcacccgggttcccggtcggtcacccatcccaaattgctccaggcccagcacgcttaaccctggagttctttggagattggcttccggaaaagaagttgcaacttgttgatatgagtattctattaatcctattaagccctaggccgggatgttacaccctcacccccttaagagagatcgacgcccccgtcgatcaaccctaggccaggaacgtcctctcttggccacgtccatgtgtccagtgccagcgcatgtgccatgctgtgtaaccactccgggtctacaccagccatgcgcaccatgcctgcgcaactgcgacacacgcgcccgtgaaaccgcgagagtcggctctgataccattttgtaacgtcccgccttcccccaggccgggcccgcttatatctgatagctttcataggtcatagactgccctcacagaccaacacatatcttttctgcacactttgtcctcactcatgtgcacccgggttcccggtcggtcacccatcccaaattgctccaggcccagcacgcttaaccctggagttctttggagattggcttccggaaaagaagttgcaactggagttctttggagattggcttccggaaaaaaagttgcaacttgttgatatgagtattctattaatcctattaagccctaggccgggatgttacaggcaggccggcggtgaaagcgaagatgcccaccaacggcagcataataggccagccgtgcaggcggaaacaccggtcggcggcggcaaaggcaggccggcggtgaagacgtagacgcccaacaacggcggcataataggccagcggtgcaggcggaaacaccggtcggcggtggcaaaggtaggccggcggtgaagacgtagacgcccaacaacggcggcataataggccagcggtgcaggcggaaacaccggtcggcggcggcaaaggcaggccggcggtgaaaacgtagacgcccaacaacggcggcataataggccagcggtgcaggcggaaacaccggtcggcggcggcaaaggcaggccggcggtgaagacgtagacgcccaacaacgacggcataataggcctgccgtgcaggcgaggacaccagtcggcggcagacggaggcaggccggcggtgaagacgtagacgcccaacaacggcgacataataggccaatcgtgtaagcgaggctgatttgcatgtagattcgtctctctgattttgttgacatgatgggcttggtgcagccaaccggccttagaggtgttgtgtgtggcatgagcgaacgctgcatcatcaacatcagtagtcgagccacgcactatgtcctggcgtacccctctcggcaacatggttacagtaggaagcattgcaccgacggccatacatgcaataaaaaatcatgagaagattaatatgcgttagtaattaatctaaatatataaattacaaggaggtcaggaaccgcagcactgccaaatcccatcactcgttaatgaacgattttttgatctcaattgccatcctgggcatgcgaccaaccatgcatcgctccagtatacatgcaaaataaacaaatataatttgattagccttaaaatattacatgcttaactgtgtaatacatatatcaagctagggtttgatattaagccgtgcatatcagttgatctgcatgtgaagcactcaattgctgttgatcccatggacatgaattgttcccgtgtcgtatgaaggttacgccggtacctatacagatcgtactgggcgacgagaagacacaccgggacttcgtcttgatctcagccggtgcgtgaaaacaagaaaaagaaaggtaataggagattagtctgcagttagagaacaatctaactagtgaaacgacaaagccaatgacattggagattgaatcgatgaaatcaccgagattgatcccttcggctggattgaatccgagatgaaaaagacatgcttgatgaatctggtgatgtcgcacattggttccatcacactcgtgacaggaaactcgatgctcccttacctgacgcgccaactgtcgaaacatgaattcggcaataataaaagggggtagcgcacgagacctaaaagtggatggatgcggagacaaggatttagacaggttcaggccctctcaatgagaggtaataccctactcctgtttggggatttgaatctgccgggtgtagtatagatctgacgatcatacgtgctcatgccccctagagggcctcctgcccaccttatataggatggagggcaggattacaagatagaaaccttaaccaatacggtatcggtttcctaaatctactttacaatcttatcgaaccaggactttaggccgttccgtaatatacaaggaaacgtaatacccaagtcatgatctattacatatttcatagatatatgagttatcccctataactagtcggataaacatgccgtgtgagtatggggtacccataatctacacaggaactttttgtgctggaagtctggaacttggtactgttgaggatttccactggtgatgctagataatgtttcattctgtaagggtttggaacttttgttcttcttcgcagcaatggtttggaacactaatgtaatgcttgtgcactttggcttgtgatttggtgctgctccaaattttcttgcagcacaaataattttggagatattttcttgtactacgatattttctatgtacttctgaatcggaatcacattggtaacttcgatctttaataattttggagtttcaggaagcagaaagaagcctagtgttccggtaatgggctgataaatatattggggcaattgcaaatttgccacaattttaaattgttattgcaaaactaccacattcgaatagcattcttgcaaaatatcataaaaaccagagttgtaagttagattaagaaaaacaatggacaagtttgcaaatgccccaaacgtataagatttacataaaccctgtttacacccaaatttggcacctagagattaaataggagaaattgccaaagtttggaagtctgccggtttcctccgagtagggccggtctgaccgccgtgcgttgggctgtcagactgccggtttcgggccggtcagaccggcggcatgtggccggtctgaccggcaggtccgagtccgactgtgtttcgtcgggtctcaaggtttccttgctcgggaaggcatgtttcgggtttcctttggtttctaccccgagttggacgtggaggagggcctgtagagggcaaaaccaacccctatataagggatatggccagttcaattataactaatcaatctacaatcaatcaatcgaatcgtttttcatattgcttttaattttctcttagtttgtccatctttgtcgatttgcaccgaaaattgtccaccgccgctgcgagagtgcgacacccctttgttggtttatcctgaaaaccttccgttttgcccacgagacgggtagttatctagaaatcggctccgctagccggtttagttatcaaaacccatcttggtctagcttttggctagatcgaggtggttggcaactccaaatcaccgcaaggcgtttaggtgctgcgatcgtgcttgtcgacttttcacaaaaagttgccaacacgaattttggcgactccgctggggaaatccgttcaacgccatctcaacttcgacatcgccatgacgaagcctccatcaaccaaggcggaggtggatccatccaatgtgctgccggtgatgatggagagtcttgatgaggaagcacgcatggccttcgatgaacacatgaagaagtatgccgacgagcttttaaagacatgctcaaagacccgtcatggcgtagtcttcaagccggatttggtgtcttcatctacttttgacaaggtaagtattgaggaattatcacaatctcttcaacaacaagttgctcatacaatagatgcatctatggttgctttcaataacaaattagaagcatcttttgaaaataattgtgaaaagtttatgagaaataaactcggccctctcgtggccgattttgtaatcaaagataaagcctctaccagtgctagccaagctcctatagatcaaataaatagtaaaaccgatggagcgaagacacaacaaatcggcgagggctttccggcgcaaactgctgatcagaccgggccagataaagccactgccggtcagaccggccagatctggccgggtttcaccccggcggtcagaccgggactcaggccggtctcaccgcgcctatggacgccggtcagaccgggctctggaccggtcaaatcggcacaatagtgccgattcaggggatagattcaatgactaatgttagttatttgtattatcttagaacatttggtcctcctgtatctactgctgcaagtaatccccaagttcccccacatgttcctaatgcttataatgatgtttctagggggtatcctcctgatactaggcaaggccaatataatcatattgcgccacaacatcaacctattaggccaccaaatccaccaccaaatcaacataggcctgataatatagagcacttgattagtggaattattagggataaattcaggattgaagctaggaatcgtgctaaggtttaccaaaagccgtatcttgattactatgataatgtgccatatcctcgtaattatagggttcccgaatttaccaaatttagtggtgaggatagtaggactacatgggagcatgtaggtcaatttttagagcaatgtggagaggctaatagtgatacttttaaattgcgcttattttctttgtctttgtccggtactgcttttacatggtttacttctttaccgacaaattctattcatacttaggctcaattagaatagatatttcatgattatttctatactggtgaaattgagcttaggttatctgatttaacatcggttaagcaaaagtataatgaacctatcattgattatgttaagagatttagagatgttagaaaccgatgttatagcttgaacataactgatagagatttggctgatcttgcttttaatggtttaattactcctattaaagagagattagatggccaacaatttattgatgttagtcaactcatgcaaaaggctctggctcaggaaagccgggttaaggataataaaaaatctgttagaccatatgagaaaaagcctaatgttaattcaattgattactttgaggctagtgatagtgatgatgagggtgatcatgacatatatgttgctgagtggacatggactaacaaaaataagccttttgtttgctctaatttaatgccgactcctcgtaaagatcggcaaagtgagattaagtataggtttgatgtggccaaatgtgataagatttttgattatcttttgcaagaaaaacaaattagattacctaaaggccatattgtcagggttatggataccacatacccaatagtagttgactaaatctcggcaggacccaccacataccatgtcttatacggaaactgactttgagttggaggaagttctggataaggaaagacaactagagttctatatggaaacggcaaggactagtcggattgtatccatattggactccctagttctacttggacaaggggacacctatgggtataaatacaagaccccctaggaggagaggggacacgcaacaatagaaggaacaacagaagccaacatacgccaggacaagccgccggatattaacatcagagatatgcctaggaggaccctatctggtacctatggaggccggctgtagggatctagcgttatctctgatctcgccgggcacgagttcgaggaggaagactaccctgttgtcgactacgagttagcacttcagactgccaagtcgacaacagatagataggctaccacaaatattgtactggtgtgattatggtgaataagagcaacgatcggcttcggccaacaggatgtagggttattacctgacaattcaggggcccgaacctgtataaaaatccctgtctatctcttttacctcaatctcgcgtatatcctagtaccaacgatccccatactatgcaaataccggaatcgcgacatcaaacgttgacacatatcataccatctcaagaagaattgaagcgtcgagcttattgtaaatgtcatgattctcattctcattctactaatgattgcaatgtgtttcgacgacaggttcaatcggccatagatgaaggacaattgaagttcactgatggttccaagatgaagcttgatcatgatcctttttcggtgaatacaattaatttcaatgataagaaggtgttgattcggccggagcaagccgaatctactaaaggaaagggagtgatcattggtgaacctaggccaaagatgatagtgccaaagaaactggaggttggtgtatggaaggagaataggagtgaggcttcaacttctaaagcacctaggaagactaaagtgactttggacatgcttttggagaagtatgagaagcaaggtggtgagagaactcgcaacaaaggaaaaagaccaagatcacctcctagggagcgatttggtcattcaccaaaacggtcgcaatcacctccatatcatcattcacaagacatgtcatggggaccttatccaatgccgccaccgggttatccttatccttactacatgccatggggggcaacaccgccaatattcaaccatatgcctccaatgcaattcaactaagggtggggaggaccaaggaggccaattcatgagcgcttgtcttcaccaaataatagccggttttatggaaaaaatcgggttaatgaagaaaagagggaaggaaagcgtgttaaggtggaggcaaggacttcggaggtgattaccatcaaagtgggatctcatgatatgccaataccttctggagatggagttgggaagtcatcaagcaacaaatccgaaattgggaccagctcatcgcagttggccggtctaaccaggccctctggccggtctgaccgtagctctgcggaccggtcagaccgggccatcaggccggtctgaccaccgacccaatgtcggtctgaccggcgcttctagccggtctgaccggtggtctacgtccggtttgaccgggcttcaacgccggtttgacaggaggtttgaaaggagtagtgcaggggcttcattgtcttcaagcaaaatcaatagggggcattatttacctcctggaacagagccgaaacctaggtggatccctaaggatttaacggctactcaaaggagaaggttgcagcatcttcgggcccaagagataagagagaaaaaggccgaagagcaaagagataagaggttcaatgaattgcgaccaccaccttttggaggcataaatccgtagagagggaagaaccggttgttgtagaggagaaagaagaacaatcggttgctaaagatgagtcatctccaaaggaggacatggatatcaacatggtgtgtatgttgcctatggagttttgtgctatggatgaagccgaggttgctcaattttcactaggtcctaaagatgcggtttttgagaagcccgatgaatcaaaccgtcatatgaagcctctctatctcaaaggtcatgttgatgggaagccagtctctaggatgctagtagatggaggtgtcgccgtgaacttaatgccgtattcattattcaagaagttggggcgtgaggataatgaattgaagaagaccaacatggttctcaatggcttcaatggtgaaccaatggaggcgaaaggtatcttttcggtggagctcaccgtgggaaacaacacactaccaaccgctttcttcatagtcgatgtgcaaggtaactacaatgttattttgggtcgttgttggatccatgccaattgttgtgtgccttctaccttgcatcaatgtttgattcaatgggacggcgatgatgttgagattgttaaaacggatacatcggccgaggttgcaatggccgatgctacatttgaatggcgtcatgggaatatccaatgcttatcggggagggatctttctagctatgatttcattagtatctccgatggcaaatttgtacttatctctgtaaagccggctagtgtagcacggctaggctatataaatttgtataatgagtaaagaagctaatttagagtggttgcaaaagagggtgcaagaatatcggtctacaaagaacgatattggtgaaactattgaagattttgatgaagtagagaagcttggacaagggtttacatcggccgatccattggaggaaatagacataggtgatggaacaaagccaaggccgaattttgtaaacaaaaatatgagagccgattataaggttaaaataatcgagctacttaaggagtatgtggattgctttggatgggagtatcatgagatgccaggtcttagccgtgagtttgttgagcatcggcttccaatcaaaccaggttttaggccttataaacaaccacctcgtcgttttaatctttgctatatgatcgagtcaaagaggagattgatcggttgttgaaggcggggtttattaggccatgtcgttatgcggagtgggtttctagcatagtcctggtggagaagaaggggagtggtaagattagagtttgcatagattttagagatttaaataaagctactcccaaagatgtatatcctatgcctatagccgacatgatgatcaatgatgcctcgggtcataaggtgattagttttttggatggtaatgctggctacaatcaaatctttatggcggaagaagatatgtacaagacggcttttaggtgcccgggatttgttggtttgtttgagtgggttgtcatgacttttagattgaagaataccggtgcactatatcaaagggcaatgaatttgatctttcatgatttgctaggtattatcttagaaatctatattgatgatattgttgtcaaatcggatggtatgaagggacatatagccgatttgaggttagcttttgagaggatgcgccggtatggtttgaagatgaacccacttaaatgtgcttttggtgtgtcggcggggaggttcttgggattcatggtgcatgagagaggggttgagattgatcctaagaagatagaaaagattcgtgatttcaaagcgccgacatgcaagaaggaggtccaaaagttgctaggtaaggtgaattatttaagaagatttatttctaacttagcgggtaaaatcgatgcttttgttcctatactccgcttgaaaaaagaagccgattttacttggggggcaaaacaacaagaggcatttgaagggttgaagaagtatttatctactccacccgttgtgcgggcgcctaaagccggaaagcctttttggttgtatattgcttccgaggataaagtcattggtgctgttttgccgcaagaggaagatggcaaggagtatatcattacatatttcagctgccatcttttggatgccgaaacgaggtatgtctttatagagagactttgtctatacttatactatgcttgtaccaaattgaggcattacttgttatctagtacatgcatagttgcttgtcaagccgacattattaaacacatgttgcaatggccaattctaagtggaagaattggcaagtgggcatatgctttgattgagtatgatttggattatgaaccgttgaaatctatgagaggccaaattgtatgtgattttatagtagaccatcatgtagatattgcttatgaagaaggggtttgcttagttgaagttataccttagaagatttattttgatggttcttcatgcaaagaaggtcaaggtatagaagtagttttattttcacctaatggcatgtgttatgaggcatcggttcatttggagtattattgtacaaataatcaagccgaatataatgctttattattcggcttacaagtgatggagatgattggagctaagcacgtggaagcttttggtgattcggaattggtggtgcaacaagtcgccggaatctacaaatgtttggacggatcactaaataggtatcttgattcatgcttggacattattgctaatttcgataattctagagcaaatgatttggcacaacaagcatctggctataatgtgaagaagggattatttctgatactagaagagccggtgcttgatttttaaacctttgtgcaaaattggcaaaactggagaccaggggcggtctgaccggcgttgcacggccggtctgaccggtgagcaggggcggtttgatcggccacatgccaccagtctgaccagccaccccgggcggtctgatcggtcttgtatggctggtctgaccgattctggacagagcgatggggggcacgccgcaattgattcaaagaccgaattagctgtgaattcggacatttgtgcccagggaacagaagagtccagatcggctacgaccagatcggctgagtccaagtcagatagggttagccgatacagccgattccgacaatatgaatcggtttacattatcgagctgagttaatgtgcttcacatggattgccacacatggatagagttctaagaaggcaattgtatctattaattaggatattttatgtaatttccttagagataagtttgggcaaaagtctgctgcaaagacttatggtatcttagagtttgttagagataatagtcgtgtccgacaaaggacatattttgtagtctcgggtataaatagaccccgagtcccatgtaatcaattaacacacgttcaaatacaatcttggcgcatcgccacccttttactttcgttttgtttcgacgagttcttgctttcgggttgaactgcatcggtttcgatcttcaactagaggtatgacttgttatggtggcttgcgttctcgagattggtgcttccatcattatgatactctaatcctatctatgtaagttgttgagttatcatatatcttatataatctctgacaatatcgctatctaacctccaatcggctagtgtctatcgctggagagcagccgattaggttaagtatcgacgttggcttagattatataggatatctaccactttatgaagcttccaatagcttgattgcctaaatattgtctttcttttcatacttatggctgcatcagttgagtttgatctcataagtcgtgcttagaactataatctctagcctgcttcttggttgtcgattagagtagtatcggggtttcagccgatcttacctaatttagccttatatttcatgtgcttaattgatatgttaaatctgccctttatgttaagatcttattgcttttaggtgtgttaaactttacgtttgatatattttacttgctttaatatcttaaggtagagtagtatcggagtattagccgatacaagctagatctatttgatcagctatgctgtgaatgattatagtttccttgttaatatatatttcggtctaagtgatttatactgtctcggcatggcgaccgatctatcccaattacttgatttaagtatatatcgacatgaagattatttatcattgatatctacagccgattgaatagatttagtttctttattattgcctcgcacagccgatcgatgcaaagatgacatcggctcgagtacaaatgatacgtcatcggcggctggtcgatcggctatcatttatggactaactactatttctttgtctttatttcttgttgattgcaggatcaaatcaactggcatgctcatgaacctcaaaggcaagattttggacctgcactagagttaagcagatctcccaggcctcgtgtttttacatcaacactctcttggcacgcccggtgggacctgagttttcaacgacttcatcccgatggccgaaaaaccaccaccatcaccgggaacaggagtcaaacctcccgtaaataaaatgggggccaaaaatccatcagctgaagtggacccaaccaatattgttccaatcacattggataggctgacagctgagcaaagggatgaacttgaacagatgatgagcaacgtgaagaacaaattcatggattcttttcaggagacccgcagaggaaccatcgtacaaaagtacaagttgaaggtggtcgcagccgatgaggtcagcccaagttcatctcagggtgacaaaggtactgcaactggctcaggtaacaaaagtgatattcctcaagatggtacagttgaagaccttggtgcagatggcaaccaagagccactgcaattcaataattttcaagataggatcgactatgccgtgcaacatgccttgatcaatcagtctggagtattagttaataccttaaccaatatggtaaagactgttgtcgatggttcgatagccgaacatcaagcttcaggaccagtctatttaccaggaggtgtttttccaaattatagaccattggtcacagcaaatcagtcgaatgtctcccatgcattaccggctcagccgatggcttcagcttcaacttctgcacaagctacatcatcagtgtaacgccccgattttcgttcgggattaaaaatcattaaataatgcattttctagaaattaaataaaagttaaatcaacttaatcaagtgaattattgggagaattaaaattttcccttaaaaatcattggccgggaatattttgtaatatcctttgtgccctaaaatactctccggaattttccgtgaattttcggagctcaagaaataattttaataacacaaagatcattgtatcaattaaaataaaaagaaaacaattaaaatcctctttcctctctttgggcccctttcggcccaacccctcctttctctccctctcgggccggcctcctccctcggcccgctcggctctctctctccctcaagtctgttttgcctccccagccggcctctccctccctctctctccgacaggtgggacccgtggaccccacctgtcatccccaacctcaggccggcagctgccgttgccgccatggccgcccgagccgccccacgacgctgccgtttccgcccaccttcttcaccccgcgcgcgcgcgttcgtccgtgggacctcgccgcccacgtccgcgccgttttcccccatctctcccctccaaaaccgccacccacaccccacgatgccgcccacgcttcccggcggttgccgcccactccgccgcaaaatccgcaccaccccgccccttccgctcgcgcccaagtggtggaactgcacccccaccacctcctccaccgtttcccccatttccccccaagaaaacggcgccggtttgccccgccacgagctccacgtcgacaccccgcttcccgccggttgccgccccaaatccacctcgctcgtgctctctcccaccctctcgaggctataaaaacgatccctgtgctctcctctcccatttccccaattttcccgggcccgtcgcgccttctcccgctctccccgcgtgaacccgagctccgccgctcgtcgccgtgcttccagccgcacgccaccgccgctccagtcgcccccgcgctgcgccgccaccatcattggcatcgccgtgccgtgccgcaccccggcccctactccttttcccctctccgcctccgaaacaccactgcaccgcgcgcccgagccccgccgcccgccagcgccctccagccggccgccaccgtcactcccgccgtcgctgctccgcgcaactgtcaccgacggcttcgttgcgtcgtcccgtaccccggcatcccctccgctcctccattccgccgctggaaccgtcactccaccacaccacccgaaccgccatcatagcagccgcctccggctgccactcgccgccgctccaaaccatttccggcctcacgtcctcctccagtggcatcgcagcgtcgataggaagcccggcgttcccctcatccgagctccccgtcgccgatgcccgttcccgccacgcgaggtcgcggccgccctcgtccgcttcctcccgggcgccgcttgtcgccggagcagcgacgccatcctccgcccgagctccgccggccgccttccgtcgccggcgcccctcggtgaggaccccctccatctcctctccctttcccctcttttcgtcgcctcccgcgcgtgctgtcgcgccggtggtcgtcgccggcgaccatcgggccgtgcgccgtcgctcccggccggccgatcggtcagccggctcccgctcgcccgtggccgcccgatcccccttcggggcgatctgggccgtccacgtggccctcccgtgccgcccgagtcggtgcctctgtggcgccacgtcggcgccacctccgctagccgtccgtcgtggccgccaggtgtctgccacgtggtgcgcccgcggaccagcgcgtgcgtggactcggtccacggtgtgcccgccacccgtgagtcaccgacaggtggggcccgcttgccggcgccacctctcccccgtcggatgacgtcataattgatttaaattgcgcaataaatcggtaataattctagaaatccattaaaatggctcaaaacttccaaaattcatatctaattcattcgaattccgaattgagccattcaacttgcaaaattcatctaaaattgagctctacatgtttgtttagtttttatgtactgtttccttggtttttattagagtttttcctcgttttgcgtgccagcgtgtagaatccgtcgtttcggaagtccgcggtcgcgaggaaaagagtttagaagatccaagtgaagaagcaaggcaagtcacacattccccttgagcatgttgatcctaatttataaatgttttaccgtttacaaataaatatgcatgttttgctaattacacggggtcagggtttacctatctgctcgcttgtgccatgtttacttgatatctatcctttgtcaaccttgggtgataaattgactagctcgtgttacttatgtgacctagctagaactatatgcttagccatgcttaattaccactagctcagtcgatgggataattgcagtattagacattctagtatcttgttgagctgcgtgctcgagacgtctggccatgtttcatggtcgtaattatccaactaaaatacgactgaatggtgggctgtgggtgcatggttttgcgagtcgcacccatggcaattaaggaccggttcacgagaaaccctggaagacttacagtgcttaccacaagcgggagtgggtaactgcttgatctgaagtatagctcgaccctttcctaggcaccggtggcgagggtgggcgtgatggagttgggtcggccggggtgtccggttgtccagctgccggattcaccgcggcgcaagaggggaccgcccactgccttttgaggggtgggggtgaaaccttagcgtggtgtggatggttaggggagggttatgcgaagggtctcgtcacaatcactcgacacggtgacgtgtgcatcatgggcacatgatgacgcggtgacatgtcggtgggttgtgtcttgtgggtacagttgtgcacctctggccagagtaaaactattcgaatagccgtgcccgcggttatgggcgatcgaccagattcaccgtgattagtctcacacttaataaatcgacccaatgcactgtagtacaggtgggttggttgggcctgttcaacgtggtgtagcgttgatcagtggagattttaatgtcactttaattattcaacagttttactgtttgctaaataaaatgttttacaaccgcctttatgcaaatagccacaaacccctccttgtatccccttgcacgtccgcatcgttggtgtggcttgctgagtacggtggttgtactcagccttgctattattcccccttttcagaagtgtagtgcttctgagctgaagacgaagttggaagaccaaggctcagaccccagttgagttttgcctgtggagtggagctgaagccccgctaggatcgcctttttccgctgctgctgcttttgtttcggtgtgaggactaagtgcctcttctgtaagtattttacgctttatttacgtttggaactgtatattacttgtcgttttgtgtaccctggctggtcctggacagggatttaatacacaaaatagtctggaaatttgggctaaatttctgggcgtgacaatcagcaccaagacagatggttaaccccagattgttgaccagagaacaaccacaacatgctgggcaaaatgtcaatcggctgactcaggagcaagttgctgcaatgttcttgccaaatccgacaatagccgacccaacacagccgttgccgactcagcaagcacagccgaggtagcagacagttcatccgactcagcagcaaaacttacaacatgcgtcagcgagattgagaacacctgacaatcggccaatgcagcatactgtgaaccaagttattcctgaacacttggtccatcatgtacaggccgatcaatcagttgtgcctcagattatccctgaacatttggtacgtaatattcaaccgaacttctagaactatcaaggaagaaatttgaattatcaatatcagcctctgtcacctcatgtttagtatcagcaggcaggatcgcctcaacctcagtttgctcctcagttcaatcagtttgagctaatgcagcaacaaacacaaggagtacctcagcaaacatcatgggctgatatgattgccgatgtaatgagggagcaggttgggttcaaaccaaaagatactggaaatttgtatcggcatccttatcgaatatgcggcatattttttggaaattcggtaagtggtctcctagtagggaaggtccttatcgaatatgcggcattgttcgagggaacgcatattttttggagacacttcaaggggagccttttcagcgagcaatcaacgggaaatacttgaagaaatacttcccgagcgtttggcaagacgcttaggaggtgctatggccagtaattggattatcgccctaagaccaaaaacatgttctatgcttttggattcacgttgttcataaaaaaggtagggggggcatgtgtttacacccaaatttggcacctagagattaaatagaaaaaattgccaaaatttggaagtctgccggtttcctccgagtagggccagtctgaccgccgtgcgttgggcggtcagaccgccggtttagggctggtcagaccggcggcatgtggccggtctgaccggcaggtccgagtccgactgtgtttcgtcgggtctcgaggtttccttgctcgggaaggcatgtttcgggtttcatttgatttctaccccgagttggacgtggaggagggcctgtagagggcaagaccaacccctatataagggacatggccggttcaattgtaactaatcaatctacaatcaatcaatcgaatcgtttttcatattgcttttaattttctcttagtttatccatctttgtcaatttgcgctgtaaatcgtccgccgccgctgcgagagtgcgacacccctttataggtttgtcctgaaaaccttccgttttgcccacgagacgggtagttatctagaaatcggctccgctagccgatttagttatcaaaacccatcttggtctagcttttggctagatcgaggtggttggcgactccatatcaccgcaagtcgtttagttgctgcgatcgtgcttgtcgactttttacgaaaagttgccaacaaacccctctggatcagagcaaatccactcaactgcacgcgtgtgcatgtttcagaaacggattcatcgcaacagttggtttacgatttcgtaataagttgaaattagactcggattagatcggtttcatgcaattaattaatatatactaataaaatagatgatcgacaaagcatattactaattgatttctccgtgcaaaccggtcgctagctcgctggacagttgtcgtcatcaatggcggaagaagatatcaacaagatgatgagctccgacggggagatatcatcaatggcagagagggcggcgagtctgttgcgggaactgcggcaactgatcgaggacggctgcgccgccgccaaacccctcgccgagatggtcgagtactgcgccaagcacgccgccggcgacgaagctgaaggcaaggaagaggaggtattagatgatggcgagtccagcgacgatgaggaggagacggacatgctcaggctggaggccagctcgatggacgtggagaacatgctcagcgtggccgcgcagcgcacggcggagctcatcaaggacaaggacaagccgccggagccagagccgtcgccggagccatcgccggagaacgaccccttccacggctttcacagtttgcattcatttactgagcactgctacacggactaattttttttattactaaacttttactaataatcgtctcaaccatttgatttaggtatatgaaagttatgaaaaatcggcgtacactcatatagcgtgacacgtctaccctaaagttcaacaaatatctaccctatagttcaacaaaaacaaattctttcactcattcactcatcactcattctttcattcctcactcaacggtccagattacctcactctgatccaacgctccggattcaccccacctccctccccaccctgacagcccgacctggtgacctgcgccccctcccccaaccctaatccctcctcttcccctctcacgcgctgccgccgacgcccttcacctctctgccaacgccgcccgcgtctccgcgccgacgcagcccgcgcctccgcgcatcgcccttcgcctcgccatcaccgccgccgtcgattgcctccaccctctttgatgccctatccccgccacgcgcagctgcctcgccggggatgacctcgcgtcagtgacagtggtccagtgctcaatttgctgctcggtctgcgttgacactactgaggtctacggcgaggctactcccctcaggtcttatctcaatcccccgcctacggtggtgtatggttcgcatactttgtagtgtcctgttgaacttcgagtcatttttctcactaagaaaatggtaggtgataagatatcaggtacttcggttttattgtctctcaaacatcagtagttcggttgtgtgtttaaccaaatgaagcataatataatgtatattcttatgacaatgtattagatcgaacaatggtttttttaggagtattaatttggcactgttattagatccaacaatggtttttttaggagtattcaatttcaatgtaatctggttcttgatctacaaagggttcacgtgtactgtgttggcttggggtccagtctcctcctcctgcacgtgatgtgtgctgaacacggcggagaaataatggactgccaacatgatcggacaattcattgcttcctttagtttaacttgcagtgtgaatgattttcctattaagaacgcatgaagtcagaattaactgaaagaaagatattgcgtgtttaattaaactatccacagaatctgagtaattcagttcattttcttcacattcttttcaagaatagtctctgatatttcgtattagaattgcatgcatatatacaaccctgtctaattatatctgttcaaaataatttcagccagcttgacaagcaataatttctcaggaacctcaattggcaatatcaccacacttctaggaggaggagaggctgctccgcgggcttcgtagggatcccggcgagctcgcccccgtgactcctgcttcctctggtgtggctaaatcagttacggctcctctggggctttgcttgtgccttctgttctgattaggttaggacaaatttgtaacggctttgtggtctaacatttgctctgtgcggccgaattttttggtggccctataataattgagttcaactaatctaccctttagagcaactcaaatatcgatctgtcttttgttaatccaagcaacacatatgctgcaatggataagaacaaagaatatggtgctgttataatttacatgtttagaaaaaaaaactaatgcagtaaacacaattattcatggaaccaatgataatttacacttgctatggatataatgtcctgtatatttcagaatagagtaaagtgcacgagcggtccctaaacttgtgcgggtgtgtcacctaggtccctgaactctcagaatgcacttttgggccccttaacttatcttgggtgtcatataggtctaaatgggctccaactcactccgtgtgctaatgtggcatgccatggtagcgcctatgtgtcagtagaacccatatggcagcgatgcggtcacaagttccaccacggtgagtgcctttctgcgttcatatctccctgtactgatttgatcttgactagcataattatatgcctccctagaatttggcccagagaaccccaggtattcatttttttggcccacgaaaaaagcctagcccatcaaaacaaagaaaaccctaactcctctccagtctggctgtctcccccgtgcgctctctcccctcccactcgacggcgtcacggcgacggcgctcccatgacccggtgacctcgacgcgagccgtcaggctagccgccggcgtgactccggtgctcccgccgctcctccaggctggccagctcccgccaggccgccagccgcgcgcccatccgtggcggcagagccgcgccagcgcccgcgcggccgcgtcctctctccgtcccgccgcgtcgtccggccgtccaggggcgggcccaatgggtagtctaggtaggcccaggactaccctagaatttgacccagagaaccccaagtattcatttttttagcccacgaaaaaagcctggcccatcaaaaca

SEQ ID NO: 4529 - DNA, 16519 bp, Oryza sativa
gagggaggtgagtcagggggaggcggcggtgagccaccgccgcgtggggacgagcgccggtttgggggtgccgagcagcgcggcggtatggttaccgggatggtggatcggagtcggactgggccacgcgagcggcgggcgggggtagccgggtagggcgcggcgcgcagcggcgtttcgatttgggaattgccaattccactctctccgactgttaataatctgttcgacctcgaagcagccgtttgccgtatgtactccctcggtcatggaataaatcaacttctgaaatttaaactttttcttaaaataaatcaacgaatatagaattgaatgtagcacattctaatacaataaatctaaacaaagatatatctagattcgtacactagaatgtttcttattgtttttattttctagacagatagagtactaccttcttagagcatccccaggagatccttcatccggtcctccatccgatatatggcatatgcgagatgaaaatggacctccaacagatacggcattgagtccgccaaatatggacgatgcgccaaagcgagtagatttcggccaaatatagcgattctctctcctcacgccatatctcaacgcccacatctcccgcccacattcggactcccatcgcgacctctcctccatcgtcgtcgtcgccggccgcaagctactgacgccgagtcgccgcaagccgcaagctgtcgccgccgcttacgagcctgtcggccgcctgtgctgctcgtcgtggagtgtggagaggagggtgtaggcgtggagagggagaggagtaccagatctggaaggagccgtgcggccgccgcctgccgccgtcgccttgcgtgttgtcgccgccttccaccgtcgccctacgtgttgtcgccgcctttcgttgttgccctgcgcgcggccgccgcctacctcctctgcccctgcgcctgcccgccgctgactgcctcctccccgcccatccagggccctcgcccgccagcccgcctccgcgaccattgactgcctcctccctgtccatttgcgccctcgcccagacgtcgatcgtcgccccttgcccgcccgccaaccctcggccgcacgcccgccaccgtccctcgccaactcgcccgccgtcgcgagtagagaagagtagtagtagtagagaagaggaaataggaaataggaatagagtaaaaggaaaagagtagtagtagtagagaagaggaaataggaaataggaatagagtaaaaggaaataggaaataggaatattttttgctgtgtttttatgtacattttattttattgatgatgctacgaatatataaaaaaatgtttccctcaattcaaatatatcaattaaaaaactatcaattaaaaatatatccgttaaaatttactcgtttcaaaatattatcgtgataaataacaccgttaaaattaagttagttggaaatatatcccttaaaatacaaatgtaaagttagttggaaagatattcctaaaatataggataatgggatattctttttttggatgatactccatatggacatttgcaggaccaaatatagatgagctgctggggatgttcttatctatctcgattcataaatcgaaaatatttatttcttcgatacctctttgtcgatgagagatacctgtaaaccgaatagtatgggtattggggtacgttggtacgaaaatctacacgattcgacatcaagcaaataagaagacatggattatactgttttggaccactcgtaagttaatagtcataatccagtttatatgagattgatatggaaatccatagattataagagagaacaactgatcccaaagttaccgacgagatccttgtcgagatggcttcgacgaaattcctagcgagtagacttcaagttctctgtattgctgctttggtcgtgggttggctagtgctatgattcgatgccttggacccctcaggaggtgtctacttataccgtgaatctccttagtctccaagtataacttggagatcccggaccctacacgatatagtataatcctaactttcttcaagtagaactctgtcacgttatttgcctatgaggtttatttccataatgtcttgtcgattttcatattatatgcagaagtctatcgcacatacgaagatatgccgtatccgtatattatataagccgtaggatagaagatataccttatccgtagccataacactttaacgcgcctatccatcaatactaatttgctattaataaaatgcattttgttcttttattctctcctttaatttttgcgttggaatgctaggagtaacttatttgtgagaaaaagggagttcccataagccactaagattaattggatccgtacgattgtaagacagttttaaaaagtgccatcaactattaaattatttagaaccataatagtattacaatttcatagctcatttcaaaatatactagtgctacttattctccggacgcatttgtttcagaccaaattgcctccgtcttcttctttcatctctttctctgttcccccatctctctcctttcatggaaatacagcggcggtgaactcattctggcatcgaaccactggttctcgtctagtaggtggttgagggcgatgcagactttatacctctatttttatcaaatcctcatgaaattattccctaattttatctactcttaatgctattattccttacttacacaaaggccgagtttagttccaaaccttttcttcaaactttcaacttttccatcatatcaaaacttttctatacacacaaatttttaacttttccgtcacatcatttcaattttaaccaaacttccaatttcggcgtgaacaacacacccaaaatctgatgaatcaattactaaaaatgaacttatttttgaaataaatgggaagagccaaaagtgaaattatgatggaacggctggagtagctagcagacacaatagatcataaatatgggtccaaagtgcacacactctctctccttgaattagctactagtactctctccagccaaaatataacaatttaatactgggttgatcgcaatctaatactacgtatctaaatggtttagtaatatgaaagaatatggataaacccctatctaaattcgtaggactatattatatctagtcggactagtttgtcatatttgacaagaagtactaataccggtggagacttaccaaaagtttatagagtacgagaaaagcagatagtaaggggttttactacctattttatcattgtggagacggatagtaaaggatgtaataactccacttggcaagaagcaattataaaacattaaactcttttctcttttcaactgagagtgtatttagttcttttgggtgtaaagtttttgaagtatacggacacacatttgaagtattaaacgtagactaataacaaaataaattacagattccttctgtaaaccgcgagacaaatttattaagcctaattaatctatgattagcaaatgtttaatgtagcattatattgttaaatcatagcataattaggctcaaaagattcgtctcgtaatttacatgcaaactgtgcaattgtttttttttctcatatttaatgccccatacatgtgaccaaacatttgatgtgatgtttttggttaaaatttttgcctgaccactgttctacatatggatcgtaattttctgtcaacacattatgagagctagaaataactgtaacttgatttgtcttatcttaaaactcgaatattagagaagtacctaatatcaagtaattagaaggggtgagacttcgaacccagatcgtttagcccaccaccttatggagctagccgaaaaatccatgagcgattctctgatttgtcttatcttactactcactaaatgaattatacagtgaggaaagccttaaatccgacaatgccactacatatcatggccatctctctcctctgaaccctagaatccaacaatacaaccgtggttgtgtttagttcacactgaaatttgaaagtttggttgaaattgatacgatgtgatagaaaagttgtgtgtgtatgaaaggtttgatgtgatgaaaagttggaagtttggaaaaaaaaactttggaattaaacagggcctgtggctgtgtttagatccaaagtttggatccaaattttagtccttttccatcacattaacctgtcatacacacacaactttttagtcacatcatctctaatttaaactaaaatccaaactttgtgctggactaaacacaacacagcctttgtatcaccgggagcggagccctgcggcatgcattggccaagtggtggtggcgcaggccgctggcgttggcctttgtacagcgagacgcaggcacgcagccacacgcccacacccccacgctcgtggtggttttgaccggtcaggcggtcaaataatccattgcgatcacccagtctctctctccgtcgtcgtttctccctctctatcgcctaccggtctctccgtttcacacaatcacatcgctctaccgacttgctagtgttactccagctctgtttcacaaaccagcagagtgagagacggagacaaaccgacggaatagttgggatctaattaagcaggaggtttcctgttacgtaatcatactggttctactcccagattaattggtgatcagtactcagttggtgagcaagcatggcaccacctaggatgctagtggtacaatcacccgtgcacggcaatgcgcggcgatctgtgcgtgatctgctgcggtttgcccggatcaatcagaagcgctaccgctgccaagacccaattgatcatctcacatcgttttcttcccctctgcattatggtgaatgaatcacaccaaacctaatttgctacagcagaggaaaagaaaagagaaataaaaaaaaggaagcacaattaacaccggtatctacgtacagcagggagaaaacgatggcgctgtgagagtacagcgattacatatgtaccacctcacctaacaagctactacttacgtagtagtaagatctaatcatctaagtagcattacagcaaacaagacatcacagtagtgacagtactatgtgctaggagcaaatgctttgcttgatgcttccaagcaatcgtgcctgtacattgcaatgcagcttctcacctgcttgcttggaagcaatccctgcatctgatcaccgactgttcacgcagctaactgatgctgagtgctgccgctgctgcttgtgtcgtcctcggacaggaagcaatgcagccttgccgccggagcaggggaaggagaaggcggcggctccagctccaggcagagcatctcggactggagcacggcgcagtagtggccgaacgtctccggcgacacgttcaggtcgaagccgacgccgaagaggaagtcgacctcgaggtagttcatctccgggaggctgacgccgccgaccttggcgaagtaggcgttgttgtagcatctgcagtgcacgcatcttcttcagatcagacatcttgtttgcagaaacaagctaaagcttttactgttagtggtagtaggctaccgaacatatgtgcagctaacgtcaaactcaaaccagatgatataccatgggccaaaaaggcacaccaatcgagttattttctagattattatcaactgggcaattaagtggtacggttaatatcaactgggtaattatttcagaaacaagaagatttggggttagatgagatgctcctggcaggagggagttggggctaatgagcatcagcaagagggcaagttgacactgccccatcctaggctagctagctagacatcacaacttggcaatgaattaaattccaaaaagagaaaaaaggtggtgagagggaaaagggtggagaaaagaaatgaaaatcctatctttatgtctttgggtccccagtgtatgtgtggtttggatggaaggaacagtggaaccaccatggtttctttgttggacaagcataatttcgctgcccacacacacatatccccacagaacagataacactttggtgcgttcagtgtgaggccgtgagataatatatcaaatttctgcactgcagcgtgttcttctcatgaacagttcgatgaagttttttttttaacttttttcaattgggctgtgcttgttaggacttagggaagggtttattggtttctgatgtttaaagaatccactgtgctgatgcttcctagttcctacatggtggtgtttggtgtattcctgaaaaaaaaaaggttcctacgtggtactgaattccaaattttgatgacgatattatctcatcagaaggttctttatccataattcaccaagattgcgtactattgctcacacaacagtccaaatttggggttggcatgatggtattaactcttaactcccaacaaatacttggttgacagtgatttgaacaggcacaaatgaagcaggataagaattgcacaataatgtttggtccaagaagatcagcagctagactgaatcgtccttattaagcctaacaaacgtaattaggccgaaaaccaagctatctacacaaaaaaaaagtaattgttcaaagaataggccaattggcgtatttctgaatgaattgggaaattcagagtgatctacctagcatgttggatcaaaattcataaagaaaaacagagcattctgtttctgccatgttctggtccgggcaccgactggactactgtagccaagaacagcaacaccgcaaagaacccagaaactcgattcgatcatacggctatcgcatcaattattgcgtgaccacgagtggccgagtgcgaggcgaactcacatgtcgtccatgaacttgacggcggcgagcacggcggtgatgaggaggcggtgcacgctgtacgagtccacggagaacgcgcacgcgcgccggcggcggcggaggaggcggtcgaggtagatgtaggcgaccacgtagcacgccgggctgcaccccgcgaaccgcgcgatgcgcgccatgtacgcgcgcaccgtgatgtcgggcttcgtcgtcgcccggaacgccgacgccgccggagctcccgccaccgccagctccagctccgccgccgccgcgtcgttccgctcggtcacgcgctccaggagcgcggcgaggacgcccaccacccgcggcatgtccgccaggtcctcctcctccgccatgatcgatcggagaggatcactggactcgcgtggcgagttcttgcagctggtggagaggggagtggacctgaacctggtggatggctgaagtgttcgtcatataaaatggagggaatgcgactgcagcgcgcacaaatttctactactcgcaacggcactaccatccaagtagttttgtgaattgtgattaaatcgagcattttttcccagcattgggatctcaatccaatggttcaattcatctcacacctccgtacattgcatttggaaatattcgttgtatttttttgacttggttggtagcagtatatggctggctgttgatcagttaggtactctaggtagtatctttggtgaagtaaagagaccagaatccattctttactgtcaatagttgcatcctaggctgttctacttggcacattctgtcacaagtgtcaaaatgataagaggtgtgacgttggaagagctcgaaaaatgcacggcaagcgagctaagatctggctgcgagaggaaggagtaatgttcttcttacttctgcatatttgattccagccagtgaaagagtacagtttttcatcgtttcgtgttaattactcgaagaaagataatcatactcaggattgatcagccaaggacgtgctagtcacatattgacgacgttcttcagacggaaatgctgatcacgtatgcttggttaaaaggtcaaacgacaagtgtgcaccacaatacgcccttaagctataaacttctttttttcagattcgacacctataaactcatcctgatgtgcaaaaatcattaatagtttgttcttagcatttttctctactctatggtcgtagtagaagagaatattctcatgtcgctagatgcttggtatcttctgcctcgaagtaaattaatcagtaattatgcgctgctatgcactctggagtctagagcctgcttcgttttagtaatcgttaggattaaaccaaacatttttcgtgttcctgttaactttctcgccaactaatgagagaaccagtagaaggtctcgatcacattctaacttctaacgtcctaatctgaataatagtgcataagaccaggacataatttgattactcagaaccacaatttgctgcctgaactgagttccgttcagaaaagaaataaatgggccattattccattaataaagcctgaataaagtgagcactagatcgttcatatttacctcgctgttaatttttcacctatagctttagcagtgagctcgtgaaggaatctggccattagtttagtgctaatactgcatcttgatctgaatcaagcgaagtgactgcaactgcaaccaccaccacccctcgtgcagtccctctagtgagtgacccccacatgccctaattcgcactgtcatgagcaatctgcaatcagtcagatgaactgatcaggcaggtggttgggagggagatcatggagggcgacttcttggcggcttcgtggcagatgaggggagtaagtaatagtttgagacgaggtgaggagacgacgacgaacctctcgtgggagggtcgtctcttcaggatcaggatcgccgtcttcagacgtagacacggcggtgatcggcggcgctcaggcggacggatggaggagacgacgagacgtccggcgtccggggaagaatcggcgaggggcgctcgctgcatcccggggccctcggcgccagcggtgggccggccttcaatgtttccatacgagaattgggccctttgctgggccgggttgggccttttggccgagatgcaacatgcgaatcagactgtctataattgagggatgtaaaatggactttctttttttcttttttctttataaagtgttgccttgaattactttctgatattcacaatgtggtactacaattttatggtttgtaaaaacaaacgcgtttcttcagtaaggaaatcttctatcaaaagaacaagaaatgtctgttaaacttaaatctttttttaagggaaaacggcacgagattgtgccttttcattaaatatagcgggggaacttgtgccttttcattaaatataggggggaaaaatacagccctagagcaagaaaaagtaaatttctgttaaatcctcaataacaacaacgcatttactcattgtatatgtactagaaaataaaatgagccttgtacttggcggccattaggcgaatttacaactttcttaactgagccaagttgaactgaaaagaaggtatatctatgtacgccatgcgattttgtctaaggaatcaattgccaaatgcatctaccctgtctggaacagacacaactatagcatctaaaaagcactacaagcaagtaatgcattcattcaggatgtaatgctcatgagattgttgatgttctttcacaatcatgtgtcttgaaaggcataggtattgatcaatgacttgtactcttcattctcctcgcaccgtctacttctaagtacattcatcaacctgtctgcgctttctgcatcgtttttctccttgaaattcgcaaggaggctctcaacattggtgggtcttggtctccatttgcttggacttgcaactgcagtggctttctccaaacatgacagtgcttcagatgattgaccgtccttcaggtatgctgtgccaaggatttcccaggtgtttggttttggatttccacctttctcaacaaatctgttcagagtttgctcagccttggtaacaaagccttctctggcataccacgctaataaaatgttcatagtcttaggatcaaaactggaactcttggatgcccattcctcgtaaagaagttcagctccctcaatatctcctagcctaacaagggcagatagtacctcctggtaacccaggttatgaattgtggggaaagttgctttgtaccaattccaaacgcggtagacttcttccttcttgccgaggtggctatagagtgtcatgagataatgaaaacattttttctcccgtcctgtcgttctcttttcagcttctttcagggattcttccgccttctcagagttccccaacttaatatgcatactagcaagagttgtgtaagtagtccagtttgcaacaacagtctcatcgcgaatcatctggttaaagacttgttccattgcatcagcatcttgcatagccgcacaactctttatccaaatgttgtaagtgcagacatcaaaagcaacgtttctttccatcatctcatcaataagtatggacactttctcagcctcttcagcatccacataaaaattcatcaacacattaaaaggtaatgtatcagttgcaaatcccttttttctcatctgctcaaatgtgctttctgttttctctttcatcatagcttgggcataaacattgagaagagaaccatatgtccgcttgtctttcaatggatcaggaagctcctcgaagtattcttcagcatgtgaaacaccacgtacttttgcaatcagatccaactggattgccatatcactagatgagagtgaaaatctatctctgcgctctgtcatccaatcatacacctaccatgttcaagaaaagacctgatgagactaatacgactattaaatttgtaaggttggtcataaaaaaataccaaaaacaataagataacaagaagagaagacttccattctagaaaaataccaataagtaccatgattttctaccctcagaggtacaaagtatatgcacccaactaccttttcatgactatccagggattatattgaactgatgcattagtggagttattactgtccagggattgtattgaacttatgcattagtagagttactatccagggattgtattgaactgatgaattattagagttactatccagggattatattgaattgatgcattattagagtaagcacaaaactcaacaattctatatttacatatctgcaagatatgctttcatcactgaattcataattggtgatgatcagtggtaaatctactcaaaatactaccctagaagatcttaaaacacggacgaattccaactttgacccaaccttaactactagccttgtttcctaacttgcatttttcacacggcatttactagcattacttctacattaaacttcagactaagcagtgctgcaactaccaaatggcaactatctatgtactcctatagtcctatgcaacgttgtgcccatcagatagaaaattccccattttacgtctttagctaagctatgtgtatggaatgatattacaaacatcatcctgctataactcgacctaaagtacaatgaaaattcccaacattgtcggatctcttattaactaacccccccccccccccaaaaaaaaaaaaaacttagttaagaaaaaaaaagggggtaaattagtagtagatgtgcatacctggagcgcgaggttgaagcggcggaacttgcgcagctccctcgcgatgcggcagagctcccacttgtcgagacggcgctcgccctcatcccaggcccccagcgtgcgccccaccggccggccgccgtgccccaccgcgatgcgccggtacaggctgctccaccgcagcgcggctctccgctcgtagtccagcgcaccgtagctgtgcaccttcgccacctgcttccccgccgccgcggccgccgacgacgacgacgatggcgacgggttcgaggaggaggacgcgcacctcaccgtcgcggcccccgtcccagcgccgctctgcctgagaggggagggcctcgccggggccagggtggaggagccgaggatgtggagcagcatggctggcgtcgccggtggtggtggtggcggcggcagcggggagcgcgcgggtggaggtgcggcaaggaggggctctctgctcgggaggggataaaaggagggggtgggagtggagcgggtgcgttgagattcgtgcgcgcgaatccgcgggagtcggggcctacccctcgctgcctccgcatcttcccgcgcggatttgtattggtgggccgcgatccattattatatgggctgactacggcccatttggtctccatagactactagtgttagactatcggtcaattataattacagtttcctatctgaaaaagaaagctcgttccactcaaacaaaaaaaatggttacaggaagattataattacacgtcaattataattacacgtcctgattattggtttggataggatgagagtgatttctgattaggacgcaggagccaaaactgggctagggagcaactgtaacaaaatattgccaaattttgggagccaagcacaaagggaaaaaaaaaagatttacataaatgagatgctggatccggaatgaactatggagcaaacttgaacgaactcatgctaaaattttatcatcaagacgaacatatgccaaaaatggagaattatgtcatactccctcctttatgtatagagtgattttacagtcatgaggaggtaacgggggttactaaatttggtacatctctatagtactataagatactaaatttgcattaaaagatattggtacctcttaatacctcccaatgaccgtaaaattcctctttttctagataattgtcaatttgtcatactccctctcttaccaacaaactaagcaacattttgttgggatttgctaaccatcaccgaattaccgaacattttgtacttactaaatatatagtttcagcttttctttttaaagaaattattcatgcacatctaaaacaacccttgtcaaaggtagttgtcatttcgtggtccttgcgtcctaccacatcgtcttggctctatttgaaagtgcgttgaaaggcagagtagcagatgaaaaattggtggagtagcgaacatcagtgagcttagatgttagactttttgcctagctacgatgagcaaggaaaagattgctaggagagactcaaaagcaaggaaagtcttgtccaatttgcctaaagtcataccgagcaaggaaaccaaacatgaccgaggaaccacaacaagccaagcagtaacttcaaattttgggagattgttgacgagagcgtcaccgaaatcacacgcgatgttgctattttgaaccaagtttatgtacaactgtacataccattcatcaatgatatcaccaatctcaaatttcttgttcaagatgacctgccatcaagacaccatggtgctcaattgtaaaaagaagtgagcaaaccccaacactgattgcaacacaaacatgaactcctaataacttccatctttctttcctttttcattttacccataaggagattacctcttttccatacagccatgttgagttatataccttctccaaaagccatatgctacaaacaagcacaagtctactccaaaagcacagctagaagtgttagctgaacacacaatttttgccaacttggcagacgcacattgcctagtaaaccagggcgacgacgataagagcatgaacaaaccgcagaacgccccatcagtggccggtaaataaagggaaccatgatccagggaaactaaagtaaactacagctacttcctgttcctaagttgcttgttaactggaactggaactagggctgcttaaggcgcccctctcctccggcattcccagcctctgaggtggagctgtgggctactgagctcagttgagatggctggcaaagaagctcggcctctgggtgccgagcattaagaggaacatccagcaacaggtcttgatcagaatcagtgttggcatactgaggaggaaccagcatggatagtttatccgggggtaacatgaataagttaagtgctctgtcactgcaggctaaatctttgccattgcctggtttcggcataaacgacgcttggcactttagacccatagcatcaccatatttagaaactcttttaggactcctcatggttcctcttagttctgtatgcacaaaaagaaagaatagataaaaataataaagttagaaggtttctccatttcacttacattaagctaaggacgaaataggaaatgaatatataggatttgttttttttccaaatataagtaacagtatatgcaggtcagaagctgctgacctacggagctttggaagtgggtgtcatgaggccttttcagaggattcatggtggactttgtaaggcgatttgaagcactggtctttactcttgtttcttcactgtcttttccctgtacaaagggaaacaactatcaaaatgtgcaaccaaggttttgaagatcatatattcaggttagacatgttctaaaaatacatataacgataattgaactgagcaagaaaaagatacataagctggatacctccatatgtagggaaactaaaggtgagtttgcattctccagagtatcctgattttcagtatggagattagccctccaaaatagacatcccaaacaaaaacttccttagattggtccacaacaattctcaatataaactaatactcaatataaacttccgtgctaataaggatgtaaaataccttctagcattatctgatgtttgcaccagaaacttctttggctgttcagttataacattttggttgcttgttgccttgctttcactatatacaaatgagaccgaccctgagtaagattcactagtaatatatgacttattatcagcaggaatagagcttgcttctgattcttcctccagtgattttgaatttggtctgagaagcatacttccatatcccatctcaaaggaatccacaggagttgcactatggtaaattagatcctcctctgaggatcctgaaaggtaaagtagctgctcttcatgcattatggaattaagatcctttgcaagtttttccatttgtgaaggcttaggccgagtgacacaactccttctctttgatggcacaagtgattcccaagcatgtgattgtgctgaagctgaattggcaagatatcagataataaaattattaatatatcaaacaaagttgtaagagaacagctaaaaaacaattctttagttacatacggaacctcgagaatggaaactaatgcttatggttggtggagtaatatcccttttctgagggcctttattgtgcttcatcatactaacatgtagtatagaaacacatatattattaatgatgtttcatatgtactggattactggtctttactaaagcatgattttcaccatattataggcttgatgctatctgaacacaatgcatggacaaatttcttaatgatataacaatcagcataagttattatgaattgataatgctggactaaagaataaaccaacactgaagaggggttgccaaaaaaaaggttccgatagctttattgtgtccaacgaaaagaaaaaatcacatatgcattataagagggtagcactgcatgagcattacattggagacaaatgttaagcaatgtacttctgacatcaatctcaaagctcaagttcaattccttaaacattatttgtttgaactgaaccaaatcatatactatatggtacacatcaagaatggaaagaacaaaaaatgttttaacagaaacacaccagggaattggagatcactcaccagtcatttcacttgcatcagcagtgccatagggggcacaactctctgagtatgatagtgctgatccagaaccagatcgattacttaggtcaggatctcccatcttacggaagttttgatcagaaaatggtccattctccattgtgatgtggcttggatttttcttcagttgcttctgttccttcagcttcaatgttggaggtttcagcttgctagctctaggttcctcagcatcaatatcatcccgagcatgcattggtgtgtaattcgtcagcgaacccttagttctccatcttgagccacatgcattgcagagcactggcttatctggtggcccatttctccagagaggagtacctgttccatcatttcccataagtaacagtacaaaattgatttgcagtaatatgtgtggtatacaagtatagagtttattagtagagtgtccataaggaattcttatcacaaatttagaagaatcatgcttgtgaagctacaggataggatggcatcagggaagggaacttagaagaataatttgtcagtgacagtgagtgattactgattagtcacatacatactcaaattgcatctttcagacgttatttttaatatttagcacaaccatgtag

SEQ ID NO: 4530 - DNA, 31246 bp, Oryza sativa
cctcttcttcttcttttttttccccttttcttcccctccaccgacgccgcattccgccgccgcgccgccgctgccgtgccccgagccccacgacgccgctgccgtgccccggcgcctcgccgccgccgtgccccggcgcctcgccgccgccgcgccgcacctcgccgccgtgtctccaccgccgtcgccgccggtccggtaagccctccctcctcccttcgtcgctggtagccgcgccgcgccgtgagagagggagagaagagagaaaacagagaagagagagagagagaaaagagaatggaggagagaggttagagtgggccccacgtgattagtaaatagtaatcctccccttgatctttattagttaagtcccttacatgtggggtccctatgattaaaatctatgaaaattcacttatatatgttgtgtccatggcaggccggtcccacaggttagtcaatgtaaattatggaataaaaataaatgagttaggaacagtactgtttcgcaattattcaaatttgaatatttaaactagcataactctctcattttaacttggatttgagtgaaacttgaacctaaattcatataaattcataagctttccaatggtatataattcactatttgataaaatatatttataaatattaaataattaatatcaagatgatgcataatagttaacttaaaaatgtgctaataaataaaattgatattgtaccgtaaagtagatgtcaaataattgtccttaacacgcttcctcactataaaacctatgtaaactagttaggagcattgtttcaaattaattaaagcataggaaatactagtgccatttattaatatatgtcaatatataattatactcatgacgtccaaattgtatagcctcatactttgtgagtaaaagttgaacacatgtagatgagtctttaaattgtttatgagaaataatagcagagcttgtatgattaaatcaccaatatgaaattaattaacgacattccctatacagtagtatatgtttaggttggaaatcgacccttaagttgttagacagtaactcactcataaatccacttaaaatcacatgtactatatagcttaaagtaaatagcagctatttaaataaattattcaatattaagatattgtgcactcacatatactgtacagtccattatagctatacgttgtagtattaaatcgcttgattgcatatattaaaattaaagaggatatatgacaaacatgtatggtggataaatactaattataaaccttgacctaatataacacaagttcaattgtagattaggattattcattgtaaaattatgtgatgggataatctgtaactataatatgattaacctaaacaactttaacatacaaagcatggataattattaaccttttataatttattgtgacaagtaaaatatgttcataattaaagtaaagcctccatcaactaaataataatacaaatgattcattatttgattgatcctaaatccatctaacaacagaacctctaatatataaccgtcctatttagatatatgcatatatagccataatccttcgatagctatttgatagactaaaccaccgattagccaaatatatatatgtatccaataaatgctatgttggttaactcctaaatagaccatgatgacaatagaaagattaagaaactttagcccttagcatgattggaatccattagcaaacacgaatataacattttgttgtgcacatttgattgttgtttgaatattggtttttctcgcttattatagaaattgtgtatcagttagtcgtgaggcaacgtctgcagcctccaggaagtgaaggttgatcaagaattatatcaagaataaggactatcctgagcagacaagtcattactattccttgaacatgttgataccaattgcaaaattattttgtttacaaataaaaattgcatgcaatgataaacatcctacttgcgattatgccatgccttgattattgtttacccccttattccttcgtaaccatgtttacgtatgagtccctagtcaattatgacaattgcttagaaatgctattttagaatcatgcatactcatatttatcaaatgttatatgcttgggcaattacctttgggaaggtaattgagatgcggcatgtggagacatgagcgccacattgccctgatgttgatgacatgatttgtggaaggagaaataaaattaaacaactgttttcggctggggcggacggaggatttgggtggtatctggaaaatgctagcaccgtccccggtcaattaaggaccgagccatgaagttaagcttgaaacgacccccgtacaaccgcacttctcgtatgggtatagacctagcagaatagatagctgagcggaggcagtatccatgcatagtggtttcttgatgtgtgaggcaggggctctacggtggggcagccattggtagaaccgcgaggcgggtgtctacagtggtgtcaccatcagtaggactgccatgtgagaatttaaacataattataacttaatgcatgtgtgagtctttccttcccgggtgcgccagaactcctctcactgctagaaaccgtgtacgcctagagtgcatgaggatgtaaagttcatggagcgggtactgccaatgcgaggttgtcgaaaagttttgccgtgacacatctcatgtgttgggacgaggctcatgtgttgggaagtcgcggagtgcgggtaaagtgtacatccactgcagtgtgagtaaaccaaatctattcgagtagccgtgctcgcggttattgagcaccgggacgtgtattacacttggctagactctaaattcttaacttgtgtaggatgggttattgcatgatgattttatgctgatggagccacttcctaagaggagggaaggtggacgttctcagaaaaccatgacgactcaatggcgggaagctatcattgggatcacaatggatgctggatagaaccgtcgttgtttaatgtgaacactggtaataaaacttgatcagtctatgctaggtattaagcttgtgaaaagaattgtaaaactagctttatgcaaaagaacctgaggccattccttgaaataccctctatcatatgcattgttgttgtggtggcttgctgagtactgttggtactcacccttgctatttatatatcttttaggagagtgttgaagagaagcccttgtcggtacgcttgcgtaaccaacaagatgatcggagtgcggtcttgttctaggtcttgttccccagtcgactgcctgtggcatgttaaccgggcccttatattatttttttgtcttccgctgttgttctctgatagttgttggcctacctggccctaatgtaagtatttaactcttttagcttgaattcattcgtgatatgttgtgatccaactatgtatgtgtgtaccaactactgatccagggattggtacggataaacacagaagatttccgatttccaaaaatcgggggtctacattagagctcttgctacatttcctccaaaatccacatgcaatgtgccattccataggaatttcataggatttagaaagtttcgatcctttaaatcaaagggccaaacatgaaaatttcctataggagttatatcctatgaaattcctatataaatcctttgattcaaagggggcccttagcctttcaaggttttagtcttgtaatttttattgctctattcaaagaaacaatatgcatgcatatttgtcttgtgctattcgttttaaaaaaattccatgttccacgatggatgaagtttctacgagtagatgcttggcatttgacatctcttaaccacaatatggcagtgttggagatgaagactatggttggtttgttgaggctttacaccacacttttgtgaatgaagttttatagcttgataggagtaagcgcgagcaacatgattttttttttctaaatgtaattctctaagtgctaagcctcgggtactgttcttttcggcttatcgattagtatgcattatcttggacacgcttcataagttgttaaacaatacgatttatttgcaagcattcttcttattatttatttgaaaatgttttaaaaccaacttcttaattttctaatactggccttaaataattatcataaactcagtttcaaccacaatccattatatatatcaaatggaacaccaaggaccacattttagtgagaaaatagaatattttccactttaaaacttgtcgccttcaaatactagcactttttttttgttacgaggggtcctaaaatgacgagttgcgacatgaaagcatgaaaatgtacatctcttttttatatatatccatgcgacgctgaattgctgaaacaaggagattcgaattgcagagctcctggattttgtctcttgtgccaatcaacttctgaagaacaaggctgtcagaatagggatagtaggtaggagtaggatcgtttttatcataactgtatcgaattgtagaatcggattttaggatcatgatcatatcaggttaaagtacatattttcacatataatttgttagacattatattaaaaaccgaagcccataacattgatttttgataaatttaattttttgaaaacttgaatagacttattaacattattttcaattaaatgaaacttaaataatatatacatatcgtaaaaccaggatcctatataagattctaacgatcccgtaaaatcgtgtggaactcgcactaatttaaaatagtatgaaaagtaggatacatggtaagatcattatcttaacagcttgccgaagaaaagagagggacgataatctctttatctagcagtgactttcggactggctatattatttggtcgtccaaacgttgttagtatacatgacaacgctggattgctggaagcaattaatcgccttgttgcagaggattcaccaagcagccgttcaacctgctttccatctcaaccgtccaaaaccaagtctttatttggtaatcagggaaatggaaaggaaaaggagcaccgaaagtcaatggaagctctagcctgcagtgtactgagcgttgcggttgaattgaattgagcttagcttgcaaacctctataattgtctgctccgtcatgcctactacgtggtggtcacatggaggctcagataataatatcaacttcaaaaatgagtaagcagcagcattatatatgtatacagtatacccagatgttcatgttcctacctactagtagtactgatcaatcagccaaacaacaactaccagatacatgtagcagctcattctccagttctatacagttgataattcataagtggaaaggtttgagctattggagaacaacatcatgtgtgatgattcctatgctcgtttcagcttccatccatccatcaaaactcaacgatggctgtgtttagttcagcgcaaagtttagattttggttgaaattagagatgatgtgactgaaaagttacatgtgtatgacatattgatgtgatggaaaatgactgaagtttggatccaaactttggatctaaacacagccatgaagtacagtatatggctggctggctgctgtatggcctccagcccttcctttccatttattcctcgtttgcaattcattccgtctggccgtttgggtgctaaacccagcagtagcatggcaaattctggccaagggacagagcaacagaaactaacagggaattggttattgcaggacgcatccctctccctctattcccaaatgagttcctcctgtccatgtgggcgcgatggaatgataggtgctacgcgaaagcgaggcacttgcttacgagggccgtaatgattagcgggttagcatgcactcgaacggcgaaacacgcagttcctcactcgctcgcggccaggtatttttggagcggcgtgctagccgtagcctcccgtttctttctttccaatttttttttgctgggtttgcatgatggatcatggcggaaagatgggtacggattgcttcctctcgctctctctttttttgcctgtggtgtcttgctgcctgtactatctgctgtgcctgttacttttgaccactttaatttacgcacgcactgtcaccacacagtggccaggagtatctagggaggtatatagggagggccgggggagactggctttacagtgtgagcaatctttcccttggaatacaatcattttgatcaaaatctgacgaagaacttgctaattctatcctggcatgtgtgtttctcaactttctctccgtcaggtgtctggctgattactgatatgggcgaattcgagaggacagttatccagcttgaggatgtttcagaatttcagaatatcaagtggcagtttaccaacgttgctacttcccccctttcacaatgtaagtcattttagtattttccacattcatattgatgtgtctagattcattcgcatcaatatgaacgtggaaaatgctaaaatgacttacattgtgaaacggaaggagtatctgtaagtgggtctagattcattcgcatcaatataaatgtgaaaaatgataaaatgacttacattgtgaaacggagggagtatctgtaagtgggtcgggtcggagaggtgacaggagtgacaccgacggcgaaggcggctatctccctcgtcgactcgtcgtccctccacctcgcgcgctctcgctgcctcggccacttgacgaagagaaggggtcaatcgcagatcacaccgtgcagtatataactgatttccgtttacccactggaggagataagcgatcgattggatcggtaggtcaccagcaaatcagcgatgaagtcactccatgaggcgaggcgtatgtgctgcatgacacatcggcacggagtggttgctgtgggtgatgcaactctttttaggttttactcgtgtcatcaatttcattttccgttcggggaggtatgcatgcgtgttccggagaagacgcatgatatgcataaagacgtcgctgttcactgttttgtagtagtttgtaccgtcttctgcttcgtctgtactctgtatatattggagctcaaaatattcccgggctctgaatacaccaagctgcggcctgcgagcactgcagactcatgctacattgtattaggatttgaaaatacaagataaagaagtaatcaaactgggtgtttggtctagtggtatgattctcgcttcgggtgcgagaggtcgcgagttcgattctcgcaacaccccctcgatcagtgatcatggtgttttttgctgttgtcgcattgctttcattaattcggtcagtttgtgaggcccaaagcacacaaccatttcgataaggctctgccgactggccactgtcccaagtggaccatccgacactgattaaacctgcaagaagtggtgggtgctaaactgataatctaatgcactgctaactctgcaacatgtcgatactagtacttcgttttgcacctttggcgttttcactttcacttttacaccgattccgtctgctcttcttgaacggggtggtccagtcaatggtaattggtaaatctaagcattcaggaaaggattaccgcccttagttagaagttggaacaccttctcgccagcagtttcgtctgcttgcttacaggaaacgggccggattctggtggaggcatgcgtgaagccatacagaatcggtctgttcagggcatcgttgatctgccttgacaaagctttgatttccacgccatcttgttcccatcagcatctggaacacggaacagccacagcccacaagttacgagcatgaaaggttaggttagtctgtttaattttcttccagaatccgatggtttggtagcttcaggttgaccgtttcacctccagtagcattctcttttggattggccattgtgtatacacagggataaaaaagaaggttacgaactgcctcagtaaatactttactccctttggaaaccagggttcaactatgtaaggccctctagtgccaattcagtctaccgaaatgtcttacaaactataccattcaaaacttgtaaataacacgaagtgtagtctatacacatgaatcagaaagcatcacgtggaagctataagtgggggcaaagaagacgaatatactgtttcaacatttgaaatcaaaactacacacatttatcctcgaactcctagaaaatatgtggaaccttgctagctagaactcgctctcgtctttcgatataaccatgtgggaaccatcctgcttttcccttgcattcgccttctgcccaaccattggttgatatctgtgttcggacaagaccacattagattactgacagctcaattatgatatgttagctgccaggaacttgtatttagaaacatcggaacaatatcggcaactcaattgaagattacaaaacatggacagcagaggtatattaccttccggacaataacaatgtctccagctgacaagttaagctcagactcactttcagccttgaaggaatcaagggcctgcatcataacgaccaaacaatttatgtaagaagcataacatcggtaaattcatgttcatttggcagatggtgcaatagattttgcatgaaaagaatgccagacctctcctaggaagaaatctacagatgtcactgaatcatcgacagaggaggatgcaaacatgccattgacttcgtcataagatggtggtggctgtgccatgtaattttctgctgatggggtcggaggtgcttcaatcttttgacgctctgataccatctaaaccaatcaaaaaataatcattaacttgatgaagataggacttctgcacacttgacagtgtgtgggctgtgtcaacaggccatgttttaaaaaaaatgtaaatagtgctggagtatacatacttcttgttccaggtggtcaaggatctccagaactctctgatggtaggctctttcggcttcaaccttcagagcaagactgattagcagctatatataattttcagataaatgcaatagcatgatgcaccagaaaatgtaacgttaacgggtatagctcatggttaccatcgcaataaggcgctgtaatgtcaatctttgttgctgagcctcaacggcagccattgctgcaacagcttccttccctaatcctaccatgcttgacttaagttcttcaagtttgtattcagcagcttccagctttgttatcacatctccattcggagctgactctcttactctgttttgccgtcttgaaacttcaacagcctaggaaagcgaacagaaaaaaataagctaaacagttcagtttaaaccaaaaggtcaatgcacagaaaaggaacacaaattacttatgttttggaatgactcaactaatcacatgatctgagaagatagtaggatcttagataacaaagtctgcgtgcaactgaaggcaacttggcaatgtcactggtattattgctttgcaacttgcaagtgaccatattttagagtttcaagttatggagattctatagataaataaggtcgacaagatctggccgtacacataatatagtgtgatgctttccaaaatattgtgatgttgagaaattttgggatagtcctggttctcagagaattcatagcatttttcctttcccaataacagtttctccactatgcatctgtaagccttgcggtacaaggaattaggaatgtgtggaagtagaatcataaaatacacaaactatttttttaattgtatagcttaggttgctcgtcaatggatattgtttcaaatatgctgtaagtacatctgagagcaatatcctgggatgttatataaccttgaagagacttaagtaaaagttatacactacttcacctgggcttcagcttcttgcctcattcggtcatatctttgggctagatgtctcgcatcttctaaaggcgcacccatgaccattgctcgcagtggctctgccacctacaatccaacaatctcttactgaagttatgcgttctattcacatttatcaataccataagaatggacctcattgttctgcacatagtaacaactagttgcacaggtaaactactagtatgctaatcatacatgtcataaggtaaaaaatgtcgatcaacatgaagtcatgaacagacctgtgtaccaaatgctctcaacatgttcccacgttccttttccatcagagaacgagccttcccatagtacatagcagccttggataaagtgttatcacttgtacatgtgtttccagtgccatatttctggctatcgtcggacaatttatttcctataaatttaggttgcaactaatcaacatacagtaatgtaaacactgagtaattaatattgtgtcaagctaaaattattctgataagctaatatatagttggagaaacatacctatgtcaacttgtttagatccagtgactatgtatccctccacaccccggacaatgtccctttgaaaatgctggccaaaagatgccaatgtttatcaaaataatctaggtagaaaggaaagagatactgtttctctaataaatttgtcttgctcatactttagcagcacgagttgataagtaaagtttttccagcctctggtgtagattaacttctgattcatctgtaaacgcattttctgaatttccataggcagctccaaatggcttaaacacgccctgcaatggtgtagacaggtacaatgttacatggttcataccaagattaaaaagagctgacttttcgatgcagttaaataccaagaaaatatcccacaacatataaagataatgcagtatatattccatgtgaaggcagatatgtagctggcatttaacagccctagagtttccagttactttgcaaatcgcagacattagtaataacaactcctaacattggaacatccgttttcaaagactatatattccaggcaaaactcatagcaaggaaatagtagtataggcctacagtacgaaaccagaacacctgaatagataccagatattgttccctactttgttgtgtagactgctaatcttagctgtcttcctaaggcagtgtaactcctttcggccaaccctcctatgtttgtgcaagatggatgaaaataatcaaggcggtattactcaaaacagcaaattcgggtaggtcatgtttacatggttctatatttcgaacaggaatcacgagcaacgcttttaaatagaaaagccacaggttgctaatagcttaaccagattgatcaaccctgtcgtaaaatcataacctgatgtttctcatctcagggattgcaaacacgcgcatcgcggtcccaaccctcacaattgtttttttcgagagcaaaagcttggacctccccctcacaattcatttcaccactcgccagcatgaatgaaaatcaacctgagacgcctaaccatagacgagtacggtagcctctcaaaacccatcagcatagacatcaaatcaaacttatatagagaccggatcgaacaagacagacacctgagagggatcgacatcgacccaccccggttgcgcaatcacaaactcggatcgatcgagaaccgtactaacacaggagttcaaagagatcgagggggatgggagagcgtcacctggcgggagacctgctccttgagcctggaggcctgcttccacagcgcctccatggcgccccgtctccgcctctccggacgcaaaaagccgcggcgcgctgaccgggagaggggaggacggccgggcctgccgcgtcggtagcctctccccgttttccccttttttccccctcctttttcttcgtttggttctcaggctggacgacgacgacgaggggttggggaaggacggctcgctagtcgctcctccgatgttagtttctttctcgtggtggttggcttggctcgcgcacggccgacggtggcgcacgcacgaaccgcgtcctcttccgcctccctggcctataaacggcgctgtcgtcgcgggcccaccagtcggtggaggtggcgggacgagccctacgctgacgcggctgggcgtcatggctgcgttgaggacgacgtcccccggtgtggcactgtggcccgttccaaagaggaaaagaagtactcgtgtggcccattgaccgatactctatgtggcgaaagataccattgaccaataatgggccagatatttgcgaactggacctcaccacagctagaaggaaaggaaaagcgagaaaggaagggttaggtataaaacgggcctaccacctccacggagcacactttcgaaaggaaaaagtacacataaggtcccttatcttgttgctgagttataaaatcgccctaaaccggaaaatcagacatatgacatctctcaacttataaaaccggatcactttatatccttaggcagtattgactctggttgactgcaattttatccgatgtggcagctgagtcaatgtgggacccacatgttagtgaaacacaactttttcttcccctttcccctctcttccctcatctctttccaatgcgtgagtggtgccggtggttgcggcggagagagctcacgctgcgggagaggaaagggttgcggcggcaggtgcatgccgtcgtcgacgcggcatgttcgtgggaggcgacgcacggtaagcctgtggagcaagagcctaggtatagtagcaggaggagcccaaggggaagcggaggagggaaaggggaggatagaggaagttcgtcatcatcatcgccgacaaggtgggggtgatggtggtgcatgtggtggaaaaggtcacgggcggaggaagccttgaccggcgacgtggtgtgcccgctaccgacaccctgctccacaccacttactcctgtggcgcgagctctctctgtcgcgaccaccgatacaggagtgtcgtggtgtactgcttggcgaggaacatgtaggaggaggcggtaggcgacgaagagagagaagcggggaggctggtggtgagcgatggagagggaggaggcggggccggtgaactcgcctgctctgcccggcgccgaatggcgaggagaagagaaaacaagaagaaagaaaggagaggagaaaatgggaatgaggatgacatgtgggtctcacaagtgtcccatcatttatttattagttttctagtgtaaatgatatgtgggtcccatggttttcattctttttctcgtattgaattgttacgtaagcgccatgtcaatgtcacataggatgaaaactagtcaaaggagccacgtagacgctacgtcagccaaaaccggaggataataccgctgagggacgtagtttatattagttttgtaagtttggggatgtgttgtacctgaatttgctgtttaaggatgattttgcaattcagtgataagatgaggggctttttgctttccgaaagtctttgtttcctggcccaggcctctctctgagcaatcaatccggataggcacgaaaatctttgtcatctcgcgcgctttgccagcaggcagtagaacacttgcattggctaaaacagatcaggattctattgaaagacagagggtatgtctagattgtagtcaaaataaaccttaccaaattttaaaaatattaaaattttggtaagatggcaatattactaaaatttattgtcaaaattttggcagaatttcttatatatttatcaaatttagtaacaaactaaacatagttttttttgacaactttataaaaagaatgatatggttgaaaatggcatcaatctgaacagcccaaaatcaagaggaaagttctgatcgtttcaacgaggaagagcccaaaatcaagaggaaagttctgatcgtttcaacgaggaagaggacaaaagcaggcttttcccccaataatctgggagtaaaagcaggcttttctcccaagatgcagatcagatcgcaccaataattagcgcgcgaatattcctatcgtcccgcgccgtgaaagcgtcgccgcagcctcctgcaagctgtggcgccagccagccaggcatcagcagcgccgcctcgggtcggactcggacgtgagatcgcctcggcaccgttgcagctggccagccagctaccaccgacggcctaccagatcgatcccctccgaaatcgcggtcgcgtcgccgtcatcccgctcacgtacgccgccgccgtatcgctgtcgccggcaataaagcgcggggccggcgcttgcccatgccctctccgaaagggcccggtgatacagcgatgcctgcatccgcatggcacgcgcggcaactacccactccctccggctaccacatacgatccgtgccaatctctcgtcgcactacagtcagcggcggcgttcgttaattacttcgttttcctggagcgaaaacgttttccgtggcgcaggttgcagcccttgtggctgtcgctcggggtattcggaaattggagcccttttcatgcatcgcttctgaaaaaccgataaataaaacgatgccgggggatgtggccatcgtgtgcgtataatggactggtggcgacgtgcaagtaaaacgacggcttgactttctgactttatccaatggcgtgtgattattgttaatcaccctcctgagtcctgaccaagaggtaatcgtggtactacatgcagtactagcgctactgttgccaagaagttttcagtgcagaggcaaatacggatcgattggattattctttagccgggtggacgaaccgagtgatttgtcaaggcgctcaaggtgcctttttaacccaataaaaaaatctgtactttctgatcttcaattaagatatggatcggagtaagttggatcaacagcaatgtgaacggatcgtgccgtatctccatgcttgcggcccggcactgctggacggctggtaagatgcacgcagattatctacttatctgatgatgccaggaggatgcgatctccacgcccatgacgccagccgagaaaagtgcatacggccaaggccgcccttttcgcgctggtctcgaatgaacaactcggatgatgagaaacccctgcgcgttttcttattgtttccgctgtgcaggttgccggggctgatctgacctctccgcaaatattaatccgtgtctccatcgaatggggaattatagaacttgaagtgtgatgcgcagcgacagtgacatgtacccagctatacctgcaatcgacctgtggcgggtgtacacgccatttcgtttttcactttcttcatgcacactgtggcaaatctcacgttgttgctacatcgattaccaattagttaaagaagaaaactagtgaaatttagacagacttttgcaaaatttgatcgaactgtttttctatttgtaccggcttgataagtttgatataataaccatgataatcaaactactacgttaaatttgtcaaccctgttcttccttcctagcgaccttcttcttgttgaatggtcgcatatgtagatttagccccccaaatctagcggatctatgccagagaggagggtacatatcctaataaaatttcggtaattgaggtcacccgtgacatcaaatggaaaggaatttcgggggatcagttgggggttagattattaggatgcaagcaaagcaataataggggaccatagcattgttcaagaatcgtacgccttttgaatttggatttgttattatcagcaaaaacggccttacttttcaatttcccaactgttgcagctgccattggagcacttggcacttgcagtgttccgatgtgcagcgcaaagtattctaaactgcacgatctaggaatgcgctgtcgccatgttcttgcgtagctgagtatttattcataggaatggcagggtgcgtactgtttttcttaaataaataaataacagtaaaggtacagaagaattggacaattttgtagagcacatgtacagcaaggggaaaaatattttgatctcgcagaaatatcctctcgtttgtttaaaaacgttcatccaaacggttatgaaaatttttgacaacactcacacaacatatctatacaactccacaaaatcttaggttcaaactcatctcatactccgacatatatatatatatatataaaaagataaattcagcgtatgaataataggctgaatttaaacttaatttttagtggaccgatggatatctctatactctacattgtcaattttcttttagaatttttcacaactatttacatcaagtttgaaagaaaaaggtatacgaggggacatccccttgagggattagaatccactccccttgcaaggttgctaagcctgcgaccatacatatgtatcatgtatccattttaattgtacttaattcggttagagattgagaattttagaatatgcaaatgtttttatcagcagaattccatagataaaaatatggcatttatgttcatgcatataactttaaggtatgggaagtcctggccttagcttgaaaagccaattgttataaagtttacatcacaaatacctgcatgaatgaatcctaaaggtaagacaccaacaaactttccgttggaggtaggccatgaggaccttcggccaacttgctaaaacaacaacagtaacaagtgaaggagcttggggaaggggcatacgacgaagcctaggccatggagcaaggccacaccacgaagcgaagcaccgggtggcgaaacccctagtggcaaagcgggttcattaggtggtgaagcaagttcggctaggatatgctaatactaggagaagcctaataaacaacctaggaggaccctgataaggtccatgggccggctggttgggccaaaagataaatgttacccttataaacatccccgccagagggacaaccatgtaaattcactagcatacaaaaaccctaggttgtaaacgcattaatagatcccaatggttttttaatagaggatccgatttttcaattaatatatttttactgttttccttttcctaccgctccgagtgaagcctacctttcaacaaaaatgtttgtcattcaacaacagttttgatgaaatgacattgttcgggaattaatcctatcactaaatctctgccttgatggtggcgttgccggtgctctccagtggcgatggccctagtggtgacaccaagagcggttgctgtttgtgatagtgctttctagtgttctattgtggacgggcaattgctctaggcgcggtggttgttagatcgttggtttccttgtccagatctagttacgtggattggaggtgattgcagcaaggaggggctttggcaggacagcgatgagctcagtggtgatgctagcggcaaccagggagggaggaaggcgaggagcagacgaagggctcgctggaggtgccagaaatggttagggagcaatgttttatctagggccaaagtaccattggattggagatgtttgtgcccggatctattcgtgcaacgtgaagtggcattggatggaactcttcttctttgtcccccttagatggtgtgagcgagcaaatgcactagcgttctagagctgttgagtccaatgaatgaatccggtagttagtaggggcaaggcgacagaggaatcgagatcaaagcatcgattatgagaggttgtaggagatcgagatgtttctcaagatcatctcaatgcgattttgtgaagtggtactcctcgctcttttgcaactgggcccataccgaacttagtgtgctaccttgtatagtacgtgcatataagatttaattggagtgttgttaaaaaaatgtcattctattaagccataggacacaacatgtgcaaatgtcccctattaaataatgtctcttgaatttagatccactccaacaaacaaactcacaaacatatgattaatactattcggttcggtggtacaaaatcagcaacatgggccttgttcatgcatatatgatgcgataaaagaaaagttcagcgttgatcggctcgtatttcttcttcttcccttcgctataggacacgttattttcatataaattatgaatgaagtctgaaggttgaaggatagaacttacatattactaacaagtggttaggtcccgttcttttttccaaccagagttggatgaagattaagattttcgtggcacgcttttcaaactactaacggtacgtttcgtgcgaaacatttctatatgaaagttgctctaaaatatcgtattaatctatttttcaagtttgtaataattaaaactcaatcaatcatacgttaataccacctcgttttgcgtaaaaaaaacttaatcttcatcttcatctttatctttaggagaaaagaacaacatctaaaccatgtcgatgtggaaagtttgtgaagaaatcatatttttgaaagtgttaactgaagaatgcaaattgcagaagagggatcaagttggagccttggaagacgatgtccttgttggtgatcatgaccttggagcgcccatgcggccatgtctgacctctgatcaccatcaacagcccatttcatgcccatcatggcatgatccacgaccacaatcctggaacgtctaatcaaattgatcattaagccgcacaaggcttgaactttcttcagtccattcaaccgaaaggtgagataatgcgacgtgggaatggtaatgcgtgacttcttctctacagaagttcagaggaaactggcgatcacagcaactcagctttacaaattcatcatcctctctcagttgcacttgttgcacaagacagagttatcaattaatattgtgtgcactaactcctgggatgtaatttatttcttaagatattgtgtacactaactataataaaacattttgcattacctggctatgtggcatgatccttgcaaattattgacaaaagcatgcgttgagaaaaaaaaaatctcagcacgagctcgtcgtgacgtgagtacggcaccaggtgtgaaaggtaacatttttactgtcagctgtcaatactactgtaaacacactgttactgcacgtggaaacgagcttaattggacagatttagctcgggtgaagatgatcagaccttgatagaatcagcgcatgtggtcccgaaaacgagtgcgcttttccttttcaacatttttttctcgatatgaaagcatgatggagcctgattttttcttatttattggatatataattgatctcgacagaacgacctttttgcccgcttctcctgcaatatttattcgccatattgtgccgaagaaacgatttactagacagtaacttgtcctacaaaatgtgctagttgttcttttcttagtacagagaaaaagtattgcttagagcaccagatgcacatacaacatggagttgattagtcctggcaataattaaggttacttctctcacaagccctgatcactaccatgtagtatagtcatctcccaatcagcacgaacacgattcataagactttcacaaatcagggttaggttgatttgcaggggacaccgccttttcagctttattttcctttcacctcggcctaaaaccggccgtgccactgccgccgcccaatatataaacacatctactctctcgtgcactacaactaccactcgtccactcctaataacctaccactctacttctccttgcaacatcgtcgttagtcctctaacccaaggcattgacctgagcttgttgtgcgcttctgccttatctgcatcccctcccggccgagacgcgaccatctttctttcccgcttcgttagctgtctctgccgatcgatcggactggacggggagacatgaaggtgcagtgcgacgtgtgcgcggccgaggccgcctcggtcttctgctgcgccgacgaggccgcgctgtgcgacgcgtgcgaccgccgcgtccacagcgcgaacaagctcgccgggaagcaccgccgattctccctcctccaaccgttggcgtcgtcgtcgtccgcccagaagccaccgctctgcgacatctgtcaggtatgcacgcggcgagaggctgctgctctttttcctcgggttgcttctgttgcttgctgcaactctgaagcgtgtggactctcgtcacttcaggagaagagggggttcttgttctgcaaggaggacagggcgatcctgtgccgggagtgcgacgtcacggtgcacaccacgagcgagctgacgaggcggcacggccggttcctcctcaccggcgtgcgcctctcgtcggcgccgatggactcccccgcgccgtcggaggaagaggaggaggaagcaggggaggactacagctgcagccccagcagcgtcgccggcaccgccgcggggagcgcgagcgacgggagcagcatctccgagtacctcaccaagacgctgcccggttggcacgtcgaggacttcctcgtcgacgaggccaccgccgcctcctcctcctcagacgggctatttcaggtcagttcatccactgttaacgatccaaactttccatggcaacgaaaacctgaatacgtattcagtccggttcatgcatgaaaccctgaaaaaccaatccacacacgttcttgtgagcaccatgaacgaagcacaggcaaagcacggcgcgccaaactctgttcaggccctgccggccgtcgtgggcacataagccaatctgttcacaatatcgtgagcggacaaattttaccatgcaggtagtttgtagtcatgctcacacagctagcaataacaaaaaatatatgtaattgctggaccagggtgtcaggataatatcctgtggagaccacaaaaataaaatactaagcgataaatccatgagggtggattttaaactttgaaggggacgttcactcattgtttgtatgtcgctcaaatagttataaaaaaatttgagaagatgtactaatatgtgatatatcacttcataaacatacaagttaaaattcaatttatatatattgtaacgaaaaaaataaatttaattgtatttatacgttaactagctagctgtagtttaatatattttttcgttatgagatatataaattgaatttgaattcacatgtttatgaagtgatatgccacaagcaacaaaaagatattttcttaagagtttagaataatttcccgtaaacctgcatatcatattcatcctcccctcacgagcagattgttccctgctttccctatttgaaaatttcccgtactctgtctgcatgttcaaaacagtaaggtcgctagaagcttgtgcttggactcatgtggcaattggcatttcgctgctttccttcgtgcagggtgggctgctggctcagatcggtggggtgccggacggttacgcggcgtgggccggccgggagcagctgcacagtggcgtcgctgtcgccgccgacgagcgggccagccgcgagcggtgggtgccgcagatgaacgcggagtggggcgccggcagcaagcgacccagggcgtcgcctccctgcttgtactggtgaaaaaaaaacgtgcgcttatcagccacagccagtacgaaatgtacgatgcttgtgtaccagtgtactgaggtagtagcgttagaagattaggaatttagtagtggatgttgattttgagcttaacgcgtgtcttggatgaatccctgactcctgaatgtttggggaattaatgtgagtggtagtgtcctctttgggcggcaaagaattatacgccccttgcgaacatgtcgaactgtacggtctgccatttaatctgcacgttcacccctctgcatcttctgtactgcaaatcagattttgtgactcttccattaggttatgaagttttcaggatgttgcagcgcaagctgaacgtgcggcgatcaccgttactgagcaagcattcgtatctgtttaagcgacccgtcaacagaagtgcttcactaaggagcttttcatattgtagccaaaataaatctaaccaaattttagtaagttgacaatattactaaaattttgatcggatttcttatgaatttacaaagtttttttaaaaaatatatgcacatttttaacaactttaaaaaattagtatggtttgaaatgatcaatctaaacatcccctaaattttgagtagatggtaataatcacttccagttagcagcaagctcaagactgaaagcttaagcactcggcatcacgagcggatcgactttgggctacgctaatcacaccctgttggaaaaagtgcatgtgaggtccctcatcttgtcattgaatttcaaaatgatccctcaaccaaaaaaactatcatccctcgactgacaaaacatggtcactctgggtctttaggcggcattgactttggttctgtcctagtcagcgtaggacccacgcggaccccacatatcagtgacacctcaccttcttcttccccttaccacctctcccccatcatcacggcgcgagcagcggccggcgcgtgcgactgtcgccgtctcgtcccatcccactgtcgcgtcactctttcctcctcttcggctccctcctcttccccctccggtccacctctttctctctctttctcttcccctccatcgtcgggcaccattgccgcccccctgtgtcgtcatcgttggcggtagggatgagctacttcggtagctactccacctacctcgaaaccatcttctccgtcgtgctcccgccgctcgactcgattgcctgactaatttctgccattgttttcatgcagtcagagctcgtcatcccatcggcgctaacaacgttgttctacgtctccaacatcgtctaatttgccaaggtcatcatcttgagacgctgttgtagtcaatgggcatcgacgggaagcggacgtactacatcctcaccgtagtacaaaaaacggaccggcccagcggttgaaccgagaaaaacggaaccatcactctcaccaggtcagtttgttttaaggaccgcacatgcaatggaaccggtgcaaaccggatgaaccggatggtttttgaggaaaaacggcggccctggctattttgaaccgccggttcgtgaagcagatggctagattctaaggcccacttggattgttgcggcccaattatcttttatttgcctaaaatgaggaaaaagtgcatcacatagggatcaatccctggttgatggaatagaagcgcatcaaccacaccaccaagctaagttggtaaccttgtttacgtcggattatgtatgataaatatactttccggttcaacaatcgaatcggtcgacccagcggtccaaccagtgacctagtgaaccaggagctcaagcggttcggtgcccggttcggttttgtctacgatttgttagtgagtgcagctaactgctaattttcagtggatggatgtgagccatgttgatggatttatggagttttttttacatatagagatcgattagtggtgttgcatttttttttgccttaaacgttacttactgtctttcttcgagtttgcctgctttttgccaccatatctcctccatctttcaaccaggagactcaagactagaggcaaaagaaccgcagtatcgacctcttccactctccacagtctgcacctaccttcgccgactcaatcaccatcgccggaggaaaaattcccggaaccctaatccagttgccactcacttggctcctaaattcatcgcacacatcgccaatcctaccaaattgaaggtaaaaatgaattatccatgcaaggtacttcatttcccctctccggccccaatgattctgctatcagaatgccaccggtgctccctcctgctgccacctctgttcgggtgccaccggaccacacggtgcgttgttgcctcacaatttcccgtgcccatccaccgccacctcgagctccgccatagtcccctcgaactcctaggctgccgtgcccctgcttgaactcgccgaagcgccgccgcctgcttctaccccatgcacgaacggaggaaagagggagatgagggatcagggttggccgctgacatgtagggcacacgtgggtccaatgctgactcagcctccacgtcggacaaaactatggtcaataccgcctaaggactcagagtgacctagttttataagttgaaggatgtcatatatctgttttttgggttgagggacgattttataattcgacgacaagatgagggacattgatgtactttttcccactctgtttgatccatttgaggggaagaggggccaaggttgcaaaatgaacggaacccaattgcccaaagactgctcgttatcccatagaacgctctgttatgggctcagtggtgatgggccgttcgctgaaatatggtgggctcaaagatgatgtctccatttatttctcttttgcgtgtacaacaacatacaacaacatggtaaagaactgatttttattttttttgcgaggagtgaagaacatggtggatatgcaagcagcaaacgaggtaactctttttttactgtgcatcctacagatctttttaacatcacggagctcactccgtggtccaagaaagagcatcaattacatttcccccattgttcatcgttcatctcattgaaacgaagtcataaacagtcccgcctacagaaatgtttccttttggacactgtcccgcctacagaaatgtctcggccaagtttcctcatcaccccagtggaccccacgcgtcagcgtgctccagtccactcgattcaaaacttccctccatatctggcaaccatgcgcgtcatccggtgttggcgatgttgcagaggggaggaacccttcgtgaccaatccgggatggctttccaaatcgtgatcgcactggcacagtgccaccagaaaacgagcaactcattgccaatggatgaatggagtagtatgttaatacgagtagtagtacccgctatctttggcgtttaattcgaggctaatgctgccgttcgtgtcacatcagcgaccggattcatctgctgatcctgtcgtcttcctcgtaccctctctgctgctccttcctcttccctttgtcgcctacgcgaacctggtgcgaggtgccccgttgagaaaaaaattgggttcgaatttttctctggttcgcttgtgattttgtgggggctaaagaatcaatccttcggggctcggagcgatggacgtggaccagctgatcctgttcgtctttgtgtgctgtttgtcctcgaggtttgctggtgagctctgtgatattcaagtcatgtttgtttcccgtgctgtttcttggacatcgccgtcgtgtttgccctccgagtgttgttcttaggtttgattgattgaactacggtcggtgatttgttttctctatgttttgacagatgcgtatgatccggtagatccgaatgggaacatcataatcaactgggattttcagagcatcgagaacgtctacacggtgcgcatgcctgctagtgagtttagtactgccgttaatttttcactgtttgggatcatcccagtagtagatatgcagtcgaataaaagattcagaatttcagacgtaccatcgttgcaactatcctttttatctcgattctaacttttccccattatttcctccggtgaaacttatcattagtacagccgaaatacgatattctgacaaaaaaaatttgacgttcgcaaccgccaacaccacgaatcaatcgatatatcctgtgcttatgcaggtcatggtgagcgtccacaatcaccagctgtaccgccacatcgagcagcccgggtggcggctgagctggaggtgggctggcaacgagatcatctggggcatgacgggcgcggaggcgacggagcagggcgactgccaccggatccgtggcgccacccggccgcattgctgcgagaagcaaccggtcatcgtggacctgccccccggcacgccgtacaacaaccaggtctccagctgctgccggggcggcgtgctgtcgtcgctcacgcagaacaaccggacgtccaccgcggcgttccagatggtggtcggcggcttcaggcgcgccacgtaccacgacggcgacaggggccccgcgctgccgtcacgcttcggcgtcggagtgcccgggtactcctgcagcaacgccaccaaggtgaacgcgaccaggtcaccgatcggcaggcaccggcacgtccagtctctgcgtaaggcttctcccctttctttcttatcgcggcgcgtgcgttgagcgggagttctgagcgattcttgctgccgcgcgcgcgggcgccgtgtgcagtgacatggcaggtcacctgcacgtactcgcagttcatggaggccgcgtcgccgacgtgctgcgtctccctctcgtcgttctacaacagcacgatcgtgccgtgtccgcgttgcagctgcggctgcccacgatcccccacggcgccgcaatgcatcaggcaaaaccccccgcgcaccctcgtttcccacaccgcttaaatcctgtgctatatatcccactcactcatctgcatttttggttggtttaattttccagcgagggcgagaagccggagctgccggccggcgacggtgaggcggtcgcgccggtcttccggtgcaccgaccacatgtgcccagtccgggtgcactggcacgtgaagatcagctaccgtgagtactggagggtgaaggtgacgatcaccaactacaaccaggtcaagaactacagcgactggaacctggtggtgcagcacccgaacctccggagcctgacgcagctgttcagcttcaactaccagcctctcatcgagtacggcaccctgagtaggtatcactcactttagcatgatctccgttcgaattggatgaacagagtgaaccacagaagttgttgtttgattttgcagacgacacggggatgttctgggggatccagtactacaacgagatgatgctgcaggacggtaatgtgcagacggagatgatactgaagaaggacaagagcgacttcaccttctccggtggatgggcgttcccgaggagggtgtacttcgacggccacgagtgcgtcatgccaccgccggatcagtaccccttgctgcccaacggaggcccggactcgcgcgtctcggcggcgcaattgatcgccagctcgtgcttgttgttgccattcattttccttatcatgtaaaatattatttcgccatcgtaattgttcgagtaggaaagagaaatacaggtgcaatcgtgcaaacttgcagagcctaaactttgtgtaaaattactaagggctggggtctaaaggactgggctgaattctatgtatgtgtgtatataccgttttgggaggaattccgtaaagactttcccttcccaggcctcgtttagatgaagcccggtaaataacaatttgtattttttttgaactccctatctatttgtcgacaaattcttgggccaaaatcacccagatttttttttgcctttggattagcatccaaaggacagggaaaaaaggtcataaacatattttttctgtccggacaaaatcaaaagacaacatgggctgtaaatcaagcccacatagaaaatacaaaaaaaaaatttaaatcccatgattcaaagtgagcagcccaaaaacacaggacaactttataacagcccaaaaataacaaaaaaaaaccattacaaggggacttgcaaaccaaaaaggtcacaaaaagacaaaaaaaaggcagagatcacacagatcacgctacttcacacaaaaggaaatccacagatcaatcaggagaaatcgagcacgccatggacagctacgagaaagagaaaaagaaaaagaagcagattctaaccaagaacatggaggtcaagaagatcaaatcaacaacaaataatctcccaggtaagttccactttacctttttgttgttgatttcaccggatatgccatacagtatcaaaatcaaacaaaaacaactcagatttgaaaactcttagggaaattgcatgaaattttggattcctttacatcaagcagtactgagtagggaaacatgacttttgattcaaaaagatccttctaataagctataagtttcatattgaaataaggggaaacatagggcaccagaagaacatacatcatacagtgcacatatctctaacttttgcatcccaaaacatattctgttgatcacaactagtatgtccttcaatgaacatgatccctgtaccgccaaaatgaggagcaaaaagaacaaattttactacacttccagcaacaaaagaacccaagatttatgaatgctcagaggataagaataatttctctgctaacaaaacttaccttcacccacgttgacatcaatttcctgtacaacagttcaaaaaaaacaaatgattgatttcctagatagcaagcacagcagaagacaattcaaaaaaggaacacaaaacaaaatataaggaacaaatatttcatttactgaccattgctgtcatcccacaatccaagcagctccaaggcccttgctcccagaatcaacacatgcaagagcaacaaaagccaaaacaaagttgctaaaaagtacacatataacccagtcaatatcacacagagaacaatagaccaaaaaaatgaaaatgtcatgtggacacatctaaaaattatagataagaatatcttgcacatctgaaattagagacaaaaattcctcaacagttgctatctcagataacttgtgagataacgggcaccacactaaacctaaaaattccatgctaagcaatggaagtaaactagagacagtatgtcaagcttctatcaaggaagaagcctcaggtcaatctatattctaccaagagaaatagagataacagaaaaaaaaacagtacaaaactaggcctacattactaactagcaaaaaaaaaatatatcaggcacatatctaagaaaataaagatgcctagggttccccaaactacaagtctctgataaaaccaatatcaataattaacaatctaactaccaatagtcagttacagtgcgaaataataaaaattacaactgtaactaaggtatatttccactgtaagtggtgtgagttgcactgtaagtgtgttttaggactgcatgaaacctaaaatattgacttcatctgttaaatcaaagattcaaaactgaaaatacaatttgaaaactaaactaaatccccagatgaaagaagtgggcatcaaataccataactaaatcaaaaaagatacaaggtttaagatcagccattcaaatgcctcaagagatatattttttgtgggtaatttcctaatagaaaacatatattgaagctgacatccacataaatgcaaccaataaaaaaacatggagctatacatccataaatttttctgcaagaaaaagtttgacgatcatagaatttacctggctagttctccttttctgttttaatgaaaggaataagtagacacataagagttatgtcccgggcagcacttgttaagcaaaaacaaagcagaatctatgcaagacaaagaaagaaagttaatgttggttgcatacattaacagacaacataaatgaagcggcctcacacttgcaatggcacaagaaggcaagctaatttcagtaaaaacatctaattaattcaaaaatggatgataaccctacactgcattgactggaaaaaaaatctacaacataaggggaagcaatacaaactcactattgtttttatgaaactaaaagtacacatattctaacttatgcatgcacaactgacaaaaaagagtccctagggttcccaaactacaagtgtcctagttttcacacaaatcagtaatatacccaaggtcaatcaattacaaaatctaactaccaacagtcagttacagtgagagataacagaaattacaactgtaacttaggtatatttccactgtaactggactgtaaatggtgacgagttgtactgtaagtatgttttaagttagaattactgtaatttcagactgcatgaaatccaaaaatatttaagttaggtagtcagattacctagaacatataaaactaacatgctttttaaatatttctattacatgcaccaaccatacttgatttaaattacatgcaggggctgatagaacaaagtctcaagtaacaggaaatacaactgaagaattaagaagaaagaagacagttgaaggttagaaaatcatgcttacctattattgtgcatcatatctgatcttcatagaaaatttcatctagcacaaatttatgtatgtaaaaaattagtcatgaagcatgacaaaaattacagtgataattaaccaaaaaattagaactgtatattcagttacagtgagaaataacaaaaattacaactgtaactgcagtgcatatggactgtaactggactatgactggaatcatgcataactttgtccaaaaatccaatactcatgcaacaacatcaacattattccctactataacatgatctaaatcatattataaattacctaaatgatggcctatcttcaaccagaaaatcatgtctactatcaatgaaattgagaactgaaatactatttcaaaacttaacaaaattacataagattagaacagtcagttataattgcaaatgtaactgaggtatagttccactgtaacttcactgagttgtactgtaattatgttttaagttagaattattgtaattacattttgtaatgcttttatttacattttgcaggaacaatctcagctgtagaatcaactaaggacatcaagttggacaccaagaaaaaagaaccactacagatgaaaagtacataaacaactataaatagatactatattgttcccaattaactcaaaatagaaatcaaactattttgacctattgaacaaattatattaatgaacctttcatacttaccaaacataacactgtagtttctcatgaaaacttcaattttctccagttgcaggtcatgaagaagtacaagatgaaaaaagaagaagccaagaatcagataagagcaatattatggcaaaacatattaaagaaaccaaaagtcagaccactgaagttgttccaggtcagaatggcattgttattactatattcatgcaaatctttcaagatactat

SEQ ID NO: 4531 - DNA, 13444 bp, Oryza sativa
ttcccgtgccaacgtttgattgtctgtcttatatgaaattttttttataaatagtattttcattattgttagatgataaaacatgattaatactttatgcgtgacttatctttttaattttttttcataatttttttaaataagacgaacgatcaaacgttggacatgaaaatcagggtttgtctttttttttaggacgaagggagtacgtatgttgctttttgtcttgtactacctataaaacatagcacgagaccttggcctgggtcagcttgcctgaatcgggagaccctgaaacaccccacccctgtgaccaagcagcaacaatgtgcaccgcaggtcccttcactcacatcagttggtgcttgtcggaaattaaagaatcctggccaacgctagaacagcgagcgctacgaacccgcaaagcacaaacgctccgggccaacggtcgaattaggcgtgcatgattcaaaccccccccccccccccccaaaaaaaatcatatcaaattaaagcagaactaattaagcgtgtcacgcgctgtttggtccgtctcgcctccagtagctgcgtacggcgggggagaagctacagcgagctacgtggagtagcttgattgccctaggagccgcacgaggaggggcgcacatgacgaagcgttggacattggcgaggaccttgtcgcggcggggtttattccgcggtactactgtctggccattcgcacggcacgttaggtgcgctccccacgcgcgcgcgtcgattagccggagccacgagggccgacacacatcaaccccccctactactacgcgaccgcggcgtttacggcgagcaaccagatgagatgaccaaatcgcgcgcgccgcgcaacgcagcgacgggccggcttgcgcacaccgcagccatgcccgcccgctgtctcagggggatatatgcaaggcgaactgcttagcaaaaggccagggaagggaagagctagcgcgcgctagctcgatcggggaacagagtaacatgcgtgccgttgtgcgtccgtccattagacgaacaccgaaggcgtgtccttttgcggaaagcgagcaaccgcttttgcattgtgatgcaccgctcgccgggctggctggttaagatttgaagaagagctagcagggtcatgtgccggcatgaggggcgagccaagtaaaagccaacatgataaccccatcgatctgtatagatagaaacgagcccaagttgcgttttgttagtttcgggcacccacagctagccctggctgtgctgcgtgctctgaaaattttactcccactactccacacaagtgtaaactcctctttggatgattggagcatctgtgtacgtattaagcctgtagtttaaactccaaagtgggttcaggtgtccacttaaacgtagaataacaaacacccacccatcgtcggagcctgtttctagacatacagatgcgatccgtccacgcataaagaaagaagctagggggaagataacaagagagcggaatcgaaagggaggggaaaaaaaaagaagaccagcagcagtagtacgtggtcccgatcgatcgaacaccggagatggcgggacgcatccaatgatcgatccaacgcgggagaagcgatcgagcggctaagctaagctggggcgtgtgcggagaagcgagcgacggatgactagagcgtcgcatgcagcgctacagactggagggggtggcccgatctccgcttgctggcacgtaaatggagcccataactttcacgccaaacttcgcggattcgatcggtccccccggctggccggaaaccacatatggatatgcatcggagtgcctcgcatgggcagcaggacaggtttgccttggtgcgtggtaaatctcaagcctaaccagtaactgcccgcgtaaaactatacagagtatacaggtgagctagcagataacatctgcagaattcagtttccagatgatggataaacatgtctacagaattcaatgttctataagaagaaaagaattaatttgactctcgggttactcctaccattgattagctttctctcatcagtactacataagttgtggaatcgctagtggatcataatgggatatttttttttaaaaaaaaaagaggtcgagaaaagcgacagcattttagaattctcttgtttggatgaaaagagccgtgggataacgaaagaaaatcgtcgtccacgctcatcatatttctatgacaaaactgagaatggacatattgcataaggagaatcatctgcttgacttcttcgctaaaaatacttttttttatgcatgtatcatggaatcataatattgtatggtgaataatcagcatcaagcttgcatggttctgtagttaattttatttcatcagtatcttgtaaatgattggtacagccaacaactagaccgaaatatttttttctacaaattgtaaccttggatggaagtatccatcacatcaaatattattacgtatgcggcaagagtagattttaaactctcgaggggatgttcccccgttgtttgcatgtaacttaaaaataagttattaaaattaaaaaaagtaagaagatgtattaatatgtgatatatcactccacaaacatataaaataaaattcaatttctaaatgatgtaacaaaaaatatgactgtgaatatatgtttgtcgacgtttgatgtcgcgattccggtatttacatagtatggggatcgttagtactagaatatacgcgagactgaggtaaaagaggcggagacgaggatttttatacaggttcgggcccctgaattgtcaggtaatagccctacatcctgttggccaaagccgatcgttgctcttattcattataatcacaccagtacaatatttggggtagcctatctaactgttgttgacatggcggtctgaaggtctgactcgtagtcgacaacaaggtagtcttcctcctcgagttcgtgcccagcgagatcagagacatcgctagatccctacggccggcctctgtaggtaccggatagggtcgatccaggcatatctatgatgtcgatatccggcggcttgtcttggcgtatgttggcttgtatgttgtggcttctgttgttccgtgcatgttgattctctcccctctcctcctagggggtcttgtatttatacccataggtgttcccttgtccaagtagaactagggagaccaatatgaatacaatccgagtagtctttgtcgtttctatgtagaactctggttgtccttccttatccggaactcctcctatatccgaaggttgtttccgtataagacatggtatgtggtgggtcctgccgagatttagtcaactactattaggtatgtggtatccataaccctgacaatgttataactagctgtagtttaatttgattttttgttacgagatgtacaaattgaatttaaatttacatgtttgtggagtgatatatcacatattaataagtcttctttttttttcataatcatttaagtgacgtacaaataatgagaggatatccctcgagagtacaaataatgagagaacatccctcgagattttagaatagttatccgtatgtggcatgattagtacgtgtatcattggctcccatcggatggcccattaagtcaaagaaaaaaccaaattttaaattttcaaacttgattttgagatattttcaacatagtttcttttttagcattggtttttaagtcaccaagaacacatatataaaagttttacctataaatttatttttatttcctaataaactgttttggcttattagaaaataagcgaaacgatggggcccattgttacagctagctggtaaattaagcttcacatgttgttcgagcatccaaagagatgtagctgtgttcctgcacctcccagaatcatttctgcaggaatcacgataagtcgatagctacgttctaactatttgcttgtggtgatatacggcagctaagctcttgatatgtattttaaaatggtcggcaataaattttatgtaattatttgttcagtgcttttactatagctactggcgaaaatgacatacgtgctgcaagtttcagaaaattaaataaaaaatgaactggagatcagagactataaatcttattgtttaatatatttttctgttgtaaaaagaaggaaagaacatatagtaaaaacataagtttaatttcattccactatctttattctacttaccgttgaaactgggtgcaacactgccaagataggcttttcaggcttcagacttcagctgatgggtttgtgcacattctgcattgcttacaattatggacgtggcttgcgcataggcgaacggcacggaccatgcaaattaaatggcatgcatgctcttcgcgcaccagcatgaatacacattctggctgaagtgtctattctctaggaccggagtatagtaggccacggtaataaattaactctctcccgttttctgaaaataaagttatatgcatgaacaatttaattacctttcaccagcatcataaaatttggtagagctcaagtggtaatggaagcagtacttgtttaattaggttcatgacaactttatccatgcccatcatttgcctacttggatatatgcaaggtccacttttataatgccctcaagggcatcatcaatcattatcacctcgagttaacatggatcacgctgcacaatcacagcaacaccgagggcaggaggtcgtgcgccacctggatgcgcaggagagactatagctagattccacagcaacacatgacgcacatatatacccatctatcctccttccaaagcttgctttggttatgatcaataacttatgattagggtatagaactactactactggtactaataaccgaatacctgtactgctggagtagtagtttgaagtggacaaatggtagcgccgcccggattaatgatgggctggctggcaaccagaatgtgctgctccaaacctccaaccatcaaagggcaacgctaaattactactttactcggtgtagatcaacttcctgagttgtaaattgtactatctcacggcttagtttaagtcactcttgcgtataatataagatacaccatacatgtgggatagcttgctgcatctgggtaagcttccaagctagatgcagctcggtaccatttccttgcaagtacgaatcttaacgcaggcacgacagattgaaacaaggacaaggggaaaatggcgcaagcatcccaaccacccttgtctgaccaccgagttacctgaaacactcatgcttgtttttattatacagctgcattttcattatatttacgtttcgtacatttttcagcgtttgttatccaaagaaggcataattttacttggaaaaaacgcgaaagtcgttttactctttatgatgtatatacccgttctttacgtatcaatagtaattagttatggaaaaaaataatagcaatgatagctactcctatgtgatacaccgtaaaccaacaaactagttcaaatgcaacctacacaaattgataaaaaaaggaaactaaccatgaatagtaaatttgtactatttagtgaataaattgttttcctttcttcctatgtggatcgaatttggaattgatttttttctcagcacaatagataagtgatgtattcaacacaatcattttctatatatttttaattatttgagacgtaaaaaagggaacatacccataaaggaaaaatggtagttccaaaagtaggttgtgttttaatatactcacatgttgcaaagacatagctagtcccatcatttttatagtagctgattatgagccataatatttattagcgacttaaaaagtaaatttaaattaagggtaaagttaacctttaaaatttaaattttgcctgcagcttgtaagttgagcaaacgatggatcgtaatgtggtacttaattattgatgttggtatgaaagtataatatagtattaaacttaagactgtaaaaactcttattttttttgtgtgcacgcctatacagattgctcaacagatccaacttcataatttggtagtagtagttaagctatacccacacggagaggagtaaaaaccaaactaggctgtgttattccctcattttcctaacccacctctctctcgtttttcacgtgcacgcttttcaaaccgctaaacggtgtgatttataaaaaactttctatatgaaagttgtttaaaaaaaatcatattaatccattttcaaaaaaattagttaatacttaattaattatgcaataaaacgaacttcgttttgcgtgccggggaggaggggttcccaaccctctcctccgaacacagcctaagagcaagtacaatagcagctataagccagctataaccacacatcgagaagaaaagataagagagaggagaaagcgggctacagatttatagccggctgcaacacggacttcaagacgttatgtgtgtatgagaggggagaccggatattaacggtgtagtatatttttatagttaactattgtataaatgggttattagattagctatagttgtttaaagctaataatttgttttactattaaacttgctgtaaggaaacagaaaaaccgatcgactagctggcggggttgattggccgcgtggttttcttccaccgcgcgcgcgagcacgatgcatggatggtgcatcgtgtggtggtattacctggctggcacgagagaggaaatttcggatggaggttgggactttgggagggggccgcgccggggttttggtgggggatccgcgataagcgtccgccatgttctgtagcaacgccaccgcctcctcccgtcgcgtggggggtggaccccacgccacagctggttcggtgtattcttgtctcgtacggttcttttgcctgccgcctcccccgttctctccttccttctccgtcccggcccgtctctctgtaaatctgtaatctctacgtctctgactctgcccatggcgtgattaaccttttacccacgtaacaacagtaattaattggtcgatcgatcgatcgtctgatctgcaagttccttctacgtctccaccatggagagagagagagtgagagagagagggggggggggggaggtccatagcttgttgaaggtcactttttccccaaataagtctgagatacggtttgtgagattatataatcagtttattgtggatatgcagagtattatatgtaatcagtttggcaggtggagtatattggagtcttaatcaagatcgtagaaaattaggaagtatcgataggccctttttctgcatgcgcacgcaataattcggcagacaataactctcatcaaatgtaggaatagtattaacatgcgtgcctattagataatggtacagtataagatcgagtcataacagcaccacaacaccgaacattatctctttagttagatactctcagttcatattataaagcgttttgatcttttcttacttatattttgttaagtttaattaaatttaattaaatctcttcagtgatgacgctggctgagtaatgtatttacctctttccctgcaaaaaaaatttgattaaatttataaaaaaaagcaacatctcaaattagttttagtaaatctaacattgtatatatcttgattatatgtttattttgtgttaaaaaatatgtcgggacccaaggtcacggacaagattggggatagacgggaaaacatccttttcccgtctatcctgagaaatgagcccgaataccaaatgaacacacactaagtgacaagacttttagtattccgagatatcttgcctgctacacgctttttgtctactttatatagttcacagctttacatgtgagattacaattgcgccctttgttgggcccacataaaattacaatcatgcccttgctatatcagctaacactaagggcattttggtacattatggaggtcattatagtcttttggtgccagctggatgaagtggttgagtggtcctcgggaatattctcttggcatctttgttgtccaaattgccttcttcatgatcaagagtcttttccaccaccatgggtcttctcctcgaccgagggtcttttccaccaccatggatcttttccatagcaaatagtcttttccagctcgaccaccctttccgacttatccggtagctgacctgttgttaactcaggaaatactcaaaacggataatgagatttagtgacaagaatgtactcgaacggtattttccgactcgaatagtattttccaattcgaacagcgttttaccgttaccctgttcgaatgaccatttgccactcggagactattctaactcaatctcttcctctacagtgttttgggctgaatatagaggagcggtggtgaccccctgctacaacaagcccctcacgggtaagggcgatgtgtgttttcggccgaaaccgtgttcgaatcaaaagctgggggagaaccgccgtcctcctattcggtcgaaaaaacactgggacataaaaatttgaagttcgaaggtggttattcttgttaatcattatgcatttatttgtttgttatatatatatatattatttattttgtgtatacatattctttatgtattgaatatgcacatttattatgatgcttgaatgtgtgccacatgtcagctttgtattggatggttggaaggtgaagcgccgcttcggggttcacgcccgctcacaaccgcgaccccccaccccccagacctatataatgtccgcaggggtcgctttcagccggctactgtgccgtcctatacttgactcgaatctgtctttgctcgaaaaacactctttccagttgaagacatctttttctcttgactacccttcttcgtgatgggaaaagacaagcagaaaacaaataagaagggcaaataaaaaaaggtcgaaaaacccgagagaagtgggattgtcttgggcccttcggccatcaaagacaagcatttgaatgaccttgttcaaaatggggtcgtttcgaaccggaaatttttggtttgacctgttggcgagtctgatccttctcccaagcctggatatacactagttttcgaaggtatctttgaggctggcttcagatttccgtgcagcccctttctgatcgaagtgttaaagatattcaaactcgagttcccacaacttacccccaatgtgcttgtgcgcgtgggaatcttcgaatggatgattcggagttgtggtgggaatcctcgtgccgaggattttgcatatttccacagcatccgccgctacaccaagcaaaattcgaagttcggttgtctcaacttctccccccattcgaagcatggatgcccttggccagccgtacttgccattcgaattaaatgggggaacaaatggcagtctaggtggttttaccatcagatccctgccaaccttcttgctgacaaagagtgtcctttcactttctcttgcaagatcgctaaggttatagtcgaaccgccagcggctcttacagcggattttctttctattcgctctcgaatggaagaacttgtctcaaagttcagcgttcgagacttggtggaagaatttgtttgccttggcattcagccactcacagccgagtggactattctcttaggacaagtgccaagagaagccgcttcgactttgcctccctttgaggttgatccgaatagtaagttttcattttctctttcggtcgaacacattcatgttatttattaagttcgaacattttccttcgaatgttttgtacttacattatgttttttttgtttgctatagctgttattcctacagacattgtccacccttgtcggaaatatcttagtccttataccaaagatgagcacgcaaagtaccaatccttgcaaaatggtttaaggatgaatcgagtgatgtccgcccttggactcgatattcctgctcgagttcatcctgagattgtccctgactcgggcaagaaaaagaaaaagaagaaagctgcgaggaaaatgtcttctgatgaagacgatattgaagttgaggaaaacgaagaaaatacagataacgacggtaatgatgggaatgaagagcatgtggagaatgaggaaaatgaagggaataaatccggcgaaggtagcttgagcagtgatgatgactcgagtgacagctcaagcgatgactcgaattcatcgtcagatgaggaaattgcctcggtcgtccctcctgcccaagctgctccaagtgttttgaagaggaaaattagtcctagcggttcccttcagattgttgtcgacagtgatgatgagattgacaaagacaacactctagttgacatttgtgccataaacgtcactccccttcgagctgacgccagccttgccacgcctgctaatgctatcgcccctttggatgtgcttgcatcggttgcaacggtggttgagaaaaatgtcgaagctgatctggtttgagcaactgattcgagcaatcttccccatggtggtgacaagtctcccactattgaacttcaaacttcggttcaaatagctcaagacttagagagtgggaagaaaattgttgaagaaactgttcaacctgaccaagtagaggagaaggatgccgaaatacattcccctccctttctatcaactccttccccccagataatccaagatgttctcggtggatttagtgagcgatgcacgaaaaatggtcgatggctaatgggactacctaatttctccgatttgggggaaaatagccatctcggttcaaatttttgcataaattacctgaaatatcgccacccgctcggttctgttggggatgagctcaagaaaatactcatcactcccgaactggagaaggaatttgtcgaggaaaacgatcttatgtcttcctgggctgcacttgatgtctctgccgctcaggtattcttttcctattttactcgaaccgattgttttattacttcatttctatgttgctcatagttcttttgctttttgttttttagacttcgaccatcgcctggcttcaatgtggtgtttccatgaaagcactcacagcaatatgtgtccggcggaagaaatcgctcgaacgcatagctaaacttgagaaagacagagaatttctccgccatgaagtcgagcgtgtctcagatgagaaacaggttgctgccgatcttgttcgaaaacttagcagcgacaaaaagggtttaatcgacgagaaaaggtctttcatcgaagagaataaaaaacttcatgcccacataaagattctcgaacagtcggtggctgatcaccaagaagtttctcgggaaagagccatttctgcagataagcttaaggagcaacttgctgcttcagaaaaagagaacaagcagctcgaactggctcgtctgaaccaagaagagaagaattcctccctcttgaaagaactcgaagattgccgttcgaagcttttggagagttgcaagatggttcaagacgctgtgcaaaaacttggagctaatgtaagccttccggccgacaatagtacattgtctgttcttgccaattgggtcgaagaatcatcgactggtttggttgatggtattgagcccttcgcctctcgttgttcaaagatctccgccgaggctttatcggctagtcttctttcgaacggatgtgaccatttctctggtttaaaggaatccatcaccgacttacttggcgatgagtcaaaatttgctcaacaccgtgcggcaattcgatctgtcgtcaaagcttttcaagtttggtattggaaaaatagaggctatgaagatacccttgcttctctctgggcatcgttggcttcgagctcacacaccacacaatcctcttcgagccagccagacgacggtggtgatgctcacatatctgattcgcaggtgtgaagtttttagggtgaactaactgggaaaacactatatgtgtttgaaagtactattattttgcttgatcgaacctattatggtcgaaaacttatttgtgtatattctaaatatgcttgggtatcactagctattttctctgtatgcctgtgcttcaccatcatttcgtttttgtcggggatgcaggtttatttgaaccgaaaagttgtggttcgacgcaacaaatgtcgttcaactcgaaatgggaagcacatagcatttcgaacacacgaggagttgctttttcctcaagcaactaattgtgatgatgaagagaagaaaatatattacgatgacacttgtattttttcttttaaatttttccaatggcaaagagaacatcaagatggcagtttgcgcgacttcgttgtcgagtttagaaaacgacgttcgaataatgctttgagtagcattgatttttggcaaacttttagaccatctgagcgtcaacttagaatatggaaaaggcgctactcaattgtcccttacacgggaatgccttatcctctcaatgtcatttttccttcttcttttcctttttaaatagggaatcagatgtaatttgtcatgttatcttcaataaaacttcttccgaatacttttctgattcaagataactaaggtagagaattgttcgaaaagttccaaacttctcacctttcgaagtagtgacgaggtcgaaaccacgctttacctcgtcgcgtgaattttccacttttcgctcgaatcggataagtgtttgagcgttttatcattaagttttcggacgaaggtaaaatctgttcgaaaaccgccatcctccttaccttttgaagaagtgacgaggtcgaaatcacgctttaccttgtcgcgtggattttccactttttgctcgaatcggacaagagtgttcgagcgttttatcgttaggttttcggacgaaggtaaaatctgttcgaaaaccgccgtcctccttacctttcaaagaagtgacgaggtcgaaaacacgctttacctcgtcgcgtggattttccacttttcgctcgaatcagataagagtgttcgagcattttatcgttaggttttcggacgaaggtaaaatctgttcgaaaacccgccgtcctccttacctttcaaagaagtgacgaggtcgaaaacatgctttacctcgtcgtgtggattttccactttttgctcgaatcggataagagtgttcgagcgttttatcgttaggttttcggacgaaggttaaatcttggcgcgtaggatttactcaattgttatcgagtttagcttttctccgaagcatgcggagtgttttctcgattttctatcgagtttgattttcctctctgaagcgtgcggagtatttactctttttgctatcgagtttgattttcctctccgaagcgtgtggagtgttttc

SEQ ID NO: 4532 - DNA, 17497 bp, Oryza sativa
  unsure (1)..(17497): unsure at all n locations
cccttattttagagatgaagggagcagtacaatctaaagtggattattggcaatttggcacgaaagggggaaagaccggatcggagggggcatggcgccgccgcctggcttgcaagatgaagcccgtcgtgcagcgctgcggacactggacagtgctccacgcctcgattcacgggcgcgcgcgcgcgtggcctctactccgtcgaccgggcacacccacagcatcatcgatgatcgataaaacagtgcccggacgtttccccgctgttacactaccgcacgcccccggtcacgtaaccctgctgcactcgcagagtcgcagggcaccggcacgccacagcccacacccatactccgcccctgctgccagcctagctactctcacgcgttgcccgccccgtccaggctgctacacccacaccacccgcccgcggcctcgcccgcgcgtgcatgtgccgcgcgcgcgcgaggcgtccaaactacgtcttctcgcgtaaaagaaccgagacacgcatgaggcctgaggcgcgcggtggcgcacagctcgtgcgagcgcgttggggctttgcgggctatcctagatcggtgccgcctgatcgatgcccacggtctcgttggtgactatgtaagacaactagacgtgtctagaaaagcgagcttagctcctctcgccggccgagccaatctggccacgccttgctccacaactcgccggaccgaccaagcgcaaacggccggactgattgagctcgcaaacgtcagacgagcgctgcaccactacggacgtacgcgcacactagctttaggatatgatcggtgcgaaactgcatgctattcatttcattcctagagaaggatggatggaactagaagcgctatgtataaatctatattataatgtattcgtagatgaaattctagctaaaactactgctgcccagcttgcgattctcggcaccgtagtgctgattggtggatcgagcacgcaaacaatttctcggcatcgcgctgctattattgaatccgtctgacgtttcagacatgcgtacgtgtacgtggtgtactccgtgttggtttatgctcaactgaatatctttctttaaccaaacctgttatcgcagtgacgtcgacgtggttgaattatagctatacggccggttcttaattaactactctgtcatatttaccttgaggtcgtatggaattttgctggggaaatattcatatacaaggtgcttgaattggaagacacaatataaaagttcgagacaatacaagtccttccaataaacttattaattaagtactcttcaccaaatcacgcacatgatgacatgaaggcatccaactgaagcatttcctccaacctttttctatcattcctttggaagttccaatacgttttccctccatgtccctctcaatctaactaaaggatcattttcctttcagcttcctccaatttcctagtggagcacccaataacctcttttctctgatccatatgtgctaattttattgatgtgtaccactaatacccaacaaagcagcattttctcgttcatatgcactttttcctacctcttacattgcatatcaaacttatgagcacaggcacttttgctgttatagtgcatcatttgtggttcttttgcacttttaaaaagaaaagagttagcacctagatgtggtgcggtggtggtatgctctgctcaatcacatccatttctgcaccatatagaagatatttcctagcttagctagatatacatttataggcatgctaatgttgttatgtcgttctcactccacaggatgcatgtttacaaagaaaaaagttcgcacctataggtggttcattaatttccatgcagtacttaatttataggattattaactattgtttgtatattttaaccaacaaagatcatttccatctagctttctaaagaaagcccagtactgtaagtgtgtaacttactttttattcattcgacgcactgaggcaaaaagatagttttgggaaactattttaacagctcgagtggatgtccacccgtttattacatgtcatctaaatggttatgaaaaaattgaaaaaatatgaataagatagatcaatatgtaatgtatcaatccataaacatgcaagttaaaattcaacttctacagattgtaacaaaaataacaaataaaactcaaattactatatgtatatttacagttaaatttgttatttttgttacagcttgtagaagttgaattttaacttgcatgtttgtggagtgatatattacatattgatctatcttgccaattttttttgaaaatttttcgtagccatttagttgacatgcaataaatgggtggacatccactcgagctattagaatccatccccgctagtttttgtaaataaaggaaagacgccaaaaattgaacagaaagagggaaaagaaacggcgcaattaagccacaatatacaccgatatctcctagtagtatcaattgagctaattaagttcctctctaccaaatgaaatatagtaagcagtaagtactattgtgcacttgaagacactgatgatgaccacagctgtgatggcggttttccctttccggttgttcactccacgaaatatgcactacccgtggtggccacgcgcctgtctaatctttttatgccagtggccgcagcacattcttcagattaataaaaagaatgcgtcaagatcgaatcttaaaattttctttttttctgcctcccacccagagttggctatagcttgctagctagagccccaatgcaagccgatcttgcatgctaagtaaggactaaggagtaatatgctagtaaggagtaatatttgctatgcttgtcccttgttcccggcgcttgcaatgcccaaaagctcagagccaccgtgtgtgctagctgtgcgtgtggtgcttgctttgttcaattcattcttccttaatcgtgaatccgcactatctttagatcgaaatgaatgctactacgtaattaatctaacatataaccggggtggagtgtaaaccacgcgtgtatcacgcacagatcggtgttctgtgatcggatctttcgttatgcatcatcatcagcatgcatgtgcatgttcggtttgtgcatttgtaaactgttattttaaacgtcaacaaacatttgtttatttttctttcaatattttacagtacttcattcgtactactaacaacttaataatacacagcacatattgatatatacatataatggggtgatcattgtgtagtttggagatgagatagaatgacttagactatccctctttttgaatggaataatcatatcatctatttggtatgagcgtgtagtggtcctgcattttttaggaatcggatggtatgtggggtgatcctacgttattaagggatcgaccgggtgcggcccacatgttagtgagagagaggggtggattggattagtccaccacttaggtgtgatcatatggaatattttcttttggggaccatctcatcccacccatgctcaaacaaaacacctacaaacaccctgacggtccagcatgatccatcaaatccatcgaactaggtgtgtatcgcatgataacataatatagagatacaaccaggcccacatgttagtgagaaagaagggtgggttggattagtccaccacttcttgaggtgtgttcgtagggaatattttcttttggggaccatctcatcccacccatcctcaaacaaaatacccttgcaatccaacacgacccatcccatccatcgaaccaagtatgtatcgcgtgataacataatgtagagatgcagcctaacccacatgttagtgagagagagagggggacggattggattagttcaccactacttaaggtgtgtttgtaaggaatattttcttttggggaccatctcatctcacccaccctcaaacaccctgacggtccagcacgatccaccccatctatcgaaccatgtgagtattgtgtgatgacataatacggagttgcagccagccgtgaggcacatatgctttgtacacgacgagacgatggttaggggatcaaacgagacggacggcgagaaacgcattgtcactgtcacatcgtcgtccgggtctatctcaaagtggtcccggtccacgtcggcatccgatccacaagtcagcgaggggcgcgtggccggcacacgccgagcgatctgggccctccatttcgccaaccctagcggcctcacccgagtcacccctataaatgccggtggccgaggcgtgtggccgccacactgcgatccccatccatcttctccgcacacgctacactcctctcgatcgatcttctcctcccgtctcgatcagctgattcgcccagcctccggtagcttgcttgtgcttcgtatccatggatcctcaccacagctcccacgtccatgccggagccgccactcctaactgcacgtgcaggttgcccaaggaggaggatctagccgccgccgtcgtcgtcgtcgacgtcgaggcggctcctcactacacgtcgttgaaggcggccgaggccgacgtcgtcccgagaggagtcggcggcggcggcggcggtggcgaaggggacggtggcgaggaggtgaactacatggcccgcgcgcagtggctccgcgccgcggtcctcggcgccaacgacgggctcgtctccgtggcgtccctcatgatcggcatcggcgccgtgaacgaaaacaacaaggccatgctcgtgtccgggctggccgggctcgtggccggcgcgtgcagcatggccatcggcgagttcgtgtccgtgtacgcgcagtacgacatcgaggtgacgcagatcgagcgcgacggcgacatcgacggcgccgatgccgcggccgcgagggagaaactgccgagcccgacgcaggccgcgttcgcgtcggcgctggcgttcgcgatcggcggcctcctgccgttgctgacgagcgggttcatcaagccgtggggccccagggtcggcgtcgtgtgcgccgcgagcagcgtcgggctggccggcttcggcgccgcgggcgggtacctcggcggcgccaacatggtgaggtccggcactagggtcctcctcggcggctggctcgccatgctcatcacctacgccgtgctccggctgttcgcgacgatctttcacggcatgaacatctcgtcgtcggcgtgatgatgcgtgtgacgcagaaatcgatctatctggagatgaaaaagaaaataatcaaggggttgtgctagctagctgtttaattaactactcttggtttgccagtagtactgtacctagtggctgattattaactagcgaatccctggataccgaactgggaataatcagggggtgtaagtgtaatggttgttgtgaatttgtgatgaggcaagaccaggcaaatggtctcaaatgagaatattggtgttaattattgtataccgattcccttctcactttgcctcccgtttgtttttgatttgtctgtgtctctgtgacagttcagaaactagctgatgctcttggttgcgaatatccaggtgtgccactggcacgttgaattgtttttggttgattggccagcaaatgccaaagaatgcgttgaaggtgcagccgggattgccaatggtcaaaggaacttgtaccaatggaaaagaacagtttagaacacagaaaacaagaacagtgcacagattgtcatatgccccctcagagagtccagtaaaaggcccagttcatcttgggcctatttatgccacgaaagcccatcttcataaggaatataggccttcttcttccacactaaagttcagatttctttatatagaattaaagttacagacttgcgaaacttacactacagaaaattacttttgaggtgtaaaaaaacaagcactcgaccgatccaacgaaaatatctggtgatcacagatctgatgatctgttagcctcgagatattctgcacctgatttctcgatcttatagcatagaaaattatcaatccagtgacccggttgcacaaatggaaggtagaataatataagaaaaaggacgatacagctggaacgttgacaaaagaaagataaacacggttgctttcactacaaattaaaatggtataatactactccactaccaataaaagttccgctacaaccgtacgcaatattcagatcttagcaaattgaactggagagcatttctcaaagaagaaaaccaaaaagcctaactgaaagtctgaaattcaactggaatggatctctcgacgaaagatttcattttcttttggagtcctgaaagccaaaagagagaggccgctggttttgcgagccatgagcccatgaaggctacgcttcccacgggatcgtctgattcgtctccctcctctcgtcggttcttcccaacctctcccaacttctttttctggattcttgtggccgccacgcgccaccgcggtttttgtaccaactggggtacgaacgagagacgacctcgcgcgcgcggcgcgaaagtcgcatgtgccaacggcatcgtgccggcctcttccaccggatccctctttttctctatctctcgtggcggccacacgcctcttgctaatttaagccccccaacttgcacgtcggattcgtcgcgatcccccggacagatcgcgttgtcgcatggcggccacgcgcccaccgggtagtttattcccatcgcgacgaatatttcggccatgtttccatctcggagcacgtaatccgggatgctttaggtgaactgctccacgcctccacgtaccaactaccacgccaacgccaaagccaacgccaaagctcaccgtggtgtgtggtggccctttcttgatgaaagtcgtctgctccctgtacagcagataataatatgctcgcggttttggcgcgccttatgtttaaaaagttttatctttgaagaacagataataatatgtttgaggtcgtggctggcgtgaggtttatggaaacattatgtttactcttggtcggcttatttttatatataagttgggacagctggattcttatgatatatctagattagtcgtcggtttgcttgttacatgtataatagtttaaggctcgtgagtcgtgatgtcctcgagcttagctcatgtgggcgtggctaaggctccaaatgagctaggatgagcatatatatgcaaaagttcatgagcttggttgtgtgatgcaaataaactataagattaggtacaaaactagtatttatctgcataataaaatagtatgtaggagtgtaaaatatctttcatagcatttttcttgtttgctaattttaaaatttaaattgtggttttcctcctttttatcatggattttttttctattggatacagatattatctcattaacaagctttcagccaagctcagatttcaaatatgttgagcttgagcttgcttggaagcttgaagttcatagtaggcttggcttaagttttgcgctgagcttgatcctaacaattgggctcactcaagctcggctcgttaacaacattcatcacatgaccaggcattataaatatataatagtttcaatcttttcttgacgtccataacacggtagttttctttactccaagttgagttaaaattattcctttaagttctttaggattaatcagggagatggattctaatagctcgagtggatgtccatccgtttattgcatgtcaactaaatggctatggaaaattttcaaaaaaaattggcaagatagatcaatatgtaatatatcactctacaaacatgcaagttaaaattcaacttctacaagttgtaacaaaaataacaaatttaactgtaaatatacatatagtaatttgagttttgattgttatttttgttacaatctgtagaagttgaattttaacttgcatgtttgtggattgatatattacatattgatctatcttattcatatttttttaatttttttcataaccatttagatgacatgcaataaacgggtggacatccactcgagctgttaaaatagtttcccgattaataagtggtgaagtgaatgtaactcaacttgttttgttccttatggtggaacccattacccacccaagttcaagtcctaaacttgacacaggtgtttgtatttacggctaattattctttcagtgataggcgatacacccatcaacagcgagatgtccgtggtaattttatcaattttaagatatagcaatccactttttggatgtgcttataggggtaggatgtacgtgtgtgtgcgcattcatagggataagggtgcgagcgttgtgagcgactgcgttgtattgtatttctttaaaaaaaatccttactaagtgggtgttgcaaaatgtggaattagtgattttctggaaaatgaatgtggccttacagactttgtggctagctcattcaaccatccacgattccaccgtgtgcaagagttatttattttgtcagaaaggtaagagcaagctgttgaactttcggttggacgctctgaagtctgaactggtcagtgcgtgctggaatagccatacggtgcaatgctccgggtggacttctagtctaccccaataaaatggactaaactgggcatatgaagaaagagttggacaaacataactgaaagagagttggggttatgtacgtatgcaaaactgtgttctgctgcctgctggtgtggatatttcgccaattggatacgaggcttgctacagatcaagctgatctttttccctattcatagacatggatgtgcaaaagcattgtcactaattactgttctggcttggatatcaagatattgtatgtcttgatattacagaatccgtatggttttttttttaagaaatggcaggagctctgccaatcaaataaaatgaggataagagagtaccaaggccggcccctttagatcacaccagtatatgttcatttacagttgttatccagaagccataggaatcagataagggattgttgtcaatatgcagaattgctaaattaagaatgtaataagaattggagcgctaactgtatattactcttagctttatccaaagaatactggatgtattgtaccatctaataccccctaaacaacacccatatgcataactaaaaaccagaaaacaacaaccacttggatatctttgcaatcttttgtgcttcttgcgggggaattaatgggcctgtaatatcataaaccatattttatttctgagagtacataatattattatccatgacaatggcgcttgtaagttcattaatatccattacataaaaacaaaagggtaagttcaagtggaataatctctccaactgtaacacaaagaaaaagagagatactcctagatgagttttcagttcaggctatttgattccctctgtcttccttgtgctcacacacctagtactacacgatgcaatgctcttttacaacaaatattcttgtggttgccacgtgcctcgccagtaatttagaggctaagattctagctatgcatcgaaccattcaagccttcccgtgtcagccacgcgctcgggattaatataatgctaatatgtccatcacatgagctggatacatctaacttggccatcctccttttagcacccatttgcactaattagtccatccttgacttggaaaatttgtggtctttccatagccaaatgacaaagaggtgacaaaggattaggtgagagtttacctagcttgtgccatgattataaatagctatgagcccctagatatgttctgcccataccattaccatagacgcaggtctttctcaggaagtgaagagagcagcagagttgcatatcttgcagggtttatcaggtaagctctatataggtggcttcttctcttctgagctcttcatttttatttgattttccttttgctagtgtcatttttctgcttctagaaaatggagaatactcatgaatgtcattctgctcctgtttcaatacaagtccttgacctgttctctaactaataaggagctaggaagctttgatctgcagaagattttccggcactatacggcatgttgttgatcatctgacaatgttgccacaatttcatgaagttctctctgtaacctttgtttctttcccaatctaacaaaatctcggccggcaatcttcagtcagcccggcgaaaacacgattccatagagtttatcttgcggttgaatttccaaaactgaagaatttaatgccgatctttcagatatgatcagtatttcaaccatcggtatatgaaatcagaatgcgctaatcatcagtataagctgaaatggaaccaataatgcatcttactcatgtgcatttccttgtctgttataaaagttatgccctttacagctttactaatgtctaatgcatgaaatagcagaaattttctaacacctggtgctactgtaatgcagtttgcggcgtaaaaggagcagtgtgtagcaattaactgaaactcaaatcgtcgaccgctaattaactgaggtattcagacaaagaataacaggcatcatgcaacggtggacgcgcaacgggatgctgaacttctcgcagccggcgtcgtcgtcgccgttcggattctacgacgccggccacggggcgtcgagcagcggcggcagccggtcgcacggctgcaggagccagaacaaggaccagcgcaacctggagaagaacctgaccaaggtgaggaaggagtggatgaaggtgaaggaggagatgggctacgcgaggctcctcagcgagcacctcagcgagacggtgacggagaccgaccggaaggtggctgccatgctcgaggagctcgaccggacggacaagtacatgcaggatatactgtcgtcccagcagaaatagtagtgacccatgacatcagatattcagatgcgtattttgatggatttctatgtatttacctagcagctagctagatcgtcagcttcttttctgggcatttttgccattgtggtattcggttttttagcagatcgatgtcccggtacagggtatatataaatcatatgttaccgatatgttctgaaatgtcgttaaaattcttcagcttcgcctccctctatacatgccacttccttggttagttggtttgcttgatgagtcatctcatccgattacccattacgtaagataaaagctagcagcatatatatgccattaatctgcacaaggagcaagtatttgaaacgcaggaatttttccggccagttcttctgaaaaaacaaaacaaatatatatagctaggttcttgtaaaaaatatttataaaaaaaaactgaagttattgcgtttcaaagagaacgaggtaaccatcgcgttggatcaagttcctcatgtattttcggagcgattagctttcattagatttaatggcacgcattgtgcgtgctgatcgaacagtacaacctgtactacacacacagtactacgtggtagcagtacaagaggactctataagtggaagcatggcaaaggcgacggactaactttgacccgaccaacaaatccccaattagcaaacaagggaaacgttagccctttctcttcttctctttaccgtgcaagctaagtccaggaaagtgaaagctcagggtgtcgattacatcatagctgacgatttctggggggtggtacgtagtagctagctactcctagctggctacccctctctcctagcaaaaggcaaatttatctactccgtatgtacaattgtcaaacgtacgaggagacagcaaaaatatatatattgtgtgtatgagtgcgtgtcgccattagtctaatgggtgcgacttgattagtgattacccacttgggaaggcctcccctgcattatgccattaacaaaatcaactcgacgacgtcaaaaccaggcgactcaccccggcctaggacggagacgatacggtgggcgccgtgcctgacctgacgcgcctcgttccctctcccgccgtattcaaatgcaaatggcagcacgggctgggctccatgtacatgtgatgtgagcatagtttattttttgatgctccctccttgttgatgcagagataatgagtatctcgtgcgtgtttctccggaaaggtaatttaatcccgatttggccttggatgggccagagatccacgtacttggatgttggctcccgctttattttcttttcctttttaaacactaattacgtttttttttgagaagggttttaaacactaattacgtaagctggaccccgggtgtttctttcagaagtaagctgggccaggtgtgcttagtctctggcaggtcaggtccatctctaccccagcacacgcttgctgttggcacggacggcccaaaatgctgtaactctactcccgggacaaaagcccccaaaacatcgaaatgggctgagaagcccatttttccaatccgacgagtgacaccacatctgacttctgaggaataagttcactttagatcccttaatttgtcgtctagtctgaaattcatccctggatcgtaaaaccaaatatgacgcgtccctcaactagcaaaatcagtgcaaataagatcccaaggtggtttggacgacgatttcagttgacgtgacgcatacatagctggtttgacttggtctttgtcctacatggcggtgatgtggcattggaagcaaaatataaatttcatttttataaaaaatgtgaggcccacatgtcattgggtcccatcctcctctcaatctccatggacggcggcgccgaacatgggcaacgcccgctcatccccgacaagtagaggatagcggcggtggcatcctgccccacccccaccacgaggggaggagcggcaggacgagggatcacctggcgacgtggaggcggtggtggcatcgatgaggagggcacaaaatctgctggtcgtcgtccgccttgacctcgccgaacgtgccatccccattcaacctccctgcacccctcgtgtcgtcctcgacctccacttccttcccccgcccgctctcgagcaatctcggtgggctgaccagatcaaaggcaacagtggtggtgagttggggtccgtagcggtaacatcagcgaggagggagtggtggttgagggggagacaatcatcgtccgcttcagcctcgctgaccgctctatccttagctagcctccccgcactctttccctcccccctggcgtcatcctcgacctccacttccctcacctgctcgttctcaagcagtctcggtgggcggaccagatcaagacggcggtggctgcgagttaggggcagcgatggtgacatcgacattgacgaggagggagtggtggaggggggagacaggcaaagaggttggggacaagggagagagattggtcggagggaagggtcaaggaagggtggaggctagcggcagaacacgtggcgtcgtctcgtcgatccgggaagcggcgacgacgacgcccatggcgagttccattgattatgaccaaaggagcaaggtctccatctcctccctttcaacccacggtgataagaggagaggggagaagaaggcgccgccgtccatggagaagaggagggtgagacccactgacatgtgggttccgctattctgttttaaatgccacgttaccgttacgtaggacgaggatcaagtcaaactagtcacgcaggtgccacgttcgtcgaaactgccatccaaaccaccgagacaaatgaatggatctaaagtaaacttattccgacttttaagcatcgttcatggtagactatttcacgtctaaaaataatcataagagagcgatatataaaccggtttgctgctgcgaattcagttgccaaaatcaaaagggaaaattgtaaccatcacgagagattctgaaacatggatcttgtggtgctgcagcctcagcatgcagatgtacgttgtcaaccggacggtatctcaaccggtataatctgtatattcttgccgtgagcgtcacccgttaaaagttcccatcgaactgagatacgtggcttctccggtatctaccaggcttaatttctctcgcttcaggtagagctgccaactacgtggcctgatagcaggccatcaaaatgtcggacgaatgcatccggtggcacgcgtacgccgtaaaaaaagtggcaactatagtagtactattttgccaagcgaaaacacgcgaaattgggtgaaaaagaccgagaaactggcagtgggcgcgagtgggtcactggctcactgcgcgcggggcgcggacacgttggacgggtggagccgtgagatgctctgtgtggtgacatccgaagcgtccaaacctgtgtacatgggccatggcccatggggctcgtggtcgaaaatgcagagacgtgtctgctttgcctgcacttttttatgctgctctgttttacttactgctccatcgctgctgattacctgtgcgtgaattgcagtacaacatgtcagtttacaatcgagttgtattctcatagtttcatgttttttcttggatataaagacgttctaggatgacatagcattttagtgcagtcataacctcgaaattacaacatacagtactaaattgaggacaagagaaaatattttttttttatttcacagtctggcttggctattggaaatatcatacagtgtcttcactggaataatgttatttcgcataatcattcgaacaggtagccaggtaggactggaaattctggaaagaaaaaaaaagaaaagggaaaaaggagtagttaggcgggcagtctccggaaatgaggcgccaatccaaaacgtgagacgggaaacgatcctcgcagccccgcggctgacattatcctcctcaccatcatcgccaccatccgcagcagcagcagcagcagctcgcgcgcataaagccctccacgacatccgcacgctcccgcggcgcgcgcaggcggcaggctaaggcaaaaggcgaagggagggagagctagagctagcgctcgcggcagaggcaaaggacgagaaaagccggccacctccgcccgccgacagccatggcagcaaccgaggcgccagtgctgcgggccgccgggcccgcgcgccggccggccgtctccgccgggtccgcctcgcgcctcctcctcggccaccgccccttccccgcgccgtcgcccgcctcgtcccgctcccgctacgcctcggcggtggcggctggcgtccgcccgcgcccgcgcccgcgcccgcgcaggccgcgcctatcggtcgtcgccatggccggcaatggtgagcgagccacagtctggcgttacttgctgtgtttgttccagttctttttttttttgaccctggacgtggggatgatggtctgcagtgtaaagtgtgcactgacggtgttcgatgaaatgggccaaaaggattatctttcgttctttctcagagttgaagatgattatcacgcagtattatagaatttaggagtgttctattggatagtgtattagttgatcttttgctactactagttttgcaaaagagaaggttgaggcagcatgctggcgaccgtgcttaggattgttgatgggctgctgctttgttagataaaccattgatgaagttgcttctaactaaagagtaattggtttagaagctcttctggagctcataactactcatggcattgatttctgtaaatggttgttgtagtactagaatatcttcccaatagaacaaactgagaagcaaggaatagagagatgcgaggatatggctccataaacatctaaaatagaatatacacatagctatgtaattaaatgaatgtcctctccatgtttgtgtagttagcaaaaagaatatggtcgatggcattttgctcttacacaatagacttgtatgcatgtaacttatcttgtcgatgcaacatattgaataaatgctttactttcttttaattgctgtcttttacgcatctcctaatgaatattgtgcagaagtgagtttctattttgcagtaaagtttgtcattaagttaattacataagatctggaagccaagtctcttggattccttttcacttttcattttgtagattcacagttttcaaccaaaataaattacattgctttcttcaacctatcgattacattaatattgacatattttacttttgtatacagatcggcaagtgcctttgatggattaccgcaatattggtatcatggcacatatagatgcaggaaagacaacaactacagaacgtgttttgtactacacaggaaggaacttttttaatggtgaggtccacgagggaacagctacgnnnnnnnnnnnnnnnnnnnnnnnnnnnnnnnnnnnnnnnnnnnnnnnnnnnnnnnnnnnnnnnnnnnnnnaacaaacatagannnnnnnnnnnnnnnnnnnnnnnnnnnnnnnnnnnnnntcttgaggttgagcgtgctctcagggtgttggatggagctatatgtctatttgacagtgttgttggggtagaaccacaatctgaaaccgtgtggcgccaagctgataaatatggggttccgagaatatgttttgtaggggttttaaaannnnnnnnnnnnnnnnnnnnnnnnnnnnnntttagaactagagacatgataatcgcaaatttaggtgcgaagcctttggtaatacagttgcccattggttcagaggacaatttccaaggagttatcgatctagtcaagatgaaggttattgtatggacaggagaggaacttggtgcaaaattttcttatcaggatatacctgctgatctccaagagatggctgatgactacaaagctcagatgatggaaactattgtagagttggatgatgatgttatggagacttatctagaaggtggcgaaatagacgaggaaactgtcaagagattgatccgaaagggaacaatatctgccagctttgttcctgttctatgtggttcggcctttaaaacaaagggtgtccaacccctgcttgatgctgttgttgattacttgccatcaccacttggcctaccaccaatgaagggcactgatccagaggaccctgaactgatccttgaaagaaagcctagtgatgatgagccattttctgggttagctttcaagatcatgactgacccatttgtgggatcattgacatttgttcgcatatactctgggaagctggttgctggttcatatgttctcaatgcaaacaaagataagaaggaaagaatcggaaggcttctagagatgcatgcgaacagtaaggaagatataacagttgctgtggcaggtgacatagtagctcttgctggtctcaaagatacaattactggtgaaactcttagtgacccagataagcctgttgtgcttgaacgcatggaatttcctgatcctgtcat

SEQ ID NO: 4533 - DNA, 19581 bp, Oryza sativa
ccacctagtaagaggctaagctaggccgggcccactaatccggatgcgtcaaccaaaccggactccgactcgagcacagcctcgccgatctggctcgaccaagccgcggaattccggaagcgactcgctctcgtcggctcgtcgcacgcgcgagcccactttgccggccaccgggatggcgccgccgcggccctcgccggcggcgaggctgctgagggagtacggtgagtgctctcctctcgctctcggcctcgcgaagcctctccaaatcagggctctgctgcggtggtgggagggtttttgggatctgatgcgtcgggggcactactctcgcttgcagggtgggacctgttgctcggatcgattgccgcgttctacgccgtcatggtgccctacaccaaggtggaagagagcttcaacgtgcaggttccggttccggctccctctccgttgagcatccgagtggctggattacattgtagtcgtgctttgtgtgcaattacagtagggattttctgttgtttgctcaagtagtagtgtgtgtccttattctctgttgctgttcagttactagacacgggattcaggatgattgctgataatttgctaatgttcattttggttgcaactggttgctagatgatattggtgtgcacatgtgaattgtaggatagtatgacttaacaacaatcagcttatgtgaattcatttacattttctgcagacacgcagaatccatgctgaatattgatgaatcgggtatctttgccgtagacatccaagatgcaccctttctatatttggtagttcatacatcatatatattatatcatgagcgttgaaaagctgaagttgctcaagttccagtgtcacctatgcaatgttaaagaagtagaggaaaatttgcaggataattatgagtttcaactttcaacccttcatgtctaaaaactaatgctttatgtttgataacttcccttaggctctgcgtgataatcaatttgaatgaaatttgctttgggaaattgtttcattctctactgctcatttatctttcctttgcctggtattgaatcttttacttgctaattcttgcctttttccgtttagtttggtaaattttttttacctattccacagtgtatgtttgcacttttactgtaatgccattacaatgtttaggctaacactttgctcatgtatgttctaggccatgcatgacattctctaccacaactatcatattgagaaggtaatcatttctgctagtctatcaatacaacatgcttgatgcttatttaatttctttcttcaatttgctgcagtatgatcatttagaatttcctggtgttgtccctcggtcatttataggtaatactatgttcacttgaagccttgatctgtgcactatgctacaatttttccgctaatgaccattgcttggctcaagcataatgaaatggcaagtagatggtcaaggtcagatggcattaccagtttaccacaatatactcctactagatatgcctgtagtgtctatatatggtatgactggccttgcagattttgtaatctggacatgacgcagatcattaacaccgtttactacatatattcttcaggagcattggttgtatctgttatctcatcgcctgcagtcttcgtaatgcatttatgtcatgttccaaaggtttatggtcttctagcaggtgctgtcaataacttagcacatgtcttcttgcatgttgtatctgtttttgttgccatattgatgttcttctattttgcccttttagttcggatagtgttgggtagtattatcctgatgactttgagacttctccgagttcaggtattccttttcacttcttgttctgtttaaaagggtttattgcaagtatgcactgtttctcagttctcctacctacccccaatattctgaaaacgctgtttccctgaaaaggggtaaacctcaatccttttacctgtataaccttctcctggccttgaagtgcagcaactcatagaatggccaccattttttttaaaaaaaaggaaccttgcttatcaaatttggtttttgttttgatgcgtctgtgaatttgccaagggcctaagatgcatggtcgtcttgcctgtggcatacctgctgcagtatgctagccttgtttgaatcttctttttttggcttggtttggaccatataccttacgatacctttcactctgtgccatttatattccatacaaatctggatagaagagaacttaatttttgtttctactatctcatgcacaaacttctaagtgctgtatatcatcaagatatccctttgggttatgtgtttatgtcaaactgttctatgcccatcttgagtaacatttgttttctataatttgcactgaatcgtcccgtgagcacgagtctgttattctgtccttggacaccataacgtttttctcagttcatttctgatatacaggtaaaaaggaagtttggtcatcatgctgaagcattctatctgatactaactgctacccagtttcacttattgttctactcaaccaggccccttccgaatgtcttagctttagcttttggtgaggacattgtttaaatcaaacacaagtctgttcgagtgttactgatttttgtgacactattggcagtagcattaatcatatgtggggtttgtgtaataatcgtgcaactcattgtttctttctgtctcgcagttaacttgacatactatttttggttcaagggaaaccatcgacgcacattacaggccctggtatgctaattttttaacacttttaccttactttcacaccattttgtttgcatgctgctgttttcacatttttgtatacactgcagaaagcaagaatttatttcaattcgagttgcatatattgttgaattcaaaatttgacatcctgcactgcacacaataactccaaagaatctgagttctggacatgacattctaaagttgcaagtttcaacatgaaactgagaaattctttctttactcttcgttcagttcaatttcttgttgatttactaaattgagaaatgattctcagttatttatttgcagaccaataaagattacaaattggttttatagcattgaaagatcctcagttccgctttatccttctgaagtaattctccatattgcttgcagattgtcgcagcagttatttttaggtgtgacatgattttgcttcttggtacaataggacttgcacttttgctggtgagtttcacctacaaaacctgaatttctcttggcagttgcacagtcatttcatactcttttatgtagtgaaatctttgaggaagcaagggtccaaagtttatattactcattttttgtaggctatgcacaaatagctcttatctcgtacactaggtacaaataccaattgtcaatactctctattacttcccaactttgtgtttgttcaaattcaatgcaaagtaactttgtcatagaatcataagggcttcatggttcaaccagattttgcggttttgtgctttcatcatttgtgtctctgtagtgaattagtaaacttgtttgaaggaccatgaggggactgtggttaattatctctataagttatttttattgaggcatggctaataatctctaagtgagtaacttggtatgtcaccaggctattaaaatgatagcactcacttatactatcatatatcaagttgttatatctatttggactttgtatgtattcttctgcttactttatctgggaaagttggggctgaggtgcaatttgactatgctgtgacagagcaggtctatttctctattggaagcaatcaaatgttgtgtaagcactgccattatatgcattggtatgttgctttctactttcttgaactttctccaatagtctaacagaagtctgtgcaaatctgcaagaaacatttctcactatgaataatgttcttaggcttcactgtactggttgactctatactgtggcggcgaatcctgtggccagaatttgaggttttgtggtttaattcagttctgaaccggagttcagagtggggtgtatcctttttctatttgtgtgcatgtgccaaactgcagtttccttttttttttataataattctagttaatactttcagtgcacaatgaaacaccgtttttttcctctttagccagaattttattcttttttcctagcaaatatatgcatgtgttctctctttcactaagtcacttcacggagacattttcatatgcactcctttctctttagccagaattttattcttttttactaccaaatatatatgcatcagttctctctttcactaagtcacttcacagagacatttcatatgagaatatgcaaagcacatatcttttgtattaagattgggaagattgaagtttcattttcatatgcactgaacatgatgttaatctctattagtcacatgaatacaaaaaaggatgcaacatatatacacttcttgttcaagacttatcctcttcttctttttagattcatgtggtgaaatctatgtattatctcctgaaacttatgcgaagctcccagccctgttatccatgactaccataaactttagacacattccatccattggtacttcacctcagcacttccacgctccatgctggtagcatatcctctttgcatggtgagataagaaacttccatacaagaaattgtgctacttacgtggctaaaaagtgcatgtgccttttgcttgaacaagtatataacttattccatgccttcttatcatgtatttaatatgcatgaaacatgatgcttagctagtaatagttgattggcttcccatctctacatgtactttatatcaaaactgttacttcatactatttgattgagtcaactaattatatttttatgatgtatcttttctgatggtggtactatcaatgcattattggttattgttttttttatttgattttttattggaagtaagaaatgtatctcatgaagccttttcagtgacaggtcggtgctcttcttgacagaaggatagtgccatacatacttccagtcttctcatttgttgtgctttattcaaagcttccacataaggtatctctacatctcttgatactagttccatccttatatttggccattcttgtacatgatgactgatgttgtgtttcaggagcttcgcttcattatggcttcgattcccatgcttaatgtgtctgcttcactagcagcaagcagaatgtgagcatacccaatcttctgtcatatctagttcctactccctctatttcacaatgtaagtcattctagcatttcccatattcatattaatgttaatgaatctagacatatatacctatctagattcattaacaccaatataaatgtgggaaatgctagaatgacttacattgtgaaacagaggaagtactattttatcaatttactgatccaagctaggaatgctagcttcattatcagaactccttttatttcatacccttcgtattgaatggcgtttcctctctttctttgctttgcgatttcgacccgtgaatatatgtttgtctatcttcagatataataacagaaagaaaactgggtggaagttactttatgttctcatgattggtggctttctttccaggtacaataatttaaccatggttatattgtaaaatattaatatggtatctttttcaagtagcacaatatatgctactgttggaaactcacatataattatatagtctaggatactctggtgtaactttcatggcatcctacaataattatcctggtggatatgctctaaaggctctacatgaagcaggtgagacctacataagttatgtggaatacgtgaaattatgatagttttcttctgttaacaaaactgcaagggcttggctgaaccgcaagcagcacattacaaattgaacagctagtagtgtctcatctagtggtgtctactgttttagcgattatggggtatgttgacaataatatctttattgatggcacatactattggttgcttctcttttaccagattctgtaatgaaggacaaaattgttcacattgatgccttcactgcaatgagtggagtttcacgtttctgtgaaagtgaatatccttggaggtatcctctgtagtgttttatctttgttagtatcttttatcatgccatttatgagcatctcaaaatctgttcactggcagatattctaaggaggaaaaaatttccatcgaggaatatcaggaaagaaatttcacatatctgctgaagtaagtttacttacttcctccgtttcacaatgtaagactttctagcattgcccatattcatttagatgttaatgaatctagacatatgtatgtatttagattcattaacatccatatgtacgtgggcaatactagaaagtcttacattgtgaaacggagggagtatttgctaaaataccttatgcacttatttttgttactatctggatatttaaagattgaagcggacttttgcaagcaccactgagaagtggggcctacatatatggggagttcacctaatgttggaaaagtccttgtattacctccatgtttgtttgagtagaagcaaattaccgaacaactcttgttaccatgcatgaataaatataatcaaaggcacaactggtactcatttcacgctgtaatgcttttcttatttcttattgttgtaccaaacagtgaacaccgccatatcagtggctacaagtgcttgtttgccgtggatggattctccagagcgaaaattcaacctcgaatcccactactctcactggtacgctatcattctttacagagtagctatctaccttatcggcatgcagattacatactccagccaaatgccagcattgccatcctatttctggttctgtcaaacattaaactcacggtggtgattgaatactggctctggtcgctaacctcagcatttactgcaggtgaaagagccaaaagtgtttgcacatgggaatacgagagaccctgatattctttcgctgaattggcccggttgcccttgaggtgaggatactgatcggatctctaccacaggaccactaactgccaattgtgaagatgcccagcctgtgtaaatcactggatcaatcgagccccttcccaaaccccagctcggaagatactacaccttgccacctttgggctattcaaggctcacactttagcgcaaaaaactcgcgtttttatgttgaaaccatgtgcttcggtttctgacctagttgctcgtatctggtggccaaaaggaggggaaaaaaaactgaggaataggagagaccataacaatcttgtgctctagcaagttgctccatttcatacacaagtaccatgtatcctatcttacattacgtcaacccacttgctgtatagcgtgactcttggccgatgacatctccgtcgcaccattttccacgcattggccccaggcacggagcaaagcccgttggctgtaaaatcatgcgagatctctgctgaagaaagaaaaaaaatgatttgttgcaatgatggatctgtcatggggatgatgggtctcgagttcttattaccggcattagaattataggagtctcattaaacttttcattaaaatatattgtcatatggagtattcattagaagaaagggtataggcttatctactttattaagtcccttctagtccttcctagatccgcccatgattcgctgaaccagtgattcaatgtgtagccgtcgacaagcttgcttggaattaagttcacaatttcgatcgaatttaccgtctcattgtggctcgcattttcaagttttcaaccgcaagcccttgcaaacggccggcgagctaggcggtggccggcggagcgagacgtctcggcggtggtgtcgccgtcgtcgtcagttcgtcgcttgggacgacggaatggaagtcgtcgtctagattgattaggacgggggagatgtcatgggctggccgctcatgggacaaccgaaagtaaagcatcagcaccagtaccagtacactactctactcgccagttgccagggtcaaggaaccgggaccccaccggcttcgattcctcaatcctcaggcctgttatcattattcattctcatcatctcatggtcggtcgcctcgccattagttacgacgagcacatcgtccctctcctcccgtttttatttctcgagctaattcagggagagagagagagagagagagagagagagagagagagcagcctcagcctccatccaatcgctactggccggggtgaacccaactcccgaatttggtacttgcaattctctactaataataacaaatggtggcatccgactcactggcgagagcgagatgagatcgagtccctaaccaccacccaaaaaagaaaaaaaaaaacgcacacacacacacacgaggaaacatgggttaactgaactcctccccctcccccccggttgctttacgctttacgtggtgatttatgtacgattgattatacttgttttagttccggctcggttcacatgacgtggaaccaacacagaaaaaacgcaaccaacccaacccaagcgggcggccgggggcagcaacagcgcccgcgagaaggcacgtcgcgtacggggcgcgcgggcgcatttgatgcggtggtggtggtgcgtgtgcgcgttgggagggagtcaggtgaggtgcgggggatgtacacatctgcccagtgtgcgcgtcagatccaaacccagacgagacgagggcgagccgcgaccgcgaggcgacggagacaaaagaaaaacaggagaggcgacgccgcgtcggccacatggagcggggacgcgatgagcacacgggacgacgcttggctgcgctgctttgcttggctggctctctcgcccatggagcgagcaaagccaacccaacccacagcaaaactgagtgagggagacctaatctggttgagatggtactatatccatccaatccaagtatctaattaccatcttatgaatcagcaccgtctcatcgtggggcccaccggcttccagggagcaaaacttttcttcctcttcttctgtttccttatttttgcatctttgtaaacttgccaacacaaagagatttttggggtgcgtcatgtgtatatatgcattcggtggcctcattgcgtactaattaagaaaatggtcaccggttcccgttttcgttttcagttggcctcatttgtgtgaggcgatagatcagagagccagtcggcgacgttgaacgtgttgatggtaacacgcacgcacgcacccctttgacccccatcaagaacatcacaagaacaggtgcttccatgtcaaggtaccgcgctttgactgatggccacctaactgggagccaatagcaacaactaaataaagcaggtacaatagcaactataaatcagctataaatatattttaaagagataaaagaagagagagaagagctgcgggctgtagatatatagccagctgtagcacggactccaatacgtaatgtatgtatgacatgttggaccaactattaatagtgtagtaagcaactattatatgaattgatattatattaattataaatgatttggagttagtagttggctatactattaaacttgctcttactggcggtcattgcaattagcaaagtgtgaattgaattaacatctgaaacttcgattgcaacttgtagctttcccgggtcgtttgtgaataactcggagcataggaacagtggagcttgaatgcaagaccggggataataccatatgatgcatacatatcaaaacaagctctttggaagagtaatcactaaaataaattcctttgtcatttcaaaccttactaatactttgctaatggcaagatttagcgttgccaagaattttggcaagaaaaaaaaacagtttatttcagtgactaatcttcgtataatatattcgtagcaacatgttaggtttcaatgtttcatctaagtttccatgaagcttctcccccttcctatctctctcagtatggaaaacgatttgttatccaaaaagtataatatatatttttactacaagggcaactctcgaaaaatgacttagattcccgcggtcggtctttcccgcggtcggtcttgctagcccttctcctctagtgtcctcagctcctcgccagcgtcctgagagggaggggacttgatttttaaagaacggcttgttttaacttgacgctaagttttccccatagtaattggttattgtgtatgcatgggaaatgagtttgctctaatcctcctttgccgataatattgggtttactatcctcgttagtcactataaaaaaaaccatctttacatatatcctctatttatttttacaaatagtctgaaatccttaaaattggagaccgggccggccgctccaagccacaacacccttatccctttgcctccctctctccgccctcctcactcccctctccccctgagctaataatcaaagtcatatgctcccttctcctcctaggcaccactgccgacgtgcacccctgtcatcgcctcgatgtatgtgtccccattgtcacctctttcctcatgcacagctacgctaccaccaccacagccactgcatcagccaacaaagaggccagggccaccaaatctgatgacactggctctcctggtagtgggttcggttgggcgatgttggacgacgatgagccaaagtcgggcgcaggcggggaggatcgacgaggaggaggagcaagactgtggtaggactcaggaccgtcaaatatagtggtagaggttcttactagcgagtgttgtggcggcagtagtcctcggttacttggcgacgacgactatggcccagggaggtcaaaaatggcatatcggggacgtggatggctgcttcatgggcatctagcgtgagcttgttgaggagtgcgggttgctgacccgagtggcgcggccccggtgggttgatgacggtcgttggtcctgggcgtggtgacaaacgcaactcagtgacggcgatgacgatgacgaccgtaactacatgttcttaggggatttgtttctctttttcccccaaaaaaaatgagaaaatctattctataccactgagtttgttcgagttcaacgatttgctatcgatattatctctttctataatatactggcaactttatcaattgttctacgatataccattaggctgagccttctttttaaaaataaccaaaatgacctaatagacatacaaggttaacaattaatttatctcattagaaatttcataaaaatatgaaaacttttatgtggcctccttacataacatggaaattcgtatagaagtttcaagttttttacatttcttttttataaaaaaaatataatttatttgttatatgccatataaaatattttttattattatttttaatacaagtcatctttcataaactacataagatatttttgtgctattatctcttttataagaagatttttctctcatatacgacataaaaatatttttttacgaaaattaaatataccagaaaagactcgaaacttgtatacaaacttccatgttgtgtacgaaggccacataaaaattttcatatttttatgaaacttctattgagataaatcaattgttaattttctatctctaagagtactttgggtatttttaaaaataaggcctagcccaatgacatattatagaacaattgataaagtcgtcaatatattatatattatagaaagaaacaatgtcgatggcatatcattaaactcaaacaaactcggtggtatagaatggattctctcaagaaaaatcatctctgcatgctattggcttaaccttgttgcttgtgaaaattgattttcataggtagttggcttaggctgcgttcgaacctgaaggttcccaacctctctatctcattttccatgcgcacgcttttcaaactaataaaccgtgtgttttttacaaaaagtttctatacgaaaattgattaaaaaatcaaattaatctatttttggaaaaaaaattagctaatacttaattaatcacgcgctaatggactgctccgtttttcgtgcggagggatggtttcccaacccattctatcgaacgtagccttaatctatccacctatgaaaatttgattttcatagatagttgaaccccacctatgaagatcgttgatttttacatgcctttgatcataggtggtgcgctcggccatctaaaaaacttattctgaccgcctgggatgtgtgatttcgttgcagcgtgtagcaccaatataggtatgttgctaatataacttactgaacctaatttattatattttatgatttagaaaaatactcctgacctattcctagtagtattggctcataaaataaatttaactttgtaaatttcaatccccgttacaatatacaagaatctcaatagtacaataacttcaccgtgtttcctttctagacgtaaattcaacatatctcgttttaatacgaaaaagttgagcaatttgatggtgacaatgttagatgcctgctggagcataaatctggactagatcgatagctagatagccgaaccacgaaaattgaagaatgtggtcatgatgtgagcatacattaacaaggccaaccaaccaacacctatacctcttggaacaactcaactcctagtagttattaatttccagacaacggcaaatcaagccagcaaccagcgagttttgaccagataccactctgtacgtcgccgttctgtgcacaccagaaacaataacaataataatctattaattttgcgctgtactctctgcaggttaataatacttatcgttttttataagggcacggtctctaaagaacaactttaaccattattttttattataatatgtataaaagtgttaacaaatacatgattttattaaagtactttttaaaactaatctatacatgtaatcaccatatttgaaagacaaatattttagaaatgatttataatcaaagattcgagtttaacctcactcttgtttaaaacgataactattatgagtccggaggaagtatacgtagtaccgcgggtaaaataaatgtaaattgtacacttagatcttcttccattccgagataaatgcgagctggattaattccctctgcaacaacaacagcaaatttccttgctaattctgaagagagtgacactgcacgggaagctcagctcttccgggcttcaggcacacgcaggaaacggattggtctccctgtcaacgaaagctccgagttcccaacttatacgcaaggaaatgagaaccctgctttccacagcttgaaagttctcatcaggctttgcaggctcaaacaaactcaggggatatttagtaggaagcaacctgtggttggcaccttctcctgctatttttgccacacttttacacttatcaagaacaatttgcagaagtaaaaattgaataaaatgtaccatccccattatttcctacttattgctttgattatcaacattctccaatacaaatgtttatgaagctactattagaaatataaccatataaaaatatttttcatgacagatctacctatatcatttattcatttttctcaagctaaatcctaatatctctgtattcacgagcataaaaattaccattgaattcgcagacgctcgcgtcgccctcccctgggatggcacgggaggcgatgaacccggccgcctctttcctcccactcctccccctccgcctcgccgccgcccgagcggccgccggcaaagccggccggccgcaaggacggcggcggcggggcctctctcaccgacctcgcttcgcttcgggcgagcaaggaagcgtccacgacggggcggcggtgaccgccagatccaggccgctccggccagatctggcggggtggcggctagcggcagggagggcggcggcaaaggcaggggcgtgcggcgccgggcggtggtggttgaaggcggcggggatggcgatggcggtagggatggcgtcagccgagggcgcgaaggtggcagcggtggtccttgtgcggcgacggcggcggtgtcccccagatccgctcctctcggccggatctggagggtggccagtggtggtggtcggcgacggcggtcgaatcgcgacggctggcgacggcagtgggcgacggcggcggcggtggtggtcgcggcagttggcggcggcggcggcatcggctgacgatgccggcggaggacttggcggcagcgtggcggagggcgacagcgaaacggccgctggcagtgtcggcggcgattcgtgaagccggtggctggcgtcggtggcagcggcgactgcggctgacttgcggcggccgtgactgtggaggcggtggtgacgttggcagatgagggttgctggcggcggcaagtggaggcggggaaggagtcggctgcgaggtgaggatggcgacggcgaggtggctgggcgtcgatagcagcggctgctgtggtggtggctgcgactgcggtcaccggaggtatggcggcctcggatggctagctgagggcgtgggagacggccgtatttggccggtgcggcatcgtttggtggaggggtcagagaccggcttggcgcagagaggcgcaaccgatggcagcgaaggccggctcggcgcgagaggcgcgattggcggagatggaggctggcttggcgcgagaggcgcagctgatggagggaggctggattggcgcgagaggcgcgtccggtggaggaggcgacctaggtgtgaggaggagctgccggtgggtgtagcgcggtcttaggcgcacgaaggctggccggccggggacgccggtgcaggggtcccacatgttggcagagtttgtgtggtggtggagcatcggtgcatcagccgtggatttgcaggtggtgagtggcgggtgaaaactcagttcggccttggccggactgacaacgatggttcattctccctcctgagtgcgttgtcgtgctgtctcagccctcaaggatgattgtcgggcgaaagcccagtcttggctcctttgagtctcgacggacggcggcggcggtttttccttcacttctcttcttgaagacgtcgttttggcatcccctaggaggcgatctcgtctgtgtccctttgttggtctagtggcggtcggtcacgcttagcggcggccggtccggtgctagccttctcctgggcttgtgtgttggcgatgtcggagtgtgggtgatggtatagtttttttcctttttcctggttacgaccctccagggttgtaatcttgtaattttttttcttctctatcaataaaacttcgcatcgtctcgtgcgattggttaaaaaaatatctctgtgttcattaactattcaaatttttaggttgactgcacgtatttaggacacaatctatttcagaaccgatgtaattactgtggacgaagtgagcttaaaaaaaatcagtagaaatggacagtaacagtttaattatgagctgggtaggaccgtaggagagagagagggcgaggaaagcaaagtgcgagtttggtggtattttcctcgcatcgcatggcatgcgttcgttcggacggggtgacgaggtgagttggcaccactgcctcgtcctccccctgttttgatacctccatttcttatcccctccaaaagagaaaaacaaataatacaatcctatctatcaccaaggaaaggagcatgctttgctaggtcaacaagagtatactacatatatgcaccaaatattctctctctctatctctctttcctgtctgtcaccgtctcttctttggttcttctatctgaaattctgaatgaatatcttgccttagctgagctaacctaaatcatacccacaaagatgggtacaatgaacagtcacatgggtgatgaatgatgaatcccctggtttatctgccgggtcttgcgaggttgtctacgggcttaattaaccccgccttcgagataaggtggggaattcattaggaaagtaaaaatggtacgaaaaaggtctatttgtgtttttgactttaaaaagatgtgactcagccctgaggcttaatctagcatttttagaaaaaatgaaaatgttgaattctagtattgtttctgagattttgttcaggtgcatctggattgatttgtggctgaaatggggtatcctgatgccattttgtttgcaactaattttgtttggtataacatgcaaagtttagcagcaggctgacctgtgccaactaactagtagcacaagtgtgttaactgagagatgacctttttttagtggggacgcagcaagataatgccagcatgaggcgacctccatgctttaccgtttcctacttttcttgagttgttataagaattttttttggctaatttctgatgcaacctttgtctcgattgtgtcatcactggatttaagtatcgcctggctgttccgatgtgaaaaaatgcgtcagctgagctactattcttggagcttagctagcacttgtcgatgctcttaagcgatgacgatgtggttattattgacctagtgtgatatggccatatctttgctccttttgcatttaattggagataatggatgggataagatgagataaatgggcgaaagattctaaaagaatatatgtaagtgaatgaattctaaggcattgtttaatttggaatggatatttcttttttaatccctgaatttgtgtggcaaagttcaatctcttgtgacctaaaatgtggcataattaaattagggagcaatataagcatgttgggtggcatattggcatagttttaggttatttaaaacataccagaatgaggagataaaatgcatgtttttattatgtgccgtttcattgctaaatgagaattgcccaaaaacctgaatggaatttcttttgcatagattggaatcccgtgcaattaattttacaaacaaatcaaacatgcggtgtgagacatgtgcaggttgggatttggagtgctattgttatctttatcctaccatagctgcttccaccaaaccaatgtagtagtacgctaagccgttgaaaaaagaattcctatatattcaaggggaaaagcctgaaaaatgatgctggcatgctgcggccaggagggagctgttccttttgtgtttactatttagtccctggaataatgttgggtctcatattctatattatattctagagcaccctcaatttctatcttattcccgtctcctgaaaaaaaatatacatctatttatcatataactatgaaaattgtcacaataaaagtgacttcgtaaaaagtaaatgcaggtgctcacatatgtatatagggttattgttacattaattttttttgttaattgcattcccatgtattactggaatcgaaacaaataggctatttggcgcttttgcatacttcctaccggcacacatccaaccgttcatcattatgtttttatgtggcgctatgaatcactttacgtctattaataccacatttaaatatacatgaatacattttcccgcgctttatattacatggttttataaatcggtacataccgcacctattccatcaatagatgaatgatttagaaggcatgacaaatatgatacatttcttcgataataaaaatcaatctaaacaattattatacattgtattgtgcttgttaggaacgtcgttttaacacatcaaaacaatcttttatgcatcaacctcaacattcaaccacccctctattgagcttgtgttgggtgctctacacaaacattgttgttttttttttcgtaaggggcgaaatgcaaaggtcgtaaggaaaaagattcttccaatggcaccagaaatggagggctttaaagttaatcaaattgactaattagtgctagatatgtcctgcacttctccttagtcatacccaagcaacaataatgaaatgggattgaaaccacccataatgaaaggctgaaagaaactagaggagaaaagaagtgctggcctttgctgttgtatagcccccctctccttttcctaccttgcccagttcctagttgcttctctctccctcattaataaaaagaaatttacaagcttctaaactatattttcttttggattcctccccaatggctttcacccaaagactcacccggcctttgtaaaatctcctcccttccgtctgcattccttcctccattatttctccatccctttcccctctcctcctctcctctaccttctctctaaaagactggatacagaacaaaaaaaagggaaaaaacagaaagaaaggaaagaaagaagaacacctaccaagcaagtcttggtctttgagttcatgggctgtggaattgttcccaggaatcccctctggctctgaaaagattcacaccgagcaacagttctttgatttttttccccctttgttttgctgaagaattgcttgtacagaactgcttctttcctgtttccgcttggttttccggtgtttattttgttggaattttcttgggccctttcttcttcgcttgtggaggcgaggggagaagagaggcatgggaaagcaaggaccttgccgtcattgcggagtcaccagtgagctctttttttctttctttcataaagttagatttttccttctgcagttctttgtttccttgttttagttctgattccccctagctagtttattttttaggtgatgttttctcccaattatgcatctgggaagagtcttagataaaatcgcaaaaatcttcagaatccgtcgggctgggattcctaatcctttttccctgtggttccctctgtttgttctctgatgattattagctgaaattcattgaaccatcagaagctgtcaggagaactttgtggatatggttgaggtctcggtgtcctttgggtgtaaaattctggacaccaggaacagattatttgattcagatagacacatctagacttgtttgaccatggcagatgtatgctgttagataatttgacagataatgcaataagatgcagttaacagtctattgttcaagataaaaagaaccacctgcttttgccaatcagacattcagagtttcatagaagctgcaactgcagaaatgcttgctgttaggacagtactaaagtgaagatctttgctgtgctgtctagtttgcacaggctgggtcttctctttgcttaaatctcagcagcattataagttctggagttcttagctcttcctagaacagctgcttaattgaaatgatcatctgcatttagtatgcctcaccttttagattagcaaatgaacaactacatggttgtgctaaatattaaaaataacgtctgaaagatgcaatttgagtatgtatgtgactaatcagtaatcactcactgtcactgacaaattatt

SEQ ID NO: 4534 - DNA, 16640 bp, Oryza sativa
tgtacatcccccgcacctcacatgactccctcccaaggcgcacacgcaccaccacctctgcatcaaatgcgcccgcgcgccccgtacgcgacgtgccttctcgcgggcgctgttgctgcccccgccgcccgcttgggttgggttggttgcgttttttctgtgttggttccacgtcatgtgacccgagccggaactaaaacaagtataatcaatcgtacataaatccccccgtaaagcgtaaagcatccggggggagggggaggagttcagttaacccatgtttcctcgtgtgtgtgtgtgcgcgtttttttttttcttttttgggtggtggttagggactcgatctcatctcgctctcgccagtgagtcggatgccaccatttgttattattagtagagaattgcaagtaccaaattcgggagttgggttcaccccggccagtagcgattggatggaggctgaggctgctctctctctctctctctctctctctctctctctcccctgaattagctcgagaaataaaaacgggaggagagggactatgtgctcgtcgtaactaatggcgaggcgaccgtccatgagatgatgagaatgaataatgataacaggcttgaggattgaggaatcgaagccggtggggtcccggttccttgaccctggcaactggcgagtagagtagtgtactggtactggtgctgatgctttactttcggttgtcccatgagcggccagcccatgacatctcccccgtcctaatcaatctagacgacgacttccattccgtcgtcccaagcgacgaactgacgacgacggcgacaccaccgccgagacgtctcgctccgccggccaccgcctagctcgccggccgtttgcaagggcttgcggttgaaaacttgaaaatgcgagccacaatgagacggtaaattcgatcgaaattgtgaacttaattccaagcaagcttgtcgacggctacacattgaatcactggttcagcgaatcatgggcggatctaggaaggactagaagggacttaataaagtagataagcctataccctttcttctaatgaatactccatatgacaatatattttaatgaaaagtttaatgagactcctataattctaatgccggtaataagaactcgagacccatcatccccatgacagatccatcattgcaacaaatcattttttttctttcttcagcagagatctcgcatgattttacagccaacgggctttgctccgtgcctggggccaatgcgtggaaaatggtgcgacggagatgtcatcggccaagagtcacgctatacagcaagtgggttgacgtaatgtaagataggatacatggtacttgtgtatgaaatggagcaacttgctagagcacaagattgttatggtctctcctattcctcagttttttttcccctccttttggccaccagatacgagcaactaggtcagaaaccgaagcacatggtttcaacataaaaacgcgagttttttgcgctaaagtgtgagccttgaatagcccaaaggtggcaaggtgtagtatcttccgagctggggtttgggaaggggctcgattgatccagtgatttacacaggctgggcatcttcacaattggcagttagtggtcctgtggtagagatccgatcagtatcctcacctcaagggcaaccgggccaattcagcgaaagaatatcagggtctctcgtattcccatgtgcaaacacttttggctctttcacctgcagtaaatgctgaggttagcgaccagagccagtattcaatcaccaccgtgagtttaatgtttgacagaaccagaaataggatggcaatgctggcatttggctggagtatgtaatctgcatgccgataaggtagatagctactctgtaaagaatgatagcgtaccagtgagagtagtgggattcgaggttgaattttcgctctggagaatccatccacggcaaacaagcacttgtagccactgatatggcggtgttcactgtttggtacaacaataagaaataagaaaagcattacagcgtgaaatgagtaccagttgtgcctttgattatatttattcatgcatggtaacaagagttgttcggtaatttgcttctactcaaacaaacatggaggtaatacaaggacttttccaacattaggtgaactccccatatatgtaggccccacttctcagtggtgcttgcaaaagtccgcttcattctttaaatatccagatagtaccaaaaataagtgcataaggtattgaagcaaatactcctccggtttctcaatgtaagactttctagtattgcccacgtacatatggatgttaatgaatctaaatacatacatatgtctagattcattaacatctaaatgaatatgggcaatgctagaaagtcttacattgtgaaacggaggaagtaagtaaacttacttcagcagatatgtgaaatttctttcctgatattcctcgatggaaattttttcctccttagaatatctgccagtgaacagattttgagatgctcataaatggcatgataaaagatactaacaaagataaaacactacagaggatacctccaaggatattcactttcacagaaacgtgaaactccactcattgcagtgaaggcatcaatgtgaacaattttgtccttcattacagaatctggtaaaagagaagcaaccaatagtatgtgccatcaataaagatattattgtcaacataccccataatcgctaaaacagtagacaccactagatgagacactactagctgttcaatttgtaatgtgctgcttgcggttcagccaagcccttgcagttttgttaacagaagaaaactatcataatttcacgtattccacataacttatgtaggtctcacctgcttcatgtagagcctttagagcatatccaccaggataattattgtaggatgccatgaaagttacaccagagtatcctagactatataattatatgtgagtttccaacagtagcatatattgtgctacttgaaaaaggataccatattaatattttacaatataaccatggttaaattattgtacctggaaagaaagccaccaatcatgagaacataaagtaacttccacccagttttctttctgttattatatctgaagatagacaaacatatattcacgggtcgaaatcgcaaagcaaagaaagagaggaaacgccattcaatacgaagggtatgaaataaaaggagttctgataatgaagctagcattcctagcttggatcagtaaattgataaaatagtacttcctctgtttcacaatgtaagtcattctagcatttcccacatttatattggtgttaatgaatctagataggtatatatgtctagattcattaacattaatatgaatatgggaaatgctagaatgacttacattgtgaaatagagggagtaggaactagatatgacagaagattggttatgctcacattctgcttgctgctagtgaagcagacacattaagcatgggaatcgaagccataatgaagcgaagctcctgaaacacaacatcagtcatcatgtacaagaatggccaaatataaggatggaactagtatcaagagatgtagagataccttatgtggaagctttgaataaagcacaacaaatgagaagactggaagtatgtatggcactatccttctgtcaagaagagcaccgacctgtcactgaaaaggcttcatgagatacatttcttacttccaataaaaaatcaaataaaaaaaacaataaccaataatgcattgatagtaccaccatcagaaaagatacatcataaaaatataattagttgactcaatcaaatagtatgaagtaacagttttgatataaagtacatgtagagatgggaagccaatcaactattactagctaagcatcatgtttcatgcatattaaatacatgataagaaggcatggaataagttatatacttgttcaagcaaaaggcacatgcactttttagccacgtaagtagcacaatttcttgtatggaagtttcttatctcaccatgcaaagaggatatgctaccagcatggagcgtggaagtgctgaggtgaagtaccaatggatggaatgtgtctaaagtttatggtagtcatggataacagggctgggagcttcgcataagtttcaggagataatacatagatttcaccacatgaatctaaaaagaagaagaggataagtcttgaccaagaagtgtatatatgttgcatccttttttgtattcatgtgactaatagagattaacatcatgttcagtgcatatgaaaatgaaacttcaatcttcccaatcttaatcgaaagatatgtgctttgcatattctcatatgaaatgtctctgtgaagtgacttagtgaaagagagaactgatgcatatatatttggtagtaaaaagaataaaattctggctaaagagaaaggagtgcatatgaaaatgtctccgtgaagtgacttagtgaaagagagaacacatgcatatatttgctaggaaaaaagaataaaattctggctaaagaggaaaaaaacggtgtttcattgtgcacttgaaggtttaacttgaaatattattaaaaaaaaaaggaaactgcagtttggcacatgcacacaaatagaaaaaggattcaccccactctgaactccggttcagaactgaattaacccacaaaccttaaattctggccgcagtattctccgccacagtatagagtcaaccagtacagtgaaggctaagaacatattcatagtaagaaatgtttcttgcagatttgcacagacttctgttagactattggagaaagttcaagagagtagaaagcttcataccaatgcatataatggcagtgctccctcagcattggatggcttccaatagagaaatagacctgctctgtcacagcatagtcaaattgcacctcagccccaactttcccagataaagtaagcagaagaatacatacaaagtccaaatagatataacaacttgatatatgatagtataagtgagtgtatcattttaatagcctggtgacataccaagttactcacttagagattattagccatgcctcaataaaaataacttatagagataattaaccacagtccctcatggtccttcaagcaagtttactaattcactacagagacacaaatgatgagagccaaaaccggaaatcgggttgaaccatgaacccttatgattctatgacaaagatactttgcattgaatttgaacaaacacaaagttgggaagtaatagagagtattgacaattggtatttgtacctagtgtacgagataagagctatttgtgcatagcctacaaaaatgagtaatataaactttggacccttgcttcctcaaagattcactacataaaagagtatgaaatgactgtgcaactgccaagagaaatttaggttttgtaggtgaaactcaccagcaaaagtgcaagtcctattgtaccaagaagcaaaatcatgtcacacctaaaaataactgctgcgacaatctgcaagcaatatggagaattacttcagaaggaaaaagcggaactgaggatctttcaatgctataaaaccaatttgtaatctttattggtctgcaaattaataactgagaatcctttctcaatttagtaaatccaaagaaattgaactgaacgaatagtcaagaaagaacctctcagtttcatggtcaaactctgcagcctacgatgtcatgtccggaactcagattctgtcgagttattgtgtgcagtgcaggatgtcaaattttgaattcaacagtatatggaactcgaattgaaataaattcttgctttctgcagtgtatacaaaaatgtgaaaacagcagcatgcaaacaaaatggtgtgaaagtaaggtaaaagtgttaaaaaattagcataccagggcctgtaatgtgcgtcgatggtttcccttgaaccagaaatagtatgtcaagttaactgcgagacagaaagaaacaatgagttgcacgattattacacaaaccccacatatgattaatgctactgccaatagtgtcacaaaaatcagtaacactcgaacagacttgtgtttgatttaaacaatgtcctcaccaaaagctaaagctaagacattcggaaggggcctggttgagtagaacaataagtgaaactgggtagcagttagtatcagatagaatgcttcagcatgatgaccaaacttcctttttacctgtatatcagaaatgaactgagaaaaacgttatggtgtccaaggacagaataacagactcgtgctcacgggacgattcagtgcaaattatagaaaacaaatgttactcaagatgggcatagaacagtttgacataaacacataacccaaagggatatcttgatgatatacagcacttagaagtttgtgcatgagatatgaaaaacaaaaattaagttctcttctatccatatttgaatggaatataaatggcacaaagtgaaaggtatcgttaggtatatggcccaaaccaagccataaaaagaagattcaaacaaggctagcatactgcagcatgtatgccacaggcaagacgaccatgccattctttttaaggggaggcgccccttttttttggggggccccctatataaaaaaaaaaatttttctacagacgcatcaaaacaaaaaccaaatttgataagcaaggttccttttttttaaaaaaaatggtggccattctatgagttgctgcacttcaaggccaggagaaggttatacaggtaaaaggattgaggtttaccccttttcagggaaacagcgttttcagaatattggtagtacctaggagaactgagaaacagtgcatacttgcaataaacccttttaaacagaacaagaagtgaaaaggaatacctgaactcggagaagtctcaaagtcatcaggataatactacccaacactatccgaactaaaagggcaaaatagaagaacatcaatatggcaacaaaaacagatacaacatgcaagaagacatgtgctaagttattgacagcacctgctagaagaccataaacctttggaacatgacataaatgcattacgaagactgcaggcgatgagataacagatacaaccaatgctcctgaagaatatatgtagtaaacggtgttaatgatctgcgtcatgtccagattacaaaatctgcaaggccagtcataccatatatagacactacaggcatatctagtaggagtatattgtggtaaactggtaatgccatctgaccttgaccatctacttgccatttcattatgcttgagccaagcaatggtcattagcggaaaaattgtagcatagtgcacagatcaaggcttcaagtgaacatagtattacctataaatgaccgagggacaacaccaggaaattctaaatgatcatactgcagcaaattgaagaaagaaattaaataagcatcaagcatgttgtattgatagactagcagaaatgattaccttctcaatatgatagttgtggtagagaatgtcatgcatggcctagaacatacatgagcaaagtgttagcctaaacattgtaatggcattacagtaaaagtgcaaacatacactgtggaataggtaaaaaaaatttaccaaactaaacggaaaaaggcaagaattagcaagtaaaagattcaataccaggcaaaggaaagataaatgagcagtagagaatgaaacaatttcccaaagcaaatttcattcaaattgattatcacgcagagcctaagggaagttatcaaacataaagcattagtttttagacatgaagggttgaaagttgaaactcataattatcctgcaaattttcctctacttctttaacattgcataggtgacactggaacttgagcaacttcagcttttcaacgctcatgatataatatatatgatgtatgaactaccaaatatagaaagggtgcatcttggatgtctacggcaaagatacccgattcatcaatattcagcatggattctgcgtgtctgcagaaaatgtaaatgaattcacataagctgattgttgttaagtcatactatcctacaattcacatgtgcacaccaatatcatctagcaaccagttgcaaccaaaatgaacattagcaaattatcagcaatcatcctgaatcccgtgtctagtaactgaacagcaacagagaataaggacacacactactacttgagcaaacaacagaaaatccctactgtaattgcacacaaagcacgactacaatgtaatccagccactcggatgctcaacggagagggagccggaaccggaacctgcacgttgaagctctcttccaccttggtgtagggcaccatgacggcgtagaacgcggcaatcgatccgagcaacaggtcccaccctgcaagcgagagtagtgcccccgacgcatcagatcccaaaaaccctcccaccaccgcagcagagccctgatttggagaggcttcgcgaggccgagagcgagaggagagcactcaccgtactccctcagcagcctcgccgccggcgagggccgcggcggcgccatcccggtggccggcaaagtgggctcgcgcgtgcgacgagccgacgagagcgagtcgcttccggaattccgcggcttggtcgagccagatcggcgaggctgtgctcgagtcggagtccggtttggttgacgcatccggattagtgggcccggcctagcttagcctcttactaggtggcttagatgggccaggccatgatggactaggcctcacgagtggcactcagctagttgggccctaaggcccaaatacctgatgcttgaatttattcatcagtgttaggccctctttggcacaactccagctccagctccacccctcctggagctggagctcagccaaacactttcagctccaccaaaactgggagtggagttgggtggagctctctcacaaaatgtactagagttgtggagctgagtttaggcagctccacaactccactccagactcaactcctggagttatatttaggagttggagttgtaccaaacaggcccttactattacaagaccatatcagcagaccacgatgacgaataagggcccgttgaccagtcggttgggccgaatggctcgcaagcccatcgtcttgtgcaaacccgctgaaagcagtagtcaaatgacgtggtgagatcgtattgggcactggcctcctaaatcgctgagaagccggctaatctagcacctttaagatatcttatatttgccacctgatgaaaaatgcttagtggtttagcacgatatctcgtgctgccctgcaacgctttaagtaaagcctttgcaaattgagtaattgacaaacaaaagtgacgagtatttcttactgcatatattttctggaagcaacaaaatgcttgtctgggcatttgcgatgcatgtcctctttaagatgggcagcacaaatggccaaatggccaaaaaagaaaaaaaatctggaaattaaataaacttgctacaacataattaatcgtcttgcatattgcaagtgttcaactgaaaacgcgcggtaggtgcgcctatcattagcctgtctgaaaacgtgtgtttcttccagcagagacggatgcagtgtcagtcagacagtcaccacacactgtcatcagacagagaggagacaacatgtgaagaaggcgagtttgtccgagagctcacgttcgttttaagcgctgtggaggtgcagttccacaatcattagcggctatggcagcaagcatgatgggcgagtacgagtacgagtggaaggacgaccgctagctttgtgccttccctgattcgtcagggtgttgctcgtaccatacagtaccactttgcgactgtgcatgtatggccgacagacaggcaaggtgtgcatatgcatatgcctctcgctttcggtgcccttgcatgcatcgcagttcgcagcagccatgtccaagggcttttaagcaggcaggcatgatccaaattgccagactagactagcagtagtgttcactgtgcttggtacttcgtcaggtatatgtaggagcatgcatgtctccacattcatattaagatcgactgaatattatgcaacttgatcagctgattgatactaggaaataacatgcaggtgagtgagacttgagagttctaattaagcttcctactacattttcattcataattagactgaatatcatgcaacgtgttgatcgatcggctagctgattgaccaggaaattaaatagcatccataagagttctaaaagctttcctagtacattttcattttacatcgatccctgcttcttcgatttcccaattgccaccatcagatcagagaacaataatccatcaccgatccatgtacataagcatgcgttcgtcagaaggaggtgaaggcgcagctggcggtgtggtcgccggcggcgccggtggtggcgtcgtcgctgcagggggtgtgggtgtggcggccctcgtaggtggtgatcaccatgcggcaatcctccgacagccgctccacccgcttcttcacgcggcagttgttgtgggtgcacctgtagtagctcctgcatttgcatgcacaatttgcacacaaacagtacacacgcgcacaccaacacagattaagtacggactggtcagcaagctgagagagagagcgattcattgtatgcatgctacagagaaactgcaatcacaaacaaatgaagaagagcgtcagcagcggatgctgctagctgatctgaaatggcactactggcctggtgacatgcctgcatgctcaaactgatgagcactactagtgctgtcacgtactcagcaagagttcatcatgaatattgtacgatgaaatgggcaaggttaattataaacaaaaaaaaaaggggggagacaattttaattgacatgaaccctttttttgctaatatattattagaaaaaaattgtgttacacaaataagaaaaacatttaatgtgtacgcaatttccgcatgtcatgatcaccgactcgtaactgatcatgcatacatctgaatactaattaagtttcatacggggtataatagctaataatgagctcaaatttgggctcaatactcaaatatatggaaggacaaatactgcatgcatcctctctttcagaaaatgaggctaataagagctccaccatttcctgaaagagaggatgcatgcatcatttgtacattgagaaaatggggctaataagacccttagggcatgtaaatccaaaagaaactagactagaagtcaagcacaccggcaccaattctcacaacagaactccccatatatctcttaataagtactgtgaactgctatagataaaatcaaaatccttgcaatttatttactaggaaatattgttttcgcctagagcaattcatagctaggaaacatggagagttataacttctaagggcatgaactattgtctatataattttttcatgttatatcttagacgatatacaaattaataactcatacagtagtataagaaatactttagttctatagatagcatatatgaaatgtgtaaatagtataaagttttctattaatcaggccgtctggtaatcaacaaacaattttttttttcctctctactttctcttgccttaacatcataaaagttcctactaccatgcaggagtagcgcattctctcctaaacgatgacattttagttacaccattactaatgtgtgggggccaaatccttcggtcatcctagcaaaaaataatgctatagtggctctgtttaacccgaacacccacatcccgcgccttgccccacctcaaccatcgaattacagacatgaatggtgtaactcacagttttgaccaagacatgcatactttgacccccccccccccctcttttttttttgctaggatcactactataaaaaggattttttcgtgcggaggtcttgcccgtctgcacctaggtgtctgcgaaaataaatattttcccgaaaataaatatcatcgatgactttgttcaactattatgaaaatatgatactatttccccatcccaaaaaaactctatgtttagtccataacccctgctttcgaaagtgcttgctttcccttcgagggtgtcctcgaatcgggctagatctcgttccagtgttatccccctaggacaaatgtttttcaaaatgacccgaaaaaatgccaattccttaggcacataccaatacaataaaaaatgctagaatatccttcaccttagaaaactacaatgtatttatcccgtactttagcaaactccgatgcatttattgctccaaaatgaagtctttgtaggacaaacgagatgggctaaaatgtggtcttttttgaatggtagcggtaataaatctaataatatgacttttgatgtataaacataataatatagaaattattattgttcaaactttgaacatgatatgaatgtatccgttattaataaacggagggagtggtattttagactgttagttttcatttttatgtttgaacgtgacgcaggagctctgctattcaattactatgagttttcactgaatatacgctgttttcgttggacttatgtgcttgcttgcatatcaattttatcactcaaactatacctaaaaccataggattgcagagatatactacaggaagaaatcatgcacaagctgctaacaggggcttccccttcttacgggtactaagtatctctgaagaaaaatattgcaatctgaaaatgtgtgcaccatttgtcccggtgcatccatatgcacacaggtggatgtgcaagcgcctgtcctagcgctgcagatcaaaaatcatgataggttttactagtgccataaagatgacgcatgatcagaacttagaccaagcagaaaagagaatagtagcggctttattttttttttcttttcaaaatcggcttttctgaatcaggtggcagtctctggttcggtaggtacccgtgccaaaacatagggttaaactcaggtgttcagggatactaataattagcatagggattcgatgctctagatatctcgtttttttttctttagtagaaatatatgcatcatactgtggcatgcatggtgcattattattgcatggtatactctttcagcaaagttcaccagctcatgctgatgcttatagtgtatatatgaaacacacatgacatatgcaaatatgaactttgagaatggccacatggagtttcgatcactgacaggggtggatccattgtgggtagtggggggacttaagtcccttctgccccactggatcatcgttgataaaagggaagatgaaaggagaaaaatagggagaaaatgaaaaataggaggattgaagaagtaataaggaaatgagtccccccttaaatcttgttttggatccgtctctgatttcactgatatctatgatatatcgacgtattacacttaggaattttttttcctgaagagaccgtattttgtagtgttcccatattttcaataccataaactactcgttacttatcttcggtcaacaaatgcaacatgatgcataaagttcaggcttcttgtcaacaagaattaatggatgccatatatagtatacaaatgttagctagattcacttggcacgactaattactgtaaaataagtcccaataaattaaatgggtagttaaattttggaatattttctggttctttgtcattataaggatgccttccatcttctagtccaaatcaaatgtgccagaaatgggcgcgtgtttgttaatcagatcagcttacatgcatgcaattcagtccaaaactgttgtgtaaaacatataatactccaaagatatatgcatggcaaattaaatcgaccgtttacttctgaacaattaaacatatatctatttgatgttttatcgatactattcaaagcataagatgatcgatgtgtcacaaattaaggtggacaatttctataactacagaccggttctttttcctctaaaaaatttctgtgtagatgcaatgccagcatatatatccctaagcaatattccagcaccgtaccatcatctatccacgaaccctctattatcatgttgtgttttgaatgaagaaattttgcggaaaatatgtgtggagaatatgggtaccggcctaccgggtacccacacggcctccatattctactagagataggaggtgggccacatccatatattatgtaatagattaggaaactgatgccgtgtctggctaggtttcttctttgtaaccctggccccccaacctatataaggcgggcagagagccctgccttctccaaggggcatgaacacagggattcacaccagatcatcagattaatactacacatagcgggtaaaatcctaaaataggagtagggtaccttttatcgagagggcctgaacctatccaaattcttgtctccgcatccattcactgttaggtctcgtgcgctatccctttatattgccgaattctagtttcgacaatatgtgggaaaagtaccgaatcctcaccatcattagattgtaggaatggttggagagattcctatgaaatctttccttttcttcatttttctagtgtctaaacatgaactcaaacatcatgtttggaattatttggaaaaaaaaaagaaccaaaggagttgagctcaagatcctcgttttcaaaatttatatgcattcccactctctctctctctctctctccctcccccctctttttttgagatggattctaatcactcaggtggatgtccatccgtttattgcatgttaaataaataattatgaaaaaaattgataaaatagattaatataaaatatatcactctacgaacatgaaagtttaaattcaatttctacaagttataacaaaaataacaaatcaaaccatgaatatacgtctaataattagagttaaatatgtcatttttattataacttgtagaagttgaatttaaacttgcatgttggtggagtgacatattacatatatcaatctatcatgtcaatttttttttgaaaatttttatattcatttagttaacatgaaacagatgggtggatatccacttaagttattaaaattgttttcccccttttcatctattaaaaaaatattcctttatggttcctctagtgcatttggacatttctcttgcataattcctgtaggaatctgcagtgtacacacacatacacacatgtaacatcatagcaagagtaggctaggtgcaaactgatccttaattagtcgtcaactaatctacaaaaatctgcattcactctttcttcttttaaagggtgaattcgcactcatgtaatcaagttattagatttgtgaaagctcttttatttgatctataaagattaacaaagaagcaattctccatttaatattatagctattgtgaagcatgtaattcaactatagttgcacaaccatattgccacaaaactagttaaacctcaccccagataaactatataatatatatgtgattcaagataggcaaattaatacttaaaataggaattgtcgctgttctccctctcttcgatcttgtgttaggggccgcattcgcgagtgtgtgagtgtggtggtgtacatatttaacggtgtgcactggtatgcatcttccatgtaaccgggaaaaaaagataggcaatggatcgattctgatcccgctgatcttgtttcgagcatattagctatggaggcagctatggtagacttctgttaattatattagcagctgtggaagaacctctaggggttgcatatctctcaatttatgtattatgtttcgtgtatatatataccttgggtggaggctgttcttgacaaccttctggccatacttcctccacttgtagccgtcgtccagcacatccacatcgctcctggtctggaagcagaacctcggctccctcatcttcctcctcaccttcatcttccccttctccgtccccttccacctgcccatcagtcaatctggcctattattacctcatcaaaccctaatcaacaggaggctacaacctcaattcaaggtgttagctaggacgaggtgatcgatcatcgtactcaccatgaattaggcccatggcaagtggttgcggtggcagctgcagcaatctcgctatccactctcgccgccgccgccgatgtgtccgcctgatcgatcgatcgagatccaagattgtaagcaacaagtaattaaagaacggcataccatgaccaaattgagatcgattgaaggctaattgatcacctcggcggagcccaagtgcgcgaaaccggcgggcttgtcgtcgtcgcaggcggcggcgccgcagccggagtcgaggcagaacgggatccccgggagcagcgggtacaggcagccatggtccgacgagaacatcacgccatggttcgtcccggtggcggcggcgtggtcgtggaccagctgcggcagctgggg

SEQ ID NO: 4535 - DNA, 5975 bp, Oryza sativa
tatattatgggacagagggagtattaaagagcaaacgtcttgtacaagaagttaccatcactgataaaaccatagtatgaaacagttgtcccaaagtgtattagcccagactggatccactcaacagacaggatgtctagggcagtaaagccaccctgttatcaaggaacagaccttatgagaaaagctataagtgatctaataattttggacaaaattaactgaaaagccttaagggtgatgttgaaattttctcttcctgtaagaagaggtcgtgaaagattcacattgtaactttgtaagcttatagcgataggcataccttcacaattagtaatgatgctgaaattggatctttaactcccaaaacagtccaaacaagtgaattgtcagatcctgctgggattattccaactggaattgatacagcctctgctctatcacttctactgagtagaccgttgaagacctgcagaactataaatgttcagagtcgactgcaggtgcagctatcatatataagttttactaaatcccattaaactataatatataatcatcaaggacaaacctcatttacaattccatcaccacctacacacacgattcctacaaaacatttaatacattatcaattcaaccagttgaaatggttgccgtgttgacctacataaactacttggcaacatctgtgctgtttataccatcagggaatgcgctaaaatcaaatgtagatgcaagagatttagcgtgaccagcatgagtagttttaaccacttccatgtgaaaacctgcaagctacatcagatgatacaaaattaatagcgggaaataaatgatataaagtttatgtaggcacgcatgaataataaaaacagggtaacgggtaaaaaatcaccaagttgagaaatgtgaatgcatacaagcaataaaaataatccattagcaaatatctaagaggagaggaggtgatcgagtcagcacaattctctcttttttttaaaggacatctcgaaggaggcctataagttaactgcgattatacactttcgattaaaaggtgaaggaagtgcaattttagttggtctaaattgaaaagtaaatttgcaacttgacagcctgtgctgccaggagaaagggggttaaataatctcccttaaccttttgtcaataaattttacccagctttatgtccaactccgttgctgcattcacaattgaatcctttactgctaaagcatcagatggaagcccaggagttttgtagagctactaaaatagaaggaatgtatgatgtcccccacatgtctagattggtagggcaaacaacaaacataaattagtcatctgcaaatctaaccgtggatcattattttgatattttctaaacttaacacttcaggttggaactaaaaatccattaaagagaaacgtgatatgctcttcatgagttcttcactgttggaactaaaaatccattactgggatacaaaaaataccaaacattcctctttagttggcactaaagaatctccatggtcaaataatctatacattaaccatcaatatgtttggaggtatctagattgcccgtaaaagaactacatcagtagatttgcatcataagaaacattaagttgtaacaatattaagttctacagagtttaattcaaagttacacatcatagaacatgaaacaaccaataatttcgatacagaaaagaacagaggtactattctattcctcatgacatctccttgagactaaacagcgaatggtttaaagaaaagcttcaaaaagaaagtttattgccaagaagaataatagacatatacagttagtcaagctatatgttgcttactgcagagcaataagtagaagcttgcattatgagagtatcagaaggtaccttaaaaataggttctgctttgtcatggaaaactttgcatgatctaccatgcccagaccgagggttcagtataacaagtatcctcggtggagttctacatttgatgggtgggtggtcaaataaagcaccactgaggggaccatcaaggtcttgctcggtactggatgttggagggagaggtagcatgttaacatatatgttttgttcggcaaagcatgttacccatgaaatggcctcctctacagtaggggctataaaccggaggtccttccgtactctgtgtgtctttccaaacaaatacttcttagaagggtatgcatgcacaatgaaatgttggacaccagaactgtaagatacctgccaacatataaacaaatcatcaaagatagatggtcagcccaagtggaccaaatagcaatagaattatagtagtgtcttggtctgtgaaacttacagagatgacatcctcaagactgagtaaagaagaaccccatattagggctttacttgtgagtcttacatcacttatatcagctttcccatttgctgaaatttgatctcctgtaattctatttttcttgtcaaaaaagagttttccagaatagatttcataacctgagaaattagacttctcatccaccacatcatttttttgctcattattttttgctttcttggaatctttattgtcaaaaaccaagtgtttctgcctcgaagattttgatttgccttttttctctggaaatacagttggtgaagattgttgcccggctgacttttgagaacgccgactaccagaccgccgactggacttctgggatgagcttctggaagtaggattttctagatcagctacttccatctctttcttttaaagaggacttcagagcatcagtatagatcaggaatttggcatgacctcataggtgtatgatcatggcatcaatgccatgtcaaagttgctaacaactaaaaatagcctgcaccgaaaggaaaacagaacacctataagatccatctggctggtacatgtgcatcatttgttgaccaaaagcagccgttcagaaaaaatgagtacatccgagcttcatctccacagataactaagaaggtagtcacaaaaggctagcacctaaacagcttgggtctaaagaaaaaggtcctcaaaagtttgtcgtactgaaagtttgaagcatttctttagcaaataaaattctgataatatttaaatatttatatggtgatttcctatcatatgagcctgatgttcaaatatgtgcgaggaaaccttgtgacgaatctaacaaaagaacttttgctccatgtttaactgtgtgcatgcctacttgggacatatcaactactaacatttgtattcatgtgttgaatttgagccactaccctaaggactgcaatcgtcaattgttggaagctgatatgatgtgctatatcaaactactccctcagttccataataataagttaatctagtacaagatgtgacacatcctagtactacgactctggacatgctattctgggtcggaggaagtgctccagttcactgccatgctctagaagacggcattaagatgagtcatcacagaggctatggtgctacaattcacttgacttcttttatagggaaacacctggacacttatagggacacttacagcaggaacataggctaaactatttcacaaattaatcggttgagccctcaaacatagttctaaaatgcttaatagcctacagcgaaaacatataggtatataaacgctaacagcaatcagttccccgataattgcaagtaccaagtagactgtatgagcactataaaatagcatgtaccgctgaactctcaagcgtcagcaatcaaatgatgagttgcacaatacagaaaacagttattctagtgcagtacagtgagaagtgcaaagacgagcatataggtgataccagcaacagatctccagaaatacaaataataaaatgtgtttatagatgagtatagaagtctaaattgtttggttcagtaaggagaaacgcaatcacgaatatggaagtcttagcgcaggaatagcaactacgaactacgggcaccacagatctcgattagcataatttcgaatgccaaacgcccggcgcaccaatcggattgcgaaggcgaaagggagaaacacgacgagcaatccaatcagctagccaccgcccacctaacacggagattgaaacctcacgaagagagggagcaccatcaggcggatcgaagccacccaacgagacgtaccgaattcggcgcccccccactggaaacgatcggatcgggaggcggaaccagctgaggacgcggccctcggtccaccccgccgccggcagcagatcgaacgcctccggactcacgtcggccggcggcgcgagctctcgcggttgacggcggggcaagaggcgaggcggtggtggtggtaggaggaggaggacccggacgcggcggtgtggtggagccgtggaggggttgattgggtgggcgacgggtgagggagggccggggtggtggttcgatgggttttggcgtgcgcgttttcagctgaggagacgaggaagaggaggagaagaaaaaaaatggcgtggcggacacgaggcggcgctgttccggctgcgctgttgttgttgttgttgttgaggggagagaagccagtggaaagaaagggacggtgccgccgtttcctctgttctttctttgctccgctcgtttctcttctcccctccgcgcactggttttcctgtgtttggagcgctgctagtgctcgctcggttggcttttccctttgatcagctgatgatgcccattggaaacctgacgagccagcccagaaagcgagatggtggatggtgagataagatgagatgctctgttaggattactccccggccacgcctacggcggaacgaccgaactgacctacagaaaatttctcggtggacaccgacaggttgaccacttggagtatgtaggacagagcggacactggtgaaaccatagggaatttcagttgcaacaaagctgtaacgggcagtctgtgctcaaattaacccaacatttcacggttgaaatgttcagtttatgtcttggtttgatccagtccaatttggctggttcgtcttttggtagaaaaaggtggtcgtgatgaggttggcaattttggcatacgtcggttgtgttcggaggagagggttagcacgcaaaacgaaatttgttttattgcatgattaattaagtatttattgttttttaaacactttcatacagacagtttttttttcataaattacaccgtttagcagtttgaaaaacgtacgtgcggaaaacgagagaggtgggttgggaaaatgggcgaaaaacgagagaggtaggttgggaaaatgggggaaagaacacagccacggtgaaggccttaggaaaacggggacagaaaaatcatttgctttatttcccttcattattcaataaaagctcaaagttagtgaatgacctgcgactttaagctcaccgtgttcattccagtcgtcttttttatacaagtccggtggttcaaagagagtactttaattccttctagacgatgattagagataacggattccagctctccaaggtcgcaactgagggagctatatatcaaaataggatattattctttgtttgtagttgagatttcttagatttgagtaaatatttaatgagtaagaagtcgttcccaagcggagttcttgaaaagagttgatttccgaaatttatatatttggaaattcgaaacttgtttggtcatttgaatgtcttttaagccaggggaaggtgaggaagtggattaaacaaggaccaaggcggtcttcttagaattcaatggttcgtcagaccaagcacactacctggtcattacatagcttcaaacatggcaatgaccaaatttaaaatgaagaatgagtacgtcgccaaaacattactagggttagccaaagttaattttcagtgcagtatattagctttaattctaaacacaa

SEQ ID NO: 4536 - DNA, 11384 bp, Oryza sativa
cttcaccgtgccaacgtatgaaagtcttggcgtcagtacacgattgacgagaagaggaatcagtcccgtcaataagaaaacaaaacaatggtgcgtatgttttggactagcttgttgatgatggatggcaatatagccgcagctaacaaacatggcgtttgtattcagaagaaaaggaattatagtccttattatgtaagcattgagaattgcgatagtccagatttcagagttggcttgtacgtgaatacagacagatatcggatacaaaagcggtggcagtttgtagtatgtgcgtttgctttagaaaaactttaaggatccataccaacattataaattctctagtttaaaaatactccctccgtccaaaaaaaaacaatctaagagaaaatatgacccctcctagtacaatgaatctgaacaaaaggttagctctttttagaatggtgggaatatatcctataattcgcctatttatattgagtccattataattttataatattttaagatttgtcacttttatcccttcaatgcaatctaaaaaaattagactattttaccctcgtcttcttcctcattcttttcttctttcccctctctccctcatggtccatgtaaaaggagctttgacgtggcggccttctccgcgagagggtatctagacatgaggaagagagaggaaggaagaatgaagaagacaaggatgaatcaatcaaaaaatttagtggtggcatatcttaaattactgtaaaattatagtcaccttttacagatatacgaattataataacccttagaaaaaagtgaaaatctgatgttgcccgtgttgaaccttggacctttatgacctttactctactgccaaaaactaatagttcgctttacgatgaattttcgcacatgagacagatggtccattgtttaggcacgctcatcttcgccgcaggcacatatccttttctttacagaaaagaatgaataagcatgcacatactgttatgctactttactatccgttgttctttgacgcaagctgtgcaaagcaagatccattctgcacgtggttggaacagagaccacgtataaacagctcataaacaataggttagtaggagattttaattgtggacaaaaaaacatccctcagctaaccattttcgaggccagcagtcagcagaacaggcccgcaccccttgccccgttgtcagattttcagtgggtttcagtttggtccaatgcagccatgcagccatgacttgcatgtcactatgaaggaggaaacatccgaactcaaccgattcgccgctcttaattagccgcactgtatttaacataccattgcactaggacactaagtataatgcattagagttcatgcagtcttggacctgcagctccaggcatatcaaatcaacagattttcatccagaggcagcagagcacagatacaagttctagttcaagtgttcaacggggcaccctccgtatctctcgtctctagatgttcacagtcacagcgacatcaagctacaactgaacaagtggtcatattactaatcacaaagaatgctatggcctcaaagccatttgcatcaggaaaaaaaaaaacatcatctacggtcagataagccttcgtcctaacaagtaaccgtgacttctttatgttgctttgggcacctactgcacacttgtacgaattcaagtctgcaacagcaaggcctttaatttatgagtcacagctagccaaataattttggttctctttgtcggatgtctttgttttttctaatttctggtcgcctacagggtactggttcgttaggatgtcacacgcaacacctaatctaatctttggtggtaatctgcatcattttcattggtttccttcttatggctgtcaattttcgttactcgctgaccacagttctgtttttaagaagaaaaaacaccacacgatccacgctttcacaaatgcactcatgcacacggatagtgattgttgtcctgccatctgctctgttttctcgtgggttcagtgctgtgaagtgtgaaaccatagaaaaaaaaatcagtcagcaagtgaaaaatgtagcatatctcggtaaaatacatgacaaagttatatttagattatatgagtgcattgtgcaatgactctttctatgcaggaaaaaaaatgctgagcacacctttgaatactgctaagatgaattgaggtatccaacaaatcagacacttcactgttgctagctaaacacataaaggagaaaaagagagttacacacactcaaacacgacaaacacatgtagaatctagctttggcgataaagctttctggtgagcattatgtggaatgcgtattggtgaaacatcgttcgagcatttcttcaggcaaataattgatcttgtttaatcctatcctgcaatgtcaaatgcatgtgtaccgactaccgacacctatttagttggtgattattggagcagattaatttgactatgtcatcaaccaaaatgaaaccaaattgcttgtccaccaccaaccatctaaagtactactacctaatacacgcgatctacaaggaaagaatttaattactgaactactaatatacgttcactggtgctacaagatgccatgacatcacaaaattttctatctgatccaaaggcttaaactaatctaccttctcaaactacacagtacacacattcttctcctacctaccctaaaatactggtactattcacagtctacacccagaaaagttaaaacatcatcttgcggtccaatctcgatccaacggccgaagccaacgcggaggtcttctcctggagcgcgcgcaccacgtcggccatggacggcctcagcccggggctgtcgccgatgcactgcatggcgagctccgccatgacagccgcctctgcgccgtcgtgctcgcctccgagcctccggtcgacaacgtcggccaccttcccttcgctgagcatgggacctacggcggcagtgagacgccgcccggtgtcgcggcagacggcctccttccccgtcacgagctcgagcagcagcaccccgaagctgtacacgtcgctcttcttcgtggccacgccggagcggatgaggtgtgggtctacgtatcccggggagcccatgacggcgcgcgccgacggcctgcaccccaccgtggccgagaagccgacgtgggcgaagccgaagtcgcagagcttggcgttcatgttggcgtcgaggaggacgttggacgccttgatgtccccgtggatgaccgccgggtggcggctctcgtggagatactccagcgccatggccacctggaacgcaatcgccacgcgccgcgcccaggcagcaccgacgccacgccgcccgcgacctcgctgcagtggagccgttcgtggaggtcaccattcggcgcgtactcgaacaccagcacaccttcatctgtgagaagatcgagacgcaagaacgttagcacacttgatacgggcagtagtttaattcagcagcgagctttgcaaaatctggtgttgatgcgcgatgataattacctcgttcgtcgcagtagccgagcaggcggacgatgtgcgggtggcggagggagaggagcacctcgagctcctggcggaaggcgcggtgcaggcgctcgctgctgcagtggaccttgacggcgccgaggcgggaggacgagagcgacgcgaggtacaccgtgctgaacccgccgtgcccgatcacccgggacgagaacccccccgtgacggactccacgtccgcccacgcgagctgcctcgccgacgcggcggcgacgttcttgcagctcccttcctcctccacgccggccggatcggccgccacccgcgagctcattgcacctgcctccccgcgcttcctgacgtcgccgccatcgcaccggcgcacgcaggcgaagagaccacatccggtgaacattgtgctagcgcgcgcccgccccgaagtgagagatccacgagctctggagggcgacgaaacgggagagaatcgaagggtacaagtgaggcgaggcgaggcgaggagtgtgagtggagggagaataagttctccctcgttgatctgtgtagctttcagctttgttgctgttagttgtagctacgttcttggctttgccttactggataagaaggggacaggttgtgcagaggatccagatcaaagaattgctagtggctggcttccctggctcttgtgttgctaacttgctacgagtcaaatgcatacttgcaggtttatatatgccagggtggtgccttgtggctgcctttctttgcatctcgtgttattgtaagagtggaccaccactaatcattgtgcaaaaagaaaggcgattctttcagcgagggatgatgagtaaggacgtcacctgcatttgcttttctatttcttaattctgatctttttatttcctgaatttgctacgaaacgtgctctcttgaccatacttgagaactcaagatgacactgattaataaatgactactagtagcattctagtaaagtggttctactacctctatctaacgaaaactttattctacgtgttgactatgaatttgtagaaaaacgaaaaaacatagcgtggttatcggatacactttaccacaactaaaattagataagctgtagcagccacaaaagttatggtagataaattgttagccatagagtgtgataaagttgataaggaaattgagtctatgatgtatgaggcatgttattaaaaaaatgtgacaagccacaattatggaagtaaatcaaacacatacctataaattgtagtagtacaaagtatagtgtgataaagtgtgatcatgaaccaaacaccccgtagtttattttggacataggtaatactactactttcatattattggtctttcttctgaaaattactgagctaaaaaaatgcatttgtcttctaaacaatgaaacaaaataataattataataataatacagacgagccataaatttatcattttacatcctacttgctcacggaggacagtaataacctcgcagtgcacctctctaagacatgaaactacatcaacttggatgcttgaagatactaggagacaattaacacaagccatacttatttcagtggttggattgcagcagtaggagtaataacaaaccctatccaagatggttaaaccagcaggttgcgaggacaaacaccacctaccacgtgtcgtccactcgcgcaggcacgaacacctttgcaccacgcgtgctacagaagccatcagcgcgctgctcacaaggcatagtaagattccctcctgtgtgcagtctcaccgtgcactgcagcgcactcagatttgttgttacacgcgcaaggcgcgtcggcgggcgcgcgcgcgtcttcggtgtgcgcccaacctaccttcgcatttgcaacgtgccacgggacacagaaaaacaagaaaaacgcccatgaaatctacagggggccaaccagatacgcgatactacaaatttaaggcgaacacggcgagcacctgcccgcgcgcacgcgcttccggctcgttcgaccgacgttgactcacctaacgactctcctccgcgcgcgcatgctgatgcatgcatgcgccaccgccacccacccggccgtgtgctccgaatccaatctctaattcgacctctgctgatctgctctggctgttgggctccgtttatccggaaacaaatccaggcggtgcgatgatttcggctaatcaaccatgcgcgcgcgcgccagggggaccgaacagcggcgcagcgcgcggatcaccgacgcgcccggcgcctgtagacctcgcggcgggcacgcaccgccagtgtatcgcggttccgacggacacggggcccggttggcgcgatagaaaaacgcgagcccggcgccccggccccggagacggaagcttcgtgccaggagctgaatgccatcggcccacgcaacagtctttcgtacgtcgatcaaggtcctgtcgtatagtgtaagagcaagaacagtaataacgctctatttagttcctagtttcatcatatcacatcgaatgttaatttggacatatacatagagtattaaatatagacaaaaactaattaaacaaattgcgtgtaaactgcgagacgaatcttttaaacctaattgcttaatgatttgacaatgtggtgctacattaaacatttgctaatgacagattaattaggcttaataatttcgtctcacagtttacaagaagaatctgtaatttgttttcttattagtctatgtttaatacttcaaatgtatgtccgtatatccgatgtgacacgccaaaacttttcacccctggaactaaacatgcctaaatgtgtgtttcttaggaaagtactccctcagtcccatagaataagtgattttgggtggatatgacatattctgttactacgaatctggacaggggcatattcagattcgtagtaccaggatgtgatgtatccacccaaaatccattataatataggacggagggagtaaaagataacattaggaagatacacataacaaaatacatcattcgtattaattaagtattaattattttaaatttaaaaataaattaatatgcttttaaaagtaatttgtttatttttttaaaaaaaatacaccatttaaccatttgagacgtgtacgcgtgaaaaaagaggcaactttcttctctttgtgctgctgtcaaagtcagccagctaagcatatgaggctatgagcaagggacggatgtagaagtagaagtagaactagaactagcctcttgtaccataatcatctgttacttgttagttgattttatcggatactaccaatacagtttggtaagagataaaatctaatcaattttctttcctaacaagaaaaaaaagataaaattgttcttttggtgatcagtgcgaaaattaattaaattttaataggagataaaccgctgagcctcactagtatacactatgtaatgtaacggggaggtcgtaggggagaggggatgcgctgaaattcaaaacctaatcgcccgattgatatgctaaaaggggttcgtgtggctatctcactgcaagtacaggtggccgaaaaccatcgatatcggcgaccataacttgatgaagccaacatatctgcctcgactatggcgttactcaaagcggaggattcaaaaagaaaagaagaagaacaaaaggatgcatcatgcatggcaagtagacatcgacaaaataagaaggaaatttctctgggcgggaagaaaaaacatttatggggaaatgcaaggtcaactgaaaaagaatctgcaggcccaaagacctgggatggctgagagtaatagacctttagcgcttcgcatccgcattgcggcttaggtggctatggtatgaatggacggccccggagaaatcttgggtgggaacggcagtctgtgcaatcaggaagacagggagcttttttcagttgtaacaaccataacaatcagcaacggtagaaccgcttgtttctgcgactccaaatggctagagaaccaaactcctcgaaaaattgctccagacatctatgtagcctcaaaacgaaagaatagatcagtccatgatgcactacaagaaagcaactgggtcagagacatcgacatcctccatatcactcagggggatcacgtgcaacaattcgtccgtttatggactatgatcagaagaatgaacccccgactgaagaccaagataatattcgctggaatttgatagctaatggacaatactcagcaaaatctgcatataggctccaatttatgggggccacgagatctgccttcaatcaaatgatctggaaagcgtgggccctgccaaaatgcaaattcttctcctggctcgctatccaaaacaggctctggacaactgacagacttgagaaaagaggatgacaaaaccagaagatatgcccattgtgctgcataatcgacgagtcaacacttcacctgctggcacactgcagagttacaaagaaggtctagacagaaatacaaaggtggactcaaaccgacctccaaatgaacaaatggagtaattgcgactcggtagaactatggtggagccttgtggtagactctcccaacaacccccgcattcccacgcgaacgttggtcatcttggtttcttgggaaatttggtgcgagcgaaatacaagaatctttcgaaacactgcctcactgccggcttccatcctcgctaagatcaaggaggaaggtcgggcatgggtaaaagcaggagcctcgaagcttcaagagtttggaattttaggtgatatcacttaaccctcactttttacgggtttagttctttagactagccatgtacatatttctgtcgctctatatttttctccatctctatcaatatacgagggaaagcttttgccctcctttaaaaaaaaaagtagaagaaccaaaagtatcagcttcaatggcttcccaaggaggtatgtaaatcagtaattttccgcaaagcggaaaggtgatcttgtttaagaattgaattaatctaaattagacttcaatatgactctttcctaggcttatcactatctatctttcagccgaccaagaactgaaaacaattgtatattttcatttcaagtgctatatctcaattatatattacaatcgtctatgctctcatagccggttgagtgatttgtttttagagcatttatcccctataaatccctttattagaatttgcaatgagaacttaacaaaataacaaaagtctctcccgcaatcgcgcgccctcccctcaccaacaaatgttcaatattctatcccctaaatccctttttcaatttccaatgagaacataaaagatataattctttataagagatagcttaaacttaactcctaaaataacaaaactctcccgcgcaatcgcccaccctcccctccatgagatcacaggcgagaggcctattgcgagcgaacatgttcctgtaggtgtggagaccgaggactttggttttgtggatttcatctttttttttactctatccgttttttaatatataatgtcgttaactttttgatatacgtttaaccattggtcctatctaaaaatttatgtaatattatttattttattgtgacttgatttattgtcaaatgttcttttaaatatgacttaatttttttaatttatacaaaagttttgaataaaacaaatggtcaatcgtttgtcaaaagtcaacatcgttatatattaaaaacggagatattatccttatagagaaactattgtatccaactttttttttacaaaattcagaaaaattaaaattatgatccgttttgaacaaactgctgtgcattctcttagatcgcctgtgcatacaccgtccaacaaggcaatacgcctgtcgccctgtcggcgtcgcactgatcgatcgacgtctgacgaataacaaactcttgtctcgagccatcctgtcgtaatgtgtcaaccacagtatcagggactgtcacactgttgccgatccggggccagtacgacgaggagcactcttttcgcacggcaagttcgtgtcctccgtgcaaaatgcaaaagataatcgctgtctttggtccgggtgtgacacgatcggtttggtgcgatcggaaacttccactgggatgctccgtgctcggtgctcggattgcaaagctgcttgctgttcgtcaactaaccggtacaaagatgcggcaatcgcttgtttaattccagggtttgataaaaaaaaaccatagtcttatttattcgcacgtccgtatcactgtctgtgtaggaacatccctgagaaagcatggcttggaaacgaatgataaatcaatgtgttacttgaatgaaacatgctaataatactcacgcgtcaacgcgctacagatatttataggcaggtacagaagcacacagagatacgtctccggccagattatctagatacagtatcccatcggataattagtgtattcaatttgataagacgttctgactaacaaggcaaaagttttgcactgctggatgaagattattgatatgtctttgtcttgtctgaattctgtagctcaaaggggccattacaaacagagaatactgtaggcaagttgaagaaagcaaacaaaacagtgctctgtgctcgagctagacaatatatttactgtaattgtttgagagattaatatgtcagagcaactacagatcgtggtgtaagattttggacaagccaggatttaccattcggatggaccacgggatcccgatctccggcggtaaggcagtttttgggaaattttgactaaaatttgcttgaatttattgttttgaatttgaatctatcgaaaccgttcaaaacctgcctcgaaatctgctttttgtcccgtgtcgagtgtcgacactacgaaatttccccttcttcgtcggaaacgtggacctggtaaaaacttgtattctcttggatgatatttgtatgggctatactgtaatctggcgaagcccgtaaactctcacgaagcctgtaaacagtccgaacaaaagcccaggtagcccttctgaatttcttgcaataagtttattttgcttccctctgtgtcttctcatgatagaatcatctcccccaattttaaaaactggtgcaaatcaactccttcgagagtttagaaaactcctttgatagtttagaaagcagtttatgctgacatgacatgttaactgtgatactcgttgagtcagtaggtgagacccacatataagcgacctccaccacatcccatcttcttccttgtccctcttccattgatgagctgcaacgtggccagcgcctccaagtccatcctaaacctctcccgctcattgtagtacaccagccattgtggctgcccacctctaccccactcccacaaccctcgccgaatggcgaggaaggacaccgacgacagcgtgtccatagcgaactgagggccgactacaccccacccctgtcgtggtagcccattccttctcgttggacgttgagccacataacacccagcatctgcaccatcatggttggttggcctcgcagtaagtgtgggtactggggagaagaaaatgcatcctagggtttgcgtaatttgggtctcgagggtttggggttggggatggttgtgcttgcctcaagaaggatatataggttttggttgtcggtggtgggaggctgtcctcctagcctcgcgaatggcgaggttgcctaggatgttaagcaagatgttaatgcatagcctaggagtttgagcccgccggtggacaagcgaggat

SEQ ID NO: 4537 - DNA, 70493 bp, Oryza sativa
aaaatcccttgtatttaggggcagagggagtataaggctatacctctatgattttgcaccttttcaaagaaaagaatttttacaactctatgcatgtgcgctcgtttgtttcttatttttcagatactgataataaaaaagctgtaccaaattcgaccatgaatagtgttgaccgtaacaaaattcgtgggttttcttttcgcaagcgtagctcactgattaggttcattgtgatgaaagcagtctactcggattcaagtcctaaacttgacatagttgctgctcgtatttacggctaattattcattcagtcgtaggcgatatacccatcgatagttagatgctcgtggttactctgttacactactatagaaagacactataggtgctagaatagctaaaaccgacatcgatagtattttttcacacttacacgtgctcattggggggggggagcagcaaaaaccgacacctttgtgaatagataggtgccggttctatataaaaaccaacacgtaaaatattagtattggtttattcaaaagaaccagaacctataatatattataggttctggtttttaagaaccaacacctacaatcatataggtgtcagaattttaaataaacagacacctattaaaaaaattggtcggagccgactgaaccgaccaaccttatctactcccactcctagtcatccttatcatccacactgctaccccactcctgtccctcctccttcctcctctctcctcctccacactaccgccccactcccacccgtcctcaccgccgcctccccccacatgcttctgctacgctcctcctttctcccactcttactctccctgtcgagggatccaggtgatggcagcgcgaatacacgatgacagcgacgacgacggtggcacgacagcacgatgacggtggctacgcgacggcgctggcgccctcccctctgccagatccgacgaaaagggaggcgacgggctccccaagccgtccgcctcatccctgccgtcctcgtcaccgatggccacgtcatccccgttgtccatgttgtggatccacctctggacattgctcatcactgcggcgttgtcgtcgttgcctgaccccctccttggttctagctcaatgggcgctggatttggtgaccctggtacttggcgtcgacctctcctcgccgacagaggtaatgtcctcatcggcaatagcgacgatgatgatagtagcccctgtgctgcccactccgccagatctagaggcacctggcaacgccgggtagtcccttcgtcctcggctccaccgccgacatcaaaggtcagtgtcccttgtcctctccctactccatactcccctctccttcactctcctcctccttctctcgccctcctctcgccctcctctctcttgttgatcttgttgtcggcaattgtctacaggacaacaggtgggcagactcctccatggtggacaacagtcgcgagttgtctagaatttctaaattcaaatccatgtgatgaaaattgtaatattatgtgatgtgttgatggattatgtgacttttaatcctataaatttgtgaatttcgttggatatctgtttcattctttagggattttaatcataggctcattgtctcgagcctgtctcgatggtttttttttctcctgtagggtcattggtgttagttgttcaaaccttataggtgcatgttttctttacaaccgacacctatatattgttatatgtgccggttatgtaaccgacaccgatgcctttagtcatcagtgccatctgcttggatgccggttgagaaaaccaatacctttgtgtggttccaactaacacctattaatgtttttttagtagtattaatttcaagatataccggtcaaatgctcataggagtagggggatcgggatcctctgcattagagtacaaaatgcaaaggagctacaataatttgcattaggaggaaactgcaccatccattcatgattaaagacatatgataaacatccacagtatgaatgtgatagcaatggatataagctaaaatattgatgctacagtaatggattgatctgaaccgtccgttgttaatctaactactcaaatactactgcaaaacattgtagcatattgcattaatagttcaattatagaggatccatatccggagtagggcatatatgtttgtcggtgacatgggaccggggatatcttgactagaggtttggggcagccgcggtcacccacgtggcctgaccccctcgggggggtcgggcccgaggttgatgaggccgcccctccctctatctccccgaggggtcgggccgctcccgtttcgaccccccgggggctggggcgccccgaccccctgagggtttggcgccacgtgtgtgggttaggtgagcacagcggcgctcacctaaccgcgtttattgcgggttggacgagcgcctcacgccgcatttaatgcagcatagcgcatgcttatccggtccgtgatcggtcgcagtgtgtgaccgatcacagaccggtcagatcgcgggttagggggcaacaggcggcctgacacacgcctcgccccgtcccgtcggaatgatgagagcctccaggcactcgtccctagccagagccggcgtgggaactcctagagttggcacgtcagccccggccagatacattccaggcttcatcgcaaccattgcaaggaagtcattgtatgaagaagtgcagacgtgtagcatgctaaactgacacgtggtggacaagaatgaccggtctgtgactggtctgacgccggtcgcgtcatcagcaaacaaccgtgcttccacgttgcacctgcttccggcggagtggaggttggtatgacccatcccgtcggagggtcattcggacagcagccattgcaaatctccgcccattaatgagggaggacagggttatcccggtgtcaggcgaaagtacgagccaagttttggtcaaagtaggatgggtccccacccaaaagaagggtaggtagaaatggtgtatgtggtatccccttgagatataaaaggaggaccatgcctacgaagaggggggaccaaaaaaaaggagggacggaaaaaaagactagaggagacctgagcaagtagactggagaaaagaggagtgagaggggctctagagtgggaactctcttgctctccaactctttgtaactccttcatacacagatccaccagaacacaggagtagggtattacgcttctcagcggcccgaacctgtctacatcgcccgtgtcttgcgcatttactctctcgcgaaacattccccagaccgatcgagggcgaagaacctcacttagcgcccccggccgaaccggcaaaggggggcctgcgcggtctcccggtgaggagccccacgctccgtcatctggcgcgccaggtagggggcgcgcgtgggtttttctaagccctcgtcctctttcgtgtgcgccaagcttctcccgctcagcccaatggccgaacgggcagtggcgcacaacctctctccgagcgctagcggtgacgacagcgagcagaacccgcgtcgtcgagctcgtactccaccgcccccctctcgccgaagtcttaggcgggaggaggcgctcgagggggtcgaaagatccgcgacttcgccgcacgcgggcgatggagaaggacggcgagacggggagcgtcgtctcctcgtctacggtgatggcagcacgccccagggcgcgctccaggctgcgggcgcgctcttgcgtcacccgcccgtcgtccctgatccagagactccaacccgccgttggctagatgacgtggccaacttggtcatgacggcgcagcagcgcctaggcgccggcgggcggtcctccgccaccaaggccactggcgttgctactgccggctccgtgtcgtcgaggcgaagggcgcggcgagcggcagccgttacccgccgttcatctgccattccctcgtcaacgcctcccacccaagaagatgtgcgtgaggggccggatgcccgcctcaatatcgagcgccggcgcaatgatcgccgtgctgcccacgcatcggagggcgcttcctcgtccggagcgccacttcggtccgggcacgggggccagccccccgtgtccccggttggcggtgccggctgtcgagcctttgtggcgagccttcggaacgtccgttggcccccaaggttccggcccaccatcaccgaaaaatacgacgaaagcgtcaaccccgccgagtttctccagatctacacgactgggatcgaggccgccgggggtgacgacagggtcatggcgaatttcttccccatggccctgaaaggacaggcgcgggattggctaatgaacttgccacccgcgtcggtccactcttgggaggatttgtgccagcagttcaccatgaacttccagggcacatatccgcgcccaggtgaagaagcggacttacacgcggtacagcgaggggacgatgagtctctttgctcgtacattcagcggttttgtcaagtccgcaacaccataccgtgcatccttgcacacgcggtgatctacgcgttcagggggggcgtgcggcacaaccgcatgcttgagaagatcgcctccaaggagccccagaccactgcggagctttttcagctcgcggaccgtgtggctcgcaaggaggaggcatggacctggaactccaccggttccggtgtggcagcttcggccgcccccggatccgccgctcggtcagggcggcgggacaggaggaggaagaagaggtcggcccattccgacgacgagggtcacgtcctcgccgtcgagggcgcttcgcgggccacccgaaaggggaggcctgcgagcgacaaaaagaaggaggccggcgctcccagcagggagcgcccgaccagcaagtggtgcaccgtgcacaacacctccctccacgacctcgcggactgccgcgcggtcaaaagtttggctgagcggacgaggaagtgggaggaggagaggaggcaggagcgccgtgagggcaaggccccggcggctccctccagcaaccggcgaagtgaggccaagcagaaggcccccgccgagaacattgacgatggcgacgatgacctagggttccaggagcccggggccaccatcgccaccgtcgatgggggagcacgcgctcacgcttctcgtcggagcctcaaggccatgaagcggagcttctggccgcggcccctacccatgaggcgacgcggcgggcgcggtggtcggaggttgccctcaccttcgaccagaccgaccacccgccatgcattgcccggggaggacagatcgcatggtggtttcccccaccgtttgcaacgtgaagttggggcgtgtcctcatagatgggggtgcagccctcaacatcctttcccccgcagcctttgatgccatcaaggccccggggatggtgctccggccgtcccagccgatcatcggtgtgacgccggggcacacttggccgctaggtcatatcgacctcccggtcaccttcggtggttccgccaacttccgcacggagcgggtgaacttcgatgtggcggacctcagtctgccctacaacgcggtcctagggaggcccgcgttggtgaagttcatggtggcggtccactacgcctatctccagatgaagatgccgggccccggtggccccatcaccgtccatggcgacctcaaagtcgcgcttgcttgcatggagcagcgcgcggaccacctcgccgcggcatccaagcccgcgggtggcgacgagaggctcagcacctccgtcccagccgccccgaggcatcggatgatcacgtgcgacgaggtcccgatcaagcaggttgccctgggcgacggcccgtccaagaccacacgaatcggtggtcttctggacgataaataggaagacgcgctcgtctccttcctgcgggcaaacgccgacgtcttcgcctggagaccggcggacatgaccggggtccccagggaggtgattgagcaccgtctcgccgtacggccgggcgcaaggccggtccggcagaaagtgcggtggcaggccccggaacgtcaagccttcatccgcgaggaggtggcgcgacttctggaggccagattcatccaagaggtcatccatccggagtggctggcgaacccggtcgtcgttcccaaggcgaacggcaagcttcggatgtgcatcgactacaccgaccttaacaaggcatgtcctaaggacccttaccccctgccacgcatagatcagattgtcgactccaccgcggggtgcgaccttttgtgttttctagatgcatactctggttatcatcagattcgcatggctagggaggatgaggaaaaaactgcattcattacccccataggaacttattgttatacgacaatgcctttcgggttaaagaatgcaggtcctacttttcaacgtactactcgaatttctttgggtagccaaataggacgtaatgttgaggcctatgttgatgacttggttgtgaaaacacgcaaccaggagaccttactttcggatctagcggaaactttcgaaagtctccgcaccgcccgcataaagctgaaccccgacaagtgcgtgttcggcgtgcctgcgggcatgcttctcgggttcttggtctctgcccgaggcattgaggccaaccccgagaagatacgagctatagagcggatgcgccccccagcaagcttagggatgtgcaatgcgtcactggctgtatggccgccctaagtcggttcatatcgaggctgggagagaaggcgctacccctatttaaactcgtcaaacgctccgggccgtttatctggacggaggaggctgaacgggccctcactcagttgaaggcgtacctcagttctcccccagtcctggtcgccccggagccagatgagccgttgctactctacctggcgggaaccccgcaggtggtcagcgcggcgttggtcatggagcgcgacgaggacgaccctcgcttcgcgcatccccaccctgtgtcgactcgacccgggagagagcagggaggagaggcccccgagccgaacggtggcccaaggcccccgacggccggagctggccctccgcccgcttgtccgaaggtgccaggcgcccccgacccccaggatggccacggggccactgcgggaaggccgcgcctgtcgccctctgaccccgaggtcatcggcacagaagccgagtgcgccccgcgcggcctctcggagcgtgacgaggacgatcctcgctctgcgcgtccccaccctgtgtcgattcgacccgggagagagcagggaggagaggcccccgagccgaacggtggcctaaggcccccgacggccggagctggccctccgcccgcttgtccgacggtgctaggcgcccccgacccccaggatggccccggggccactgcaggaaggccgcgcctgtcgccctccgaccccgaggtcgtcggcacagaagctgagtgcgccccgcgcggcctctcggacgaagagcgccctggaaatgcggcccctagtgaagaagatcggccccgccgaaaggtgtagcggcccgtctacttcgttagcgaggcccttcgggacgccaagacccgataccctcaggcctagaagatgctttacgctattctgatggcttcgaggaagttgcgccattatttccaggcgcatcaggtcacggtggttacgtcctaccccctcggccaaatcttgcataaccgagagggtactggacgggtggtgaaatgggcaatcgaactctctgagttcgatttgcactttgaaccacgccacgcagtcaagagccaggccctcgccgactttgtggcagagtggacaccggctcccgagcccgtctccatccccgaggccagctcgggcccttcgcagctgcctcacaccgcctattgggtgatgcagttcgacggctccctgtctcttcagggtgccggtgcgggggtcacgttgacctcgccgagcggagatgtcctcaaatacctggtccgcctcgactttcgggcaaccaacaatatggcagagtacgagggactccttgcgggactcagagtggcggctggactggggatccgccgcctcctggtgttaggcgactctcagttggtcgttaaccaggtctccaaggagtaccagtgctctgacccgcagatggatgcttacgtgcgccaggtgcggcgtatggagcgccattttgacgggatagagcttcggcacgtgcccagacgggataacgcggtcgccgacgaactctcaaggctcgcttcctcgcgagcccagaccccaccgggcgcctttgaagaaaggcttgcccagccgtcggcgcgacccgaccccctaggggagacggacgcgcctgaacggcccccgaggcccgtcagagtccaggcctcgggacccgaggggagcgctcccagctcccttagattgattgcttggatcgctgagatccaggcgtacctcgcagataagactctacccgaggaccgcgaagggagtgaacgcgtccagcgcatctccaagcgctacgtgctggtggaagggaccctctatcggcacgcggctaacggagtcctcctgaagtgcattcctcgggaataaggcgtcgagcttcttgccgatatccatgaaggcgagtgcggagcccactctgcctcacgcaccttggttggcaaggcctttcgccagggtttctattggccgacgactgtcaacgatgcggtcgacctggtccggcggtgcagggcgtgccagttccacgccaagcaaacccatcagccggcccaagccctgcagaccatacctctttcatggccgtttgctgtctgggggctcgatatcctgggtccgtttagacgggccccgggcgggttcgagtatctgtatgtcgctatcgacaagttcactaagtggcccgaggcttatccggtcaccaagatcgataagcactccgcacttaaattcatcaggggcatcactgctcggtttggggtgcctaaccgtatcattacggataacggcacccagttcactagtgaactcttcggtgactactgcgaagacatgggcatcaagctctgcttcgcctcccccgcccaccccagaagcaatggccaagtggagcgcgccaacgcggaaatcctcaagggcctcaaaaccaagaccttcaacatcctcaagaagcatggcgactcgtggatcgaggagttgccagcggtgctttgggcgaaccaaaccacgccaagccgagcaaccggggaaacgcctttcttcctcgtctacggcgcggaggcggttctcccatccgagctcaccctgaggtcccctcgggccaccatgtactgcgaggctgatcaagatcagcttcgcagagatgacctcgactacttggaagagcgaaggcggcgcgcggccctccgagccgcgcgctaccagcagagcctgcggcgctaccatcagcgccacgtccgggcccgatcactctgcatcgacgacctcgtcctacgccgcgtccaaacgcgtgctggactgagcaagctctcaccaatgtgggagggtccgtatcgagtgatcggcgtcccccggccgggctccgttcggctggccacgggcgacggcacagagctgcctaacccgtggaacatcaaacaccttcgtcgcttctacccctagtgggggtcgggtgtcaggtctcgggctcgggccaaccccgcaccccgcccgggcgtgcagggttggccgggggctaccacatgcataagcttatcttttttctcttccgtatttcaataaaagcattttcgatttcctaaggactgtgtctgtgccattgtttcctttcgaagaatcttggcttgaattagcacgctcgtgctcgatcctgccctcagtggcccgggccggctaaaatcgccaaacggggcccagaaccgagccgtgccccggggcgtggtgaactccgggggggaatcggcaaaggcccacaatcgggtccccataaccctcggtcaccgcgctcccggcctggccagtctcgacacgtggatctccccaggcactagccccgacccgcgccgtttgaggctgggacctgggcacgagtcctcgttcaagccaagacacagaaggaccgcggcacagaccatcctcgtctcatatacacaacgaacagagctgacacaaaaatttcctctttatttgattgcagattgaattagtttatacaagaagggggcccgaaggcctcagaagaagaaagaaaaagctatttaagattggcgggggcctgggggctcacgccgacgcgcccgggtcgccggcctcgtcgtcgctgtcgtccgcaccaccgtcgccgccctcctcgtcggagtcgagggcgaacgcgagccgaggggccgtaccctcgaagctgtggacgatgtggacggcggcgtcccggacctgtgcgcgcgcgccatcctcggttccaggagagaactcgtccagcgctgcccacggggagaagtccgggtccctggcctagtagcttgccagtacgagctccaccgccccccgggcgaggtccctcgaggatgacttgatcgtctcctcgagctcctcggggagccgctggagggtcccggccatctctgagaggcgctgggcgaggcccccctggttggcggcatatttcgcgatccgcccgccccagaggcccgcctgccgcccggcgcggtctagacgggagacggcgtcccgaaacatgccgggccctacctcgcctgccaagcggagggcctcgacctccccggcggacgagtccagcgcgccctgcagctcggcgatggtgtgttcggcagctgcgaggcgggcggctagatcgccgtcgcccgcggctgccccgccgctgcgcgccctcgcgtccagctccttcgcccgcgcctcgagctcagcggcccgctgatccagtgcggccctctcggcacgggcgccttccagattacggcgcgcctgctcctcccgcgctgccccgcggagggacaggctgtccgccagccgctgcgccgcggcctcggcctcctcgagagctcgctcccgctcggtgagcgcgtcctcgcggaggcggagtgcggactcctcttcggcgcaggcggcctcgtgcgccgccagcgttgcctcccggatggcgacggcggcctcgcgacccgccagttccctttccttcgtgtccagggcgcgggcgcgctcctccagcaccgtggcgcgagcctcaagggcctcttcacgctgccgggacgcgttgagcttcttctctagctccgcctcccggctcccgtattggaggcagaggtcgtcccgcgccgcgttaaaaacggcggtggcaatgagggcagtctcccgctcctcctccacctccctggcgatctccgccaggtccctacgacgggcctcgagctctgaggcgtgccggcggtgtgccttgcggcccgcctccaccatggcctccaccgagcgtcgcccctcttcgacacgcgcccacgccgcgtcgagctccgcccgctctgcctgcaggacctccatctgggcacttaacccgtccaacaccgtggtgttcgcggtggccaaggcctgcagaaggggctccgcgctcagtggggcagcggaaggcatgggggagagccgcctcggtaaggatgccgcacggctcgtcccaccgatcgacgtgccggactcagggacgtcccccgaagctggcccgtcctgagcgtcgcccgagaggtcgggcccgagcggtgcgcccgcggcctcgtcgtgggtggcctcggaagtcgtcgtcgcctcgggcggagtcgggtcggaggcttggcaggccgcccggcgtgcgcgcgccgcctccgtctcccggacggactcctcggcccggtggagtcgggcctcctcccaagcggcttcctcagcctggcaagcccggacagcctcctgggcagcttcctcggcttcccggaggcggtttgcggtttctcgccggtcagctccccgcctccgggcctccgcggtcgccgtctcctcggcctcagaccggccggacttggaatggcgggaagggcgcgacgggatctcgctgaggtagaagaaaaactagaagacgaaaaacgggtgagtgaaaacttgccttgggagatgggagaatgaatacggccgcagtgggcgcagggacgaacctgcgaggaggtcggctaaacgaccaccttgggggggagatgaggtttccccggtatggttcggtcccccccatcttgtggagccgcttcttttttcgcttcccctcgggccgcgacgtcggcacagcaccctccgggcgcctgctgctggcacgcaccgccccgccccctcggggaggagatggggagggggtatcctcctgtttcctcttcccccgggcgtcggtagggcggctgccccccgggcccccgtcacggggcccagaagcacgaccccctcccggggtagattgttcccccctgcggctcccgcccgcgccatcgtggcctcggggggcccgctcccccgacgccccgacctcctgcatgatggtcaggatgttggcgcgctctggatcgcaggagaggggaaggaccccttgagagatgaaggatgcctccacggagctgagattcagcacccgttggaccactattctgaagtcctcagggtcccagtcccatttgcgcccctggtgggtcctcatgatgtcctcgggcccggtgtactcccaggcgccccgggcgtgccgctggagcggcgcgatccggcgacgaaggtagtcgccgaacaccatggcccccgtgagcccctgggaccgcaaaccagccaggcggtcaagaacggcgtcgtagccgtctcccagatctaccggcgcccgccagctggaggcctgcgccgggggctggctcggaagtcggaggcgcgcttcgtcggcgagaggggtgtagaaccagtcactcttccagtcatcccacttcttgcgaaggacgcagggaatgtagcggttcagcaccggcccccgcggctggaagtagcagccaccgactaccgacggtggcgacaccggctgtacggtgaagaaccaccggaacaaccggagagatgggcgcaccccgatgaacatctcgcacaggtgcgcgaagatggccaacgtcattactgcgttgggggtgaggtgcgccatctggagatcataaagctccagaacatccatgaagaaagaagagaatgacgggaccagccctgccattgcgaagggaaggaagaatacggaccgccccgggtagtgtggcgccgggcgtccctcacccagcgcaaccacctcccggccggtggcagattccggcatgaatcggcgcggcagcccggcctgcctctcgctcacgatgcgagaaggcggcagcacgctaccgtcgagcggtgcggagccccgtgccataacgccggcggaggaggggtttgagagcgagtgagtgcggcgagggtagggcacaggaaacgagaagttagagcgcaagcggcgaaggcaaggggaataatggcgagaggaaggaaacgaatctcttcctcggcgtctttatacccttgccaaacgctatgcccggctcctcgcttcccgcgcccactatctcgccccctcgtttctcgcgcccactcctccattaatcctgctcgcccgtttgcggcgcacgaggcggatgtgcggccgtggcagtcgagatgggacatatcatgcgcgcgttaactacgctcgccgaccgatgcaccatcatcacatctccaggcgaaacgaaccggctcgtcccaattcgcgcgctactcaagtaatgtagcggtcttgaagaaagccgctcattattgtcggtcggtttttcccttgccgatgcgcgcgatttgcgaccactggattcctgtccgcctgtagagaccggtcccacctgtcaccaggcctgaggagtggcgtcacgcccgagcgttttcctcgaggagggcgatcgccctggcataacgccgggggctactgtcggtgacatgggaccggggatatcttgactagaggtttggggcagccgcggtcacccacgtggcctgaccccctcgggggggtcgggcccgaggttgatgaggccgcccctccctctatctccccgaggggtcgggccgctcccgtttcgaccccccgggggctggggtgccccgaccccctgagggtttggcgccacgtgtgtgggttaggtgagcacagcggcgctcacctaaccgcgtttattgcgggttggacgagcgcctcacgccgcatttaatgcagcatagcgcatgcttatccggtccgtgatcggtcgcagtgtgtgaccggtcacagaccggtcagatcgcgggttagggggcaacaggcggcctgacacacgcctcgccccgtcccgtcggaatgatgagagcctccaggcactcgtccctagccggagccggcgtgggaactcctggagttggcgcgtcagccccggccagatacattccaggcttcatcgcaaccattgcaaggaagtcattgtatgaagaagggcagacgtgtagcatgctaaactgacacgtggtggacaagaatgaccggtctgtgactggtctgacgccggtcgtgtcatcagcaaacaaccgtgcttccacgttgcacctgcttccggcggagtggaggttggtatgacccatcccgtcggagggtcattcggacagcagccattgcaaatctccgcccattaatgagggaggacagggttatcccggtgtcaggcgaaagtacgagccaagttttggtcaaagtaggatgggtcccgacccaaaagaagggtaggtagaaatggtgtatgtggtatccccttgagatataaaaggaggaccatgcctacgaagaggggggaccaaaaaaaaggagggacggaaaaaaagactagaggagacctgagcaagtagactggagaaaagaggagtgagaggggctctagagtgggaactctcttgctctccagctctttgtaactccttcatacacagatccaccagaacacaggagtagggtattatgcttctcagcggcccgaacctgtctacatcgcccatgtcttgcgcatttactctctcgcgaaacattccccagaccgatcgagggcgaagaacctcacttagcgcccccggccgaaccggcaaagggggcctgcgcggtctcccggtgaggagccccacgctccgtcaatgttcatagggataagtatgcacttgttatgagcacctgagtttgtaccatgtttttaaaataattgtgcttttttaaaggctaggtattaactttttactaaactattcttaacaatgatgtgtcatgtatatttgtagttaaattaattgttaaaataaatatttgtaaaggttttgtaatatttttttaagttcgtgtaccagagttattttttcttcaattgaggctgctgcctgtgcgtgctgatcagcgggcagaggcaaaatgacatcacgtcgccactcacaatcaccgcttgccagtggtttgccacaagaaatgggttttatcttgttctttgcggctctgcatcactaattcgacaaactctatttttcactcaactattggccgaatctatactacgcctttctcaagtattaaaaccatttcaaaaagatttctcaaatttgaggtggctaacgtggcatccacaaggcaacccagtaagtgactacctcccatcttcttcctacaccacccccctctctcccctcactccctcctatgggcactccacttgtgggtaaggttgcaagggggtaggcccgtgaacccacttacaatacaaaaaagcgggtaatcccgcgtaattgggtacgcgggcctgccccttgcacccctacttgtgggtcaccgacggcacaaccggtggctagcaggcgacagaggaggaggagctcgagtacaacctaagccaccacactcctcctattgaacttgggaaagtggtgacgaagatctcacaacacgagtgaaggtactcaaacatcgtgcgggattcatatgggtcatcatgacaacaaccgtctgaaggcagtgggaggtggagaggaagacctcgattagtgtagagggaaagttctcaaggtagtactttaggttgaggcggatggagtgttgccttcaaatgcattgcataagagggaaaagagggatgccgctatagcaaggaaggagttggtcgttgtgacatcccctgaggagagggcggtaccaagaaaggagacgatggaggggaggacgctacctagcagggaagtcggaagctgtggcggcaaagagggccttggagagttgtgcatggatgagagacgacgtggtgaggagctggaggaggttcgctttgatggtgatgtagttgaagggcgagaggttgatggcgttgtcaccaggaggtcttaggcggagaaggagattcttaaattggatggaagcaaggagccacatccgcgggtcatggcgcagggaagagatgaggcccaacaacgtgagcgtgaaaagcccaaggagcacaaggaggacgccaagctttgcttggttgcatgacgtgtgacggtgtcaagggagaatgattacgtgaaccatctcgtcagagtgtcgagcctctccagagccatcttcattcccgttgtacggtgatatggcagaaggcaactagggtttggtggaacaaaggagatcaagagaggtgctggagctcccgcaagagagggaggtgagactaagagaagggagtagttgaggaaaaaggtgagagatagccatgtacatatcgatggagttgttttaatattcattcgcgatatacccggtttaaagggattaaaatggactccaacccacccaaagagcgcgcgtgcaatttgaaggtagaaatgggctttcatggcagtactttcctgcggaaaccggcccaaggctacagttttcgggccccagacccagaatgcgaggtaccaaggcctgcctagtcactgaaaacgccgcttctcttctgcgagcctgcactaaaaaaagccagaagaattttgccccagatccataccaatatcaacacaagttcttctccaaattgctggcattagaactttgcaaattttaaattatgcactgtatggcaaacggggaacggggttcctcttgccttagttccaacaatgcaaaatttatttgaaagtcatcggttcactagttcatcactggcagaattaattataccatcctcataccgcctattcacatctctatctcaaataggagtacagaacattaagcctttgatttctggattacgagcaatattttgaagtttgaagatagatactttaatttaccgaacactcggcacagtagtcagtacagtcacataattacacacgcacacgctggagctgctatattcgtcaagaggctcccacctacgtataaaagcgtataaacagtggcgtaattcttctagagttcaagaatggcgagggattctcgcagaaatcagtggtaactcgtatcttctctttaactaaaagcatcagtccatcagttatatacacacgaattccttagcataacgtcactgagctcaccgcatagcccgctttgtggtaggggatcttcacctgtgaagtttacgaaggaaagaacggtgctatggtttttctggtggctcttgctgttttgctctactccgggacatcaacctctccttgatttctttaaatgattggagctcttcgagtgcatcagatttcctacgggacacgacagaactggttgaggctgcttcactagattcaaccgctgatgcttgagatggacaattagagtttcgcagagggcgtgcagttttgagcaggtgcaccagagagccaactgcggcatcttgtgatttatgggacgacgaacttgcctgatctctagcttccttcccatcactgctcctgtatattatatagtgcatatagaaacggtgttagaaccatagaaactcagtagtggaaacaaagaaccgaatagtagaaatacaagaggacatacataactgttatattttatcaaaagccatgggtacagctcaacaaagataaacatgaatggggtgaataataatagaggcacatatccagataaggttatattagatctgaatctcctgttaatatagggtgctgcgtcaaaagaatatctgatggcactgggaatagtaaaatagactaatcatcttattcaatacaccatatagactatcacgcaacaaatgtagctcaatgcattgaatataattatcctattttggcaccacataacaatgaccgcccaaacaagcaaaactagatgtttaatttagagtaaatttcacataaccttatgtattaggacatgccactacaaatatgccattttagataaatgccactactattcacgatatcggctacgtgccactagaatttggggaaattagaaccgtgccactagtattatggtccttgttgaacaaaaccacaaaggttttggcatgtggcacaaccccggatatcatggttctagagtttcacaaaacctcattgttaaccaattgttctttgtttcatcataagtatgagtttctaatatcaaatctcaaaactcgaattaatgaatttttttatctatcataaaaaactttagccatctaagttaagcattttttattttgctacaatgtcaagttaaatttgttgacgccttgacagtgtggttttataaaactatagtactataatataatacccaaggttatgtgtcacgtgccaaaacccccgtggttttctgcaatttggaccataataccgggggttctatgaaatttactatttaatttatgtacgagtgtaataaaagtaaaaggaaaactccatttgagcaattcactcttcctaaggcctgaaatttgaccctcgaccacaaaccagatactcagcaatcagcatccctgaataatcatcatccctctcccatgtgctatccatctagcttgtcagatgtagcatttctcgccattcaagttgttcactcaatatggtggtacagtgactgccggttggggttgtagatttctgttttcaatggttctgtaattgatttttatggtgaactgtaggggaaggcccatattgtatggattgtcattaagaaaataaagtgctgaattgtactttcctggagctcttctgcagacttatctcacacgtgcaagtagttcaactagcttagattttggtgtaataggtaaataaacttcattaggtgttcacagaagtcattagcaagcaaatttgcctaacccataggcatcaatgccatgccagctactgtgatggcataggtttgagtgaccattaccttgttatgtgaggacataagttcggtcgacccagcaagccagattatgtgttactacaggattaatcagtgccgttgatcagttaaatgttagtttgcgtatcattttcttggttaggtctgtttagctattgttgaggatcgttaggaacattatttggatattgcaaacgaccttctctatacaacagaggtggcattcattattaaacacaagcaagaacttagcctactctcttctgtcctgtcactctgttctcttccagggttccagggaggtgagggttcaggctgcaccctcctgtcgagcacaactacaccctttgccatttaagtccagggccaagccataacaaacatacttgcacatgtaggacatgtttgatatgtgtttgatgaccactagtacaatttaatcttttataagtgctttgttagtttctttctgccgttctggttgtatcttgatatcgcttttggttgttggccagtgtgttaatcattgtcgagttgtagcctagtggctattttgttccagaaactttaccaggatggccggtaatcccgactacactcttctatctacctatgctttctataaatagcttggctttggccttttgtctaaaaaacattttaatatgttaaaacttgttgattgtgactaagaggcaggttacatagaggttagaacttagaagttgcaaaaagaaaaagtcatcgagtcaagtccaaatttgtgctttgcatttgtagcaactgttagctctgacatatgattgtgttcactctaactataaagcaaagaaacttaagaactggtaactatgcaaaatctagatctttgcaataaactacatattggtagagctgtcgatcaaggcacaccgagtccatgttaactaagccaataaccctcatttttattattcctttttgctatctctaccagttattctaacactagttttgtagtatgacaaaataacatgtccaaaaggttttcaaatccttagtccccttaatgtcatatttaaacttttgaaaaaaaaaatcaaataatgtgcaacataataggatttgatagctctaacgatcaaatatttgtgtaaccggatagcctctagcattctttaacaactagatctatggatactaaatcaacttagtactgcctccctcccaaaatataacggataggagctagtacttcgtatttcatatgaatagataagacttcatgtaattcgtttctggctttatctgatgcactactgccctagcaaatggcgaaattcatcaaatctatagatagaatatttaagttactaccatacatacccaggctgggagctcggtgtatcaacatcatccacagcaaagggataatctgcatcatctatatcatcttgtcgaggggaatcacaggaggagagtgcagagaacctgccagattcgtccttagtgtccttgccctgcacatgggtcaaacggtgtcaacgcagacccaactcaaatacatatttttttcctggcttcaatagctagaggaagataaataagttatccatagctaatgcagaggataagattaagtcccataaaggcaatccactaaataaaaattaaaagtacaagagcagacatatattgcagcagacaagggtaatccaaatatccaaccatttgaagatcaaaagctgcttttgggtaagcctcagaaaataactaactcaacaaccattcttctgtttcaacaagtactatgaacgcatttcttttcaacaaataatatggtctcagcaagaaccaagagacaatcgaaacagttcacaactaataagagaccctgatatgtagtctattttttgccaaaaaaaaaaggagagatgagagctaaatggtgtatatgctaacaaacagtatttaggctgcttcaactccagtactaataatggcttacattccactatcaaacatggtttgttgcacaatatcatgaagctaaacttaacataacaacttaaacttgtgaatatgtactgctaaacattgacttgaaatagctcttggtagagtttgtttcctagtttccaaggtaaatgccagtaggctctactcagccacatgaaaacagaaaagtctacttcagatataccagatgaattgccttacactcactctcaaaagttatatgattcatgaaggatccagtattgagcagtgatgaagataaggcatacacaagtatcaaatataagttgaaagcatattggaggctttaaaaccatggatcaccttgcgtcctggcgacaagcttgcatagggatccattattcgaaatccatctgccctcccaaacgaggggcatctctctgatggagactgttgtgcactagatgttcctgtctcccctactctcctcggagacgttggtggcaatgtgatcggccggtgaattgggctcctcctgtcacccacctgtggtatgctcattggtgcagaccctcccttaggacgagattgaagatacccgctgggaaaattgggtggcgatggagtgggtgatgcgttgagcaaatgaggtggcgaaaatctagcttgctgcctaggcgcctgcggccagagcgctggcgtcgcccagctgtgcgggcgctgcggctgattggacagcgcctgcgggaaagcggaacctgtggctcctgtgagcgaagctgggaaggcacgcattggctcggcagcagggctgcccacgtagtcggcgatcagcatggagggcgacaaggaggagatctcgagattgaaggcagcgaggctggggaggtactggacagagacgacgaggcggccgtgctgcgtctcgacggggacgaactggtaggagcgcatggcggcctcctcgtcgcgggagagcggcacggcgaaggagccgacgcggtggaccatctcgtagttgtaggattggttggcgcagaggaggcggaagacgcggtacgccggcaggaagcggagcgtggcgtacaccgaccgaagcatcgtcatgcagcgcttgtacgcccggttcacgggtatcccctcgcccgccgcggcgtccggccagggctcgcacaccaccgtccatctctccaccacctccccgcccgctccgccgccgccgccgccgccggctgcggcgtgagccaggaggatgtccaccacgagcggctcccccgcctccggcgcctccactccctccgccgcgggcggaggctgcggatcgtggagcgggaggtggaaccacctgtcccgccgcctgaacgacgccgacgcggccggctgcagcgggcgcggcccgcgcacggcgagcacggcatggagcaccttgaggtggaactgctccaccatcagctccgcgcccccgcggccgcccgtccccgagtccgacatgctggacattgcgaccgccgaaccccgaccccagcgccgccgccgccgccgcccgcctcctccccctcaccacggctcaagctccacgacatggctggcgctcctcgcagcagcagcagcagaagcagtacggccgcataaatccgatctgctcgcgatcggagggaagcgcacggcgacgggggatagatctgcgcgtcgatgggagggaagaagaggagaggaagaggttggagttcgatggatgcggggggtgagaggagtagagttgtttatctgcaaggattaaggatcgctcgctggtttggttttggatttctggggttaaagggtcgctgttggtgtggtcatgatgagattataatggtggcgacgacgaaacgagattattttcgtgctcgtttaagataccttaagatattaaagttaactgaaatttttttatggttgagtttcaacgtaatttttctttctcaactcataaaatcgttcccggaatataggtacgtgtcagcccttcttcatttttgtttaatgtattggccattcgacgtatatgaacatatggcaaaggaatctttcaatggacgccggaatattgtcaaattttagtatcattcatcatgtgatcttagtatacagcttcagaggagttactgttgtatatttgtgttcgttagaagaataaagaaaattaaatccctcattttccgcttacacttccggattgctgaacgggagttttttaaaaaaagtggatagaaaagttattttaaaaaattgttaatttattttttaaaaatttaaaataataactacttaattaattatatgctaacggtggatctaattttgtccattttcttaaattttttatccccttctttcaaacacatccttaaaaaacaagaggagttactgtagtaaattattaaaatatcgtgtgctttgctagcagcttcttatctttgattatgggtaaatgttttgtcaacaccatattccaccttctttattgcgatcgaatagctttacctcttactcctctttttcatggactttgacaaacgcttcgaaatggtgattgctgcagaactgacgcaacatctctaaactaccctgaaatttcccaggaaaacagcccgtgccaaagctgaaaatgagctggaaaaagacgagtttggcaattctataccgccttgtttacgttttcattccgtcggtgcttcttcaccagtcaagtcgttcacttcttcctccaaaaaggaacatcagatggaaaatcaagtacgatgatctggtcaattgtactattaaattaataatacaacgaccttatccattattatcccatagcattattcttaggactcattccactaaaagtcctgctacaattgtaccgcatgtactattaataatagaatcttttagaggttctctcctatctttaagagatacaatacatcctcaccacctcaccaccaatatccctttagactgtctccaacaacgcgacgcatactcatttatccgtcgtgcacagtgattttgggtaaaaaaaaacagcctccaacgggagaggcaaatgcgatacgcatattgggtagcggccaaagcgctaggcaaatatacgtctcctctctccaccgaacactggagcggagctcgcgcagtcgcgcggtgggccagggtgaggcagagctggtgcggtgaggcggagctcccgcggcggggcggaggtggcgcggcggggcgggagcgccgtcggggagcaccgtcggggagcgtcgtcggagcgcgccgtcggggaggaggcgtagtgggcccgtagtggcgttagggcggagtgcggccgacggggagagtccgcggcggagcgcggtcgtcgcagttcccgctgctccgttctgagcatcgccgccacgaggacgagccgtgccgcgagccgccggtgggtgtgctccgcctgccaccaccgctccgccccgaccacagccgtcgcgaggagtcgtgccgcgagctgccagccgtcgcgaggagtcgtgccgcgagctgccagcgtaggctgttggagagaagaagattgggagcactgggtaggctgttggagaagggaatttttgagtgtccgacctttttactgtgcatcactcaatccatgatgagtctctagaatgggtctccgctgttggagacagtcttagaagttctcttctatccttggaagacaatacatacatggtacaacctcgccaatggagtgtagaaaagaatgtatgcccgtagcgactgttaaaactgttccatgctagctacgaacataaacatttgttctttctttttattcagctgagtgcctgagtccgatcaaatatgatgggattgagattttgtacagccggtaaatattgccttgctttgtacacagaattcaagattggaacatagactcgctgaatggctacttctgaatgctgagtggctgttaacattcggaagtctttcgtgttagttgaacatacattttaaccttgcaattcaggtgatatagaactccttttgtataagatcgaccctactgatcgtccaataaaaaatagcaaatgagttacatctatcatacagaagtgcatgacaaaggacctaaaagcaaaacaaaacaaaatgggaaaactggaaagcccccttccgtcagtagcatcttgtaggttcaatcagttcagagaagagcgcccatatctccagctattgtaggatctccgagtgaactgctgcggcgcaaaacttaacccaaacatctctctcagggccttccctggctcaaggagtccgatcagtctggcaacaagggatgcactctccctgacatgctccaggtctttggtttcggtccaaaggcaacgagcaacctgtagccttctcctcttggaggcaagtgaaaccccccatttggtgtacatgctctctcgttcctcgattgagagccgtctttgcatctgcctgcagagcatctccctttcgcgctgcaacttcttcgcactgcatcccgagtcaatttatcagtaggtatcgaagtgtcacaaccgatgtaatgcagtgaacttgtaagaagtatgctgaacatgacttaccttgaaactagagaagtattcgggatactagctatcgctccattggagtaggtatctttaagaaatgatagcctcctaagttccacttccatgtaaatggaatcagctgggtctcctttgaatagcaagaaaaaataggtcctatggaccaaagaaacattgcatgcatgccaaaagtcaataatctcttgttgcttcttctcgaattccaggggccaccgtgaaggtgactgtagggcatctgtaatcggatccagtcctacactcctgatggttccttctgccaagtctccatttccactctggcaatcgaaacaaagaacaaaatcataattaaatgtggcatattggactatcttaaagtagtgcaacgagtatttttagtttataaataagccctccttgagctattaaaaatgtgaagcaccataaccgtgcgcagttctcaaacaagtagaatgagcagcatcaacaggaacaagataacatttccaatgactcacatgaccaagttgcttctgatactgaacctgtgccatttctttcagttcagcaacaaattcacctatgccagtaaattctgtgtcgcctgcaacagaactgttagccttcagtccatccctcgtggtagtaatttcagaaagcattgaccctgcccttgatagggtctcgctctctgcatcatagttcagtgcagatccccttctttgacaattttgaggtctcccagcgaaatctatgaaacttctgtttggtggggtgcaatcgtccttctccaaatcttcaaacaaactagatccagtaagagacctacagctcctgctcctaccaagtactttagagcttgacgaattacgtgttgaagatcccagatcttttacaatattggcaaaaggttttctgacattttccaaatgctgctcaagggtaactggagattcatcacgaagcctagaattcatagatgaatttgaatcattgttgatatgcatactagaacctgcatttgggtcttgcaaactattgctccccacagccgacgattccaaacattcatttcctcctgtttcattggtttctatacaccgtacttctttgcagatatcatctgaatcttcattagagatctgtgagagatgatcacttctgttagttgggagcatcccactgaacggaggactgctgactgagtacctagatggggtagtaaactgcacattattttcagcctgctgaggcttatgttccctctgtgccactcgccggccttgaaacctaaaattttggacactgtcaacaacttctgatgactcagttgttgattgctcatcttcacacgtctgtggaacatcgaaggtaaagttcctcccagaaacctacatgtagatagaaggaaaaaggtaaataactttatgtggttatgaaacgatagttatactaaggaagtctgcataccgaggactgctttgaaacatggacatggttatctccaacaacctgaagcaaatcctgaagcctggactgagctaaatcacgctgtaacttcaattccttaatttctttctccatctgcaaggaagaatatgtgaaatcttttacaccatggctagaagttggtgtattgctggcattgaagagaattagcataaagcatgcataaaaatgatcattttaggatctacaagttctttaagtacaaagaaatagcaagagtgaacaccataaaggtcagaagtagcatttaccttccggatttggttatccttttccttcaccaatgattcaagactagaataggaagctggacatcgcaattcactctccaacctagcaagctctttttgcaattgcttaactagtgctttatcggacatgactacattaacctgggcatttgtaactacttcctttgcacaacttgcaaatagcagagtgtttctcgattgttccatatggctacgggcaggactcattgtacaaataattgcagttcttgcattaccacccagagaaggttgcagtatgcgtgtgagctttgaatctctgtatggtatgtgcccatttcttactttgctgcatagatgaaagcaagtaatcaaatgagccacagcatccatcctctaatgccatgggaaattggaattcaacacgacacaaagtattaagttatgttgtcaaccttagtttccgaatgacagttcctagggtaagtaaacttctattaatatgacagccttctttcagcctagcaccagctgataatgcctgagatgcacgttcacttcctgctaaatcaacaaaattctgcatggtacaacaaaatgcgctcaaacttcaccatttctacatgaaaaagaaatatgaccaaaatttaaatgtctcttaccacactagccacaagtgtagttgatttatccttacccaagaactcacgagcagaactttctattgtctgaaaggacagatgggtaagttagagttaatggaccaatgcaacatcaattttacatatttactatagcctttttcttttctaatgtgactgcgtagtgaacaaaccagtttaagtatttgatgcgatctggagctgttttcatttaagtatgtctccccggttttcctttgagctatataaaaacacagaatcagatggcagtaatcaccacctataaacttttttctagataatgtattaatgattaatctaccacaaacatcgcaccttcacatacagaaataagctccttgagatggttccagtccctcaatacaacctctgtgaggttttctacataggttcctttctgtaaaataaacaacaccaagatcattagtagaaagcaggagccaagcaggatttaaaaataattagataagtaggagttgttttgacctctgcatcatcccaaagtctaagaggagtgttttctgcacttagcagatcccttacaacttcattatatatttctattgctgaaaatttcaagacaaatgctctctcctcatgctgcaaaaagaacaacatgcctatcagcctgacagttcaaatgtgtctcgtttcaacaccagctatggattaataggtactaagataggtggctgattaccttgccaatgtaatcataaatatctgctaccgtatattcagttatgccagtcatggtgtatgtctttccactacttgtttgaccatatgcaaaaatactcgctgttacagaacaaattaaaaggaaataaaatgtgttcagttagttcatgcaatcttcaatcaaaaccaaattggataagataggcaataggtttggacttaacagttaatgccactaactacagagagggcaacctccttggccccttgcttgtatacttcgttcgtatcgcagtcagagcggaataccctatctgcaattggaatagagttgtgtcaaaaaacacagctggaaagtgagaatattaaagagcatacttgtagtacgagcaaactaaactcccacttatctgtattctagtggtgtgtagttgtccactaccaaaaaaaaatgtccaatacatttgtaaatgtaaacattcaatttcaggagggttagcttaatttctaaaggtgttctgtcagattttttttactgggacaggaatgtgtcgatgtgttctgttacttgtaacaaacgacgatgtataagtaacaaattaccagtgattggactccggcaggtatgttaaattctgagattttaaattttaaagaaatatacaaggtttgtcctgatttgaagcaactggaatgcaatacataagagctgaccagataagcaaaatcctaacaggagatgcagaactaatgaattacagatgtagaaaacccagagttgtgaacttgtgatgaactaaccgaaggagtatgcagtcggagccgatggcctgtcagggaaggtgctccgggagattatggtagtgtcattgatgcactcccactccgacggatcccctctcgcaatctccttgtcgctgagaggcctcagcctcactgacaccagtatcctctccagcttccccacaccgccgccgccgccgccattgaccacctcacctccgtccatcttgtcccactgcaccacctcatccccgccaatcgcccccatttcacccctctacacacacacacacacacacacacactccccctctcccctggcccctacaccatctgccaagagcccaaaatcacaccattataagcgacagaaaagcagtcacatccaaaataataataatcaaacgggtcagcaaaggcaaactggaattcaagaacccgtcctactcgttgggcggggaggggagccacggggtgttgagttgttgctcctgcaggtggaggagaaggcaaggcaagcacctctcgtggacccccaatcgtcgtggagacgattaagatggtggttagagcgtcgtccgcaacagtagaatcgcacactaactaggcctaaatctagcaaccgccccgcaagcagagcagctactctactcattccaatgttgactatcgcggctacttcccgagaacgcctaagcatatcccgcagggggcagcatcgcgagctactgccagatcacaatatcacatcagtgagctaggcactagcagccaagtagcagaaaccccgtaatgctcaagccacagcaagggagggagcaagaaaaacaaggtgaaggcgacgagtctacctaccctagaggccgaggcggaggcgcgcttctggaagcgggagccgccctgcagtgcccgccacggcgcgacggccgagcttggaggcggccgccatggcggtcgatatatgtgtcggttaactatcgagggggaggacgagtagggggttcccgtcttcctaagatgcgccgtggaggttccgttccgtgagcagcagcggcggccggcagcccgccctccccacgacggcacgatctggcaggtttttgggcgatatcgtagaggacggtggcttttccttttggccccctcccttcctttcctcgttttcccttttcccacacggttgaggggagagagagccggagaggagaccgttgattcccttgtccccactccccacgtcgctctcgctggttgctccttgccgtgcgtttttgcgcgatgcccctctgcttttcggtgtattgcgagcactaaacatacggaggcacggagtagtggatcatcattgggttgggtattcttgtttgcacaggagttgaggtctcagactggagtgactgacagactcacggcggccagactggtgccttcagaattcaggaagcagggattaccactagcggcacgagggatttgatgatgagattaagatgggaatttaatttttaatcccaatatcttgtttggtagaggtgatgaaaattgataaggaatttagttagagattatgtcattaataaaaacggatggctgagatttgcttaaacaaagtgaaggaggaattccctcccaattaactgcccctacccaggtattgaaaagaaaggagttccttcctcaattctccatcctcatcccaccaaaattttcatgtctcccaaacaaacaaaactcttaatagtctcatccctctaaatttccaatccctcctaaaaactttctccaaccaaacggaccgtagggggttaggcgtggatgatgatgcgtggttgtgtttaggaattttgtttgggagaaagagggaagattcatcttgatgtgactggcagttacagtcccttagtggtaaagcaattgctaattggatttttctgagaggttacgtgaaacttactcgatcggtatatgtttactaggcgtgctgccttaagcggtgccatttgcttaattagctagctcttgtggctggctgtatgcctgtatatgttttcttgtactgtcgatctgtaaatggttgagaaatcacaccttgttctgcgtagatgcgcaccttctgcattacttcagctggtcttgatctgagaatttgttttcatttttgtcgatatcatttcgggaataatagcatgcttggcacttagattttgtcgcttgatgaggtgaatgatgatcggcgtagatggttctgtccctttgccggccgtgccagttactgcgtcgcaaaaagttgcactcatgctgtccaaggcataaggatcactgacctaccctttcccggtgaacacgcactcatttccctctcaaaacttggcgaactagcaaatcaaaagacaatagcacggctggtactaccagtacagtagtactgtccacaacagtgatcgaacgaccgatcgattcgaagccacgatcgagcttcaagggaaaaacctacactacacacaacgaactgtacgtacttgtgactacgtctacggtagtagtactcctagtacatatagtatcggttgccatccgcgactgcaaccccgatagctaggccaacgaagtcaacagcgcgcgccaaccgaagatctcgcggcatcatctagcgagcgattcggcaccgcaccggttaactctcgcgcggcgcggcgcatgtggcgtccatgcggacgggagccgcgcgtcccgtaccgcttggcagcgaccgaagctgccgctcccgccgcgggaggaggaggaggaggaggtgcggcacggtgcgtcgtacggattttgtcggtagccgcggcgcgtatcgcgagcgcggacgtgcgaagcgacgcgcgctccacggctccagtgaaacggcggttcttcgcgcgcatcgtcgcgccgtgcggctggtgcgcgaatctgctggctggcaagagaaaaccgttgtttttggaggaggcgctgcttgtgtttttgggggagaggagggggtcagtcgagagactgcacgcctgacggaattcttcgtcaggttaacaacaaattaacgtccttttaggacggggtccagtgcgcgtactttgccggttaacacgtgacaggaatttctttgggtgaatcattgtgcgtggtccagtcgtgtatgccctctagaatccaaagtgctcaaaaataatttatggctgatattctagccaattgaattcatagcagtatgtactactacactgttgttctaccaaaccacattcttacagcccacttgcgtcgtctcgtcacattagttaagttaggcagttgtcggaaatggtgattgtggttattctttttcgactttgtgatattttgttgtcaaaaggtgcaaaagagaggatgtcactgattgaggttgagggcatgcttaccttcaactctaatcaaagtcgggctgtctactctattctctccgtcccaaaaaaaaaaaagacaaaccctagatttccgtatccaacgtttgacgtcttatttaaaaaaattatgaaaaaaaataaaaagacaaatcgcacataaagtattaatcatgttttatcatctaacaacaattaaaatactaattataaaaaaattatataagacggccggtcaaactttagacatggaaacccatgatttgtctctttttttggacggagagagtacatacgaagagaaaacatctggcacatgcttctttattgttcactgatatgtcgagcatgtttgatattgacacatctaatctaacggcaggctggttgggtgattgattgattggctacccttacctatgatcagccaatagcctgaggtttgatacactgataagcaaaccatgtaatataatgtccgagtccattttaatgagcatctatccgaaaattattattaaagtagaaactttatttcaaaataagtcaattcgtaccttcttattaccctcgttcacaaattgaaaaaaaatctaccctttcataccctctgcggctctacctacccacccactcaccaattctaacctttcattaatgaggggtgttttagtctttttctctagctcttgttaacttcggacgttatgattttttttttgataaaaaagcatattatatgtgttgctatagtgaatataatgtatggtcataatgaatcttttgtctcctaaacaccatataaattggcatgtccatgttccatgttacaccataatgttataatgctaaacaacatacacattgtgttcctcagagagatttgtctttagattaaaaggacaggattatatgtagttctaacatgctgatcatcttcactccgttgttctccatcaaaataagccggactttgcaaagtatgtgtaataagctcttgaaaaaagtatccactctgttttcttagggggggggggggtaaaattgcaccacctgttcatattcagggttgcaaacaacatatatgcaaggctaatgtaaatattcaacttataccaaggaaagtccatattaggtaaaatttgttaatttttaaagttttataagtaaattaataggacactaaatagagtctcatgcgagtacaacttcataggtattaattctggatgatggagttatttatctttatattacaccacttccttcgttcacgacctgtttaatagggctccacctcctaaatttaatttgaaaagctaggtcaggcgtagagtggatcagaagtagagttgtaaagcagcctaaacctcactacacctatttatttcgtgatagcactttagctcacttcgttccctttttgggtggagttaaaaccgttttgtcggactccagctctaagagaagtggagctggagctctaccaagcatgctctaaataaatgtagttttagcctaaaaattgtccttaaaaaagtatatttccaaagtatttcactagaactctttaatactattacctttttttttcttattatttttagtcactgaaccaatagtactctcctttcccccattttccacttatcgttctctcgtattaatgaaggtatagtaggagtagttttttaacctttgttttaatgctccacctatttagagacggagggggtacaaaagatagctctaaaagcaacaactagatgtccatgtaaccatgttagctctggcttttggaggcctagtatttaccacattaaatcagcaaaaaaaaaagagaaatgtattcgatgtatggccttagtgggtccagaagctataatttatacaaattacaatttatctattatatactaaaagtccatgaaactttctacaaacgctctcaagccaccacgtggcgctctaataaaatagagaaaatcctataaattctaagaaaaaagcataacatatatcccttaatttttatttaaattggtgggtccaatattatacaccattagataaaattgatcctaaaacaaactaaataccatgggtcccacctatcctctcctcccgtgcattggcaggtggagtatataccgtaccctccccccctttttttcctttcttcttcttttttccatttatatatataatggatatattttttaaataatgataattttacaaacaaagaatctaccatcatataacttaagccggtgtactttttactctgtactattattttcaaataatgcactattttaaaataaattttacacaattatatcgtgtcatatcaaataaacaatatctatattaactaatttatacgtgcacttaaactgatggctccattatataaatcatcggatctactttttattacactggtctattattctcaagtaatgcactgtcaccattatattgtgtacccattaaattaacaatttaaaatctatattaactaatttacacttacgctagaactggtggacctattattataatcatcggatctattgtttgctaataaataaagcgtccaaaattctctttttgcccgctgcacaatgcacgtctgcacctttgcttttcgcacgtgtgacaaagcatagtgtctgagacatctaaggtgatcacaaccgctatagtgctaccgctttgccacgtattaaatcatatatggagatgattaattttgttaataacatgaaaaaaaattaaaggtgtgatgcagtgagagaataattaagcaccatgggttgtgtttttctcaacactaattagctctatttaagttgaaaatgagagttgttacataacaattataatgtatttgtgttatttcatatttggattttgtactatttgttcgtaaaggtgaaaggaatcattatgttataaatgtgagcgcaatattgacgaatatcaatagaactcttactatgacaaaggtgataaagggagtttaaggccctctcttttttttccgatttcatattttggatttttgtttgcacgctttccaagtttctagatggtgtcttctttaaacaacattataactttttagaagtcaattcattcgtttataccctcaaatagctatcacataaattatataattcatcaatttcagctatcctaaaccttaagtactacatattttttttcatgcgagccatgatgatcagtaaattggtgaacaacggatcatcaaagtcgtaagatgaatatataagagttgctctgaacaattgtaaataggtgtcaaaattaattgttattaattagacatttaatggcttgctagccacaaaattaatttctctctacatatatataaacatggacgaagttggaacaaatattaccatatgtcccatacatatatattgcgcaattaacattctaattagtcatttaaaatttcttaaaatgctctcaagctgccacgtggtgctataataaattagggcaaatattaaattctaacaaaaaaaatcaaagtatctattattttatttcgcttaaatccgtaggtctaatattataaaccattagattaaattgatcttaaaacaaactaaatactacgaggtcccacctcgacataggtacgcacctacatgcgcgggtacgtacgcctcccctcccttttttttcatttttctctttcttctttttttcctatgcatatgcttccctccctttattactatatcatgcgtcttcatgagacgatttaatcaaaagaattttgagtatcttgcactcgcatttttaatttgcgggcatactacacgatatgtatatacatggactgtatgataattaactagcaatagtttcttatttactcgagaaaaaaaacatgattcaaaagtcgtaagtacttaatccatcttctactcaaaagtttgtgaatggttttctaagataccttaagaaaaatagaacccttaaattattataaaataacattatccaaactttagtttgccccgaatttatgagacaaaatttctgaacaaacaacaatcttacctttcaaataatataagtgcccgcgtatacgcgcgggccaccttcctagttatataaatgaaaatagaagttaaacttgtataccaaatgcaactaagtgataccccacgctttactataaaatacataaatgaatatatgccaaataatatataaataatgaatgttcaattattatgaaaataatgtgagaaagatgatgtaacatccttgtatgttaagctctacaatgttctcttttagatgatgtatctagtatgagatttaagataatctataatattaaattactagtggataatgatgtgttatgcttgtatgttgagctttatagttcctactaattattattagttggtaccaactatatagaagatatatattctacctttaaaatttattgtaaacataaattaaaagttgtatatcaaattctgttccacttccaaaataaggtgcgtgtaaaaattgtgcaggaaaattcacttggacattaaaaaaggttaaaattaagctccaaataaactatataaaattatgtatttattaattcaaaacttagaaatttattgagaaaactaaactaaggctccacaccaacctccaaccttttagaaatctgtcagcctgtcacatgcgactgccattctggatgatgcattttgatgctctctttttttccgagatgattctggatgacggtggaatgctagttaatcaaaaaactcatcgccacgttgctaatttagctgactttgtcaacttcgtcgaggacacacaacacaaccacacacacaaatccagcgcagcaacagatctattgactatcgaccatcaaggggattggatcgaacacacatacgtggcaaccaagtcttctgctccctgaattccctcgtctagatctcacacgtcacaagtctcgacgacctatagcttgcttcacggacgcaaacacaggggttgccgacttgccgtgctacgacacttcatgcgtaatttctgtgtgctgatcgatgaaccaactgctgtctccgcgttactctacgcatgcatgcatgtatataaacatgcatatggcgcgcaattgttttcgacgattactatatcgcatgattcttctgcatctcctgaaactagcatgggttctgaggcgcctgaccctgccgttgctgcatccgtgcctctcgtccgcctgaaccacgtctcctttcagtgcacgtcggtggaaaagtccgtcgacttctaccgccgagtgcttggcttcgagctcatcaagcggccggagtccctgaacttcaatggagcttggtgagtaattaattaacctacattacccctgaagcgtccagcacaaaaggaccgatcaagatgtaatctgcaatgcatgcaacttcgtagttagaaatttgaaccagttgtcgagctgcatacacaatgcctgatcatttcagtgtgaaatgctgcttgttacaggctatacaagtacgggatgggaatacatctgctgcagcggggcgacgacgccgacggttgcagcatcccgacaagaccgctgccggcgatcaacccgatgggaaaccacgtttccttccaggtatcagtcgcatgcacgcaggtcgatcagctactgttatgttcgagagcagagttcgtatttgtcttaactcgatttgagcgaatggcagtgctcagacatggcggtcatgaaggcgaggctacgagccatggaccgggagttcgtcgtgaggaaagtgtgggacggggagacggtggtggaccagctcttcttccacgaccccgacggcaatatgatcgaggtctgcaactgcgagaacctccccgtgatacccctcatcgttgcatcgacgcccgggcttcctgagctgctgccgccggcgatgcagaccaatgtccatggctagctcgagctacgttcttatgtctctcctttgtacataaatacatgattaaatttcattcgtttgaattggttcattcgtacgttagttgtaagtattctatttgctgcaccatgcatacacgttagttgtagtaattgattgctgccaagattacattactgcccaatatatatatatatatatatgaacaagttgtttatatataataaagtgttttaagtgttccaagtctccggtgtacgacgtacatgtctcccaagtattttactctgttcgtcccattttaagtgtagccatgattttccgcgcctaattttaacggtccgtcttatttaaaaaaaattaaaaacataagtcacgggtaaagtgctattcatgttgtatcatcacataacaacaacaaaaatactaattataaaaaattttcaaataagacggatgatcaaagttagacacggaaatttatggttgcacttaaaataggacggatggagtaatcctgaacagacttttcccgcctgagaaagcttaaaatcactacagaggcttttgctttgcctttcatgtgaagcgatcatcacaaagtgaaaaggaaaaaaaattactctcgttattttaaaggccatggagtatgcgtatcctctgcttttgctgtgccgaggaaaagtgggttacttctttaagtatgaaatcaccgtcacaccacatggagttataaaaaaacagtcacatacaaagttttgtcagaaatgcaacagtatttatccataccacacgagagcgcgtgctgctcagctctgtcatgcaatgcaacaggccgtgccaacgtccacagcccaatacatttgtgtggtcaattggcccagaacatgtacgagtcgctgaaacccagtgccagaaatagcccttatccacacaagccacacacagccagtggctccaaggcggcacggcacggcagcttagccgcgcgcgcgcaggcgcagcaaacctaaaaaaaccaccaccacccacgcaacacaaacacaagccaagccaaagccaagcgaaacagctgcgcgcagcatggcaaccacggcgtccccgttcctgtccccggccaagctgtcgctcgagcgccggctcccgcgcgcgacgtggacggcgcgacgaagcgtcaggttcccgccggtgcgagcccaagatcagcagcagcaggtgaaagaggaggaggaggaggcggcggtggaaaacctgccgccgccgccgcaggaggaggagcagaggcgggagcggaagacgaggaggcaggggccggcgcagccgctgccggtgcagccgctggcggagagcaagaacatgagccgggagtacggcgggcagtggctgagttgcacgacgcggcacatccgcatctacgccgcgtacatcaacccggagaccaacgccttcgaccagacgcagatggacaagctcaccctcctcctcgaccccaccgacgagttcgtctggaccgacgagacgtgccagaaggtctacgacgagttccaggacctcgtcgatcactacgaggtatactacgcaccgtaactcataggcagaattggcaattgcaaatgcagggtagcagtagtgtacacccatggtctctttctccaggtggaaatgttagttgtaagagcttaattggtagtacctgcttaactgacctggattgaatttacagggcgcggagctgtcagagtacacgcttcgtttgatcggatctgatcttgagcacttcatccgcaaactgctatacgatggggagataaagtacaacatgatgtctagagtcctcaatttcagcatgggcaaaccaaggatcaaattcaacagcagccagatcccagatgtaaaatagaatgcgtgttgtaccctaaagagaaagcatgtaactatcaatgattttcccgttcaaagatgcccaatgtatattttgctcttccagaagagccatgagctagggtatttccgaactcaaatcgggttcatacaaaagcagaacattcacagtcgataataattttgtcgactccaacatggttacataaagagaagctgagcaaactgagggtattaccctgtcgtgaagactaaggaagggtctagcactctagtttcatggcatttccgttctatggtttttgctgagtattagcggtgtgaaaatgtcgatacttcaggtaatccaatcacattgaaataacaccactgctttattgctttatgatggtgagatcaggtagaacatggaatccagccctcaaattcacaggcaaaactcaatgttaaattatttgcaaagaggatgtgcgcatattccaatagggaattatttctcgatcattggcaatatatttatttatctcattccatatagatacgagacaatctctgctgatgacattacgtcacccttaagagagtcattcccgcaaatagatgtttaatgttttggacttgagggtttgaccagctgcaatgtgtaaatctcaatcgatcaaaggaataacctcgtggtctttagaaacatcaacccatggcctgaattgatcttcatgtgcattattctgcaaaagagtgtcatacaattcaaaaattgccaattacaaaactgcatctcaatctttttttagaaaaatgccatcgctgcattaagtactaatgtcatcatgctacttaggtagttgtgttgtactaaactgcagagtacaattccacgcagtaagaaaatagtactattcagtaatgctgcaaataaactgtttacgctgctacttatatcaggctcacctagactgatcttaaaatgaactgtatattgagcagcaaatgaaccatctattccgacttagaaaaaaaacatctataagttatcgaaagaacacatttgctctagcaatagttctatgtggagggactaaaagattttgatggttaggtaagtcttgtgcataagaaagagatggtggcaagtacaaactagaatcatgaaagcaggtaattcctacactgtttatttattaagaaaccaaagcaatattaatgaggttacctgcaaccagaagaaaaacccacgcatcagagctaaaccatttggaaagctagtgtgcataacttggtcaacgagatctaaagttaaataaacaaaaaagacatttgttagtgcaataaccatgtagaactgccaacagatacattatgtaaatcagccagcaatacgctatgctactagtttatagtcaaatttaaaagtggcaatggtgtttataagcaacaacaaagaaagctaagtgatctgttgaagataaaagaaagcttctcaagaaaaataaaactatcactttcttaatatctagttttgatcttggtatggatctctgcatataagctcaaagtttaagcaaaccaattgataagctgacactgtccatacactgccgctggtggttttaaaaaacatcaatcaaagtgctcccatatctgtagatatcttgggcacagaaatactttaatactgagacttggaggttcaacactctagtaaaactaatgcagtggcaattgttcaaaataacatggcatgttttcttctggccttgcactcactttttcctttcggaaccattagtcctacaagcttatttgcaaaattaagtacatcaaaatgttgttctaagatcctatgcctacaactacactccagagattaaaccaacacatcaataagctattttgactgtatactaattggtcatgaatgtaacatcttaagaagaaatttgtaaacttataacaaacagttgaacaaaactaacatcaataagctattttgactgtatactaattggtcatgaatgtaacatcttaagaacaaatttgtaaggttataacaaacaactgaacaaagggttaatttgtaaggttataacaaacaaagggttataacaaactatacttaacttgcaatgtttgagcgagaaaactatgaacacatgtaaccataaattatggtcaacatatattcacaaagtgcaaatggttaacagtctgtaacagaatattaagattatccatggatttaactttacccagttacaatgaccataaatataattctgaggaaaaatgcaatacacaacagaataaccaaagaacaaacaacacatgtaaaacaatatatgtgcacgatacacaggcatacctgggtaatgatcaaagtatgaatttcccatttcctgtgtagggtagaactttacatcattgcgcacctgccgtaattttactaatggtgtacgaatagaagccatgtcaaatagcttaatatattcttttcgactaaatggtttgctgagagcatccaataacctctgcttgaaatctgaatccggtctactgttgatatgtgccggccatataacaccttgtgacccctgcatattataatatttttaagtaataagagaagtgcatcatgtaaacaagaggagaaaaaacccttatagtagattttattgtttgtgagataaatgcaaaattgccagatcaattggagaacaatgaaatactttagcatgtacattacataaccttagtatttgagactaattcttctttgaagagtccatatgggtgttactgttactgttccataattcaagtaggggaaaatttgagaaatatcatcacaaagatatgtgagcctggaccctctcgtgtcaatgacacatccgatggtatttttcaactcagtgatttttgcggtggtaataggcaaattggcccataaagtggaggggatgttcagcgtgaatttgctagagaatagtgttctggttggtacaatacagtatcagcttattcatacatgtccatcaacaggccttttgttgaatcgtactgaaatatcgaagactactatcatcttcttttgcgtatattctattaggcgaaaaacagagaactatttctggactgaaaacgtgtatacgctgctcaattcaaagaaacaacagtgccacaggtaacaacgattggagatgtataaaaaattctcaccggggggatggaagggccggcattattggaattgcttgaactcatcttcctcttcttcttactatctaatgttcgcacggatgcgtcacccaccgccacccagtcgcatacttttgggtccggaagaattaccaccggctcgtctgaatccatggccacctctttctcccgcgcatcctcgacctcgctgctgctctcggaggacgcggcgcacgggtaggtgacgacggcgccgtcaatctcgagcaccatgttgtcgttcaccacgcgcgtgtgcttgaggaagaggcggtagtcctcgtcgatgtcgacgagggagtcgatccaggagggggcaggaggctcggcgtccacctccaccgacgactccttctcctccggcgggcggttggtgctggcgcggccaggggagggatcggagacgcactcgccgtcggtgctgccggtgtcggcgggggcctcgtacttcacgagggaaggaggggagacgccatcggaggggagctcgagggtgtaggagtcgccatcggggcggatgtggcggaggaagtagaggtagtcggggtcgacctggtcggcggggtaatcgccggcggcgaaggggaactgcatggcggggcggcgaaggggtttgggctcgactcgaggcccgccttgggaatttggagggctcctctcatcttgcgcctatggacgctcgcgatttattggtggcgccatatgtgggggtcaatgaatgactgaaatttaatggtttcctgaccgaattcagctatcacgcagtatatttatggaagcattgccctttttttatcttattattatggtacagtgtaatactgtaacttggagtaaaaaatttacggattttttgtggttccagacaggctcgaccgctcgagtggaataaactggaggataagcgggaatcgttttgtgctcaagttcttttagtaacaggaatcgttcgcatacgcaacagtacatcagcaataatgtttgtaatttttccaccggtacaacatgattaaaaatgtctgcatattcaaaatgcaaagttcagaatttgtaatttttcaggtctgctcgtcagttcaaatgtttgttgaaactggtcgatgaagtgtttgcactgcctgaattttggttcgctcgaagttgctacctgtatttttttcagaaagagagaggaaaaccgcgaacaccaagaacaacacgaaaaggccatcttttggtggaaactttaaatttccaacaaacaaatcggacttctatccccgctaaaaaaaaatcggacttctatatccacacaaccaaaagttacatgaatgtttagatttcgactctcactaaaaaaaatattcatgcgttgcaacgggtgaagactattttaatttattattattatattatttagttaagatgaaattcactgtgttaaattcgcttagatatatatttttgttagaaaatcataagctgcaattagatgtccgatcgtctcaaattagtatgtgagtttttaaagtgatttcttatacgatttcttatgtatttctaaaagcgaacgaacttaaaaaccgaaaccggatttgtattttcaaaagcgaacggacttaaaaaccgatttatacacggatgacgtactaaaataccagtaaaatcatcttcaatttttatatcgactcttataaataagaaatgacgatgaaaataagaacagaacttgaagactgagcttcgaatctatgcttcctgatgagtctcgccacatcaaaaacctgcattcagtcagtcttaatacgcagcccaaacttctgcagtccttatttgtgttgcattcgagttttcgatgatattcgaagaggagaaccatctagccctgcagctctagtctcatcgcccctacgactcccctgaaccctcgactccttcccactagctcgccgctgcctgagcacaccgctggagttccacgtgggtgcaaggatggcggcggcggggttcctttcagctctcggcagccctctatggccgcttcttgcgggcgggcaggagcggcggctaggcttcgggcgtggcgtcggcaggtcggctgctccggtgaggacggcgtccggttgaagcggaactcgcgactcactctcctagtggcagagtggcggcaacgctgttggaggtgggcggtgggccggtggcgctggctatggctggtgaagcggtggtgttggctccttctggtggggcggcgcggtggtgatggaagcggcagatggacggcgtcagcgggggagtggcgatggcctcagggtagtaggggacggcaggtggcatgccgctgctaggcagttggcagcgccacggcggattcctctgcgtgtggcctgtccccttcgtcgcgatggtgaagatggcgacgaaggacaaaggtatgctcaccggcagtggtggtcctaggggcagcggcttactggtgtgacctttatgcctagatctagccatgtgattgttaagggcgacagctgaggtgttctggagtcaacggcggtggcctaagcgtcgccgccgtatccttggcaaggagacggcgggattgggtggaggtggtatcgttcgcagcgatgtctagcaaaagcgcctgggagtccgggcggaagacttctccggcggcgacggctgccctaggggtagcgatcgaaccgagacggtggcggcctgagtgccggtgcaaggttcgcagtgaggaggcggatcccgttggcggtggctgccctaggggcggcagatgcctgggagtccgggtggaagagattttcctcaacggcagctgcagaggtctccgacgacggcccttggggcggcgacgagctgggagtccaggaggtggaggaggatcccgaagacggtggcggccctaggggcggcagaggcctaggaattcagcgaagcggaaatggatcttgccggcccgcatttggttggcttgttttggctgggacgacggatgaaagtgggctaaaccaggcgacgtttggcatcaactcatatgaagcgaatgaagatggcatcaacggaggctcgcaacgatgatgcactaggagcgttgacgactagacaacttccactcgccgaatctcgttgttttaggagatgatgtcggaaagcaaggatgtgtcagggtagttggtttttccttttcttttagttttgtgttctctcttgagatgtgagtctaagtgctcttgtatatttttagctgtgtatatccttcgtgaatatagaggccggattaatgaaaattcattatctaaaaaattggtgttgcattcacctctaacagactcctttgcactacttctaccttcagccaaatctattcaatcctgatccggcggcttccggtccctagtgccttagctcaccgacggtatccagtgaaagcagagaagtccttccaacgcaacttgccactttccgaatgagctcaaacaaaacacaccagatcaagcaacacttagacccgaaatctagtatcgcgtcccagccatcgatcgtagtggcaaccaaaccgtattctagtatatatgcttattgcaaacagatcaccccggaaaaatggtaaccgtgatgatgctgtcaagttggtgcgtcaaaggctacctatagcaatcaggggccattacgatggcttgattgacttctttagactgatgtaattaagcaggccagctagcttccaattagtctagttgtccattgtttccatttgtatcctttggtcccatttgtactgcttttacagttttatagtagtccatatatagatgaatttacttatggcgagagcatctccatggtttaaagaagagcttgtataatcacggagcgttgccacaggaaagatcaagcctactccatctatcccataaaaaactaacatagtaatggatgtgatattttctagtaatgtcatctccaacattatgttggttttttaagacggaaggagtacacttgagtaatataggatgataatggatccaatattttagcatataaaatgtaaggggataggtttaaaaaaatgctatagtgagattcaatagacttttgagctaaaaatatttaagagttgagataggtgtcccgtgttaaagaacccatggacatggtccctgtcccgttaccacccaacatgagacgaatgattgggccggaacgggattgtgagcatcgtgcggtccatataggaaagtttatattggttgggcctgttcgagctgtactagttgggccggaatagtatcgtgagctacgcgcggcctataatggtatcacaccgacgtcgagcacgcagcatggctctcaggctccgaaagggctaatcggcggtcactcacgcgcgccctcccgtgcgcgactggacacgtgtcgcgcgcggagagggggcgcggacggcacgcgcagggagactatcgatttttccggttttttttctgtttctgtttggttttttccggttttctttcggtttctctttttttttgtgtttttaaagatatatgtttgcaaagtttatattcgtatgtatactaaattttgtattcgcacgtatacaaagtttgtattcgtgatttttttctctcgggttttaatatgtacatatacaaagtttgtaccgttttttttttgacaaattagtccttttgaaaacttattttgaaactaaccctcgtaaaaaacttcaaccaaaaataggtcgtgggctcaacgccaatgttaatggcgctaaggtccaagggatcagcgccacattcgttggcgttgaacccgtggccacgtggatccgaagccgttctgcattctgacgtggcgcgaggtcagcgctaactctattggcgctgaactcataacccagcgctaactctaaacaatcatcaatgctaatgtagcgcggtggtgtgccctctgtgcatgcaagcaagaggtagcaggttcgactagtttaccgtacttttgtcctgctagcaaatctttttttttgttcttttcttccggcacttcccctacattccgaaataatactgtaagaaaaaggagataataatatgagaaaaaagaacggaagtatactaatataaggcgtgcatgcatacatatcattaattagcacctctttttcactaaaatattattatttaaatcatccaccattaagatatctaattttattgggtgcatacattttatttattaggataatctaaactatgatatgataacaattatttcttggtatttgaattaagggtggttgtgacttatattttggaatgaagggagtatatatttgaatgtaccattggagtatatatgttagaaatagtaacgtgggaaaaaatgatggaagtattatatttatttttgaagtattggtccagaagaaaaggacggtaagaagtatactacatatttgaaggtaccattggagtatatatgtcggaaatagtaacgtgggaagaaagataatggaagtattatatttatttttgaagtatatcggtccggaagaaaaggacggtaaaaaagaagaagtatactacatatttgaatgtaccattggagtatatatgtcggaaatagtaacgtgggaagaaagataatggaagtattatatttatttttgaagtatatcggtccggaagaaaatgacggtaaaaaagttgcaataaaaatagataatttatgctgctcaagggagtcaaacttgttacctcaagcttgcatgcacagaggccacaccaccatgctacaatagagttggcgttgacctcatgccacatcgacaaatagatcagcttcggatccacgtggccacgggttcagcgccaacggatgtggcgttgaccctttggacctcagcgccattgacattggtgttgagctcatgatctatttttggttgaagttttttgcgagggttagtttcaaaataagtttttcaaaaggactatttgtcaaaaaaaaacggaagtttatatacacgtatgtaaagtttgtatatgcgtatgcaaagtttatatacgtgtatattttttatacgtcaatttgttgatacataaaaaaattatatatatgtatgtatatattttacatacatacatagaaattttatattgatacataaaaatacaaagtttctatgtgtatatataaaatatatacatacgtatatatacatgtagtagtactgttatagtaatagactaatagtagtagtgctagtagactagtagtagtactaatggactagtagtaggagcctgatcgcgcaggggttagggcgcgcgaccagtgggcctgtgggcggtgtccatggccgccggccaatctttgcacaaaccgtgacttcatgagggagatcgctatgttatggattcttcaggatcagcaccactagctctcgacatcatcaggcgcgggtcgcgcatgcagctcgtgctcgcccatctgccgtgtgccggcgagtagctagctagctagctgcctggctagctgggcagggtcgccgaaccttggaattggatctagctagctaccgctcaattggcagctatgagcttgtgattgtgtaaagacgatgtttcgtttttattttatttctggtcatttattccatgtgtacgatcgaggcgcgagtattttcgtgtaccaagtgatacacaaacagcgccgtacgtgttgacaacagctttaagctttttacagatccagctattgtacgtgtgacgtgtctcctcagtcatcagatcggcatgtagagcgcggtcgatcgagatcgtacgcagcttagagatggcttagccgcggcaccggtacggcggacagccgcactgctcgcggcgcggtgagcccatatgtctcctccatgtcgagctcgccggccgaccccgtcccgccgggcaagctccagtcgaagccgtggagcagcctggccagtgctagctccaccgcgagcatccccagctgcatgcccgggacacctcccgcaagctccagtcgaagccggagagtgattttcatcgacatgccgaacacgagctcgccgacgttgaccaccgcgccgctgttcttggtcacctcccgcaggaggctatcgaccccgtcgtggacagctgcccacgacgcggcccggcgccggttgaagagcctgttgatgcacagcttccgcagctggcgccacaagggcccgtagcaggggcggatccaacgtgggtgcaagaagtcccccctacacctacaaaactcatggatacccccttcaatttttttttgccaagattggtaaaataggatgtgttaatagcattttagcatagtttaatattgagatgatgtgtttataccgatgtactcgatatgtttagtcccccaactttttatttctggatctgtctctggcccgtagggggcgaacaccatgtcggcgcggtcgtatgtgaggtagtcgatggccgcggtggtcgggcggtcggcgaaggcgcggtcgtttacatggaggaccagccgggccatctctggcgtcgacacgaccacggtgcggaggcggccgaggcggaggtggaggaggccgccgtagcgcgaggcgagctgagccaggccacggtgggtcatgtcgctggtatgcaggatgttgccaacgaacggcagaccccgcggccccggcgggagcgggaggcatcgctcgccacagtgccatgacgagaccgtgtgatagaggagaagcattgttggtaggagcacaaggagaggctgccatgttggaagccaccagctctccattactgattgttatttgctagctagctctttgcctttctcgtgcctagatggattgatcctcgtccgaatgagaacgaagacagatggggagacgagagaagatgaaacagtggcctcgttggtcttacggaggatggatttccatggagcaattgagtgttcattcaagccgccaccaccctaggcgtctccctcctctactgcagcagctgcaacccaccctgaatagatacagaagagaagagaggatatttcgaggagacacatagcgaatgtgcatgaaggagctgaatgcaaatttgcatccaaggtgaacatccatgtgggaaacgtacaatggacctaccatgatacatcaaaaccaagtccaagatatacgatttacaagatcgtggacaaagtgatatcacgttgcaactttaaggaatggtgatgtaatttactttacatgaaagtatgtgtgtacatcatgtaggagaagtcccatatcacgtatctttatgtatctgagatatcccatatctaatataccaacatataaataggtagatgcatatgtcaggtgtatgcatgcatagcttgtatggacaaagaaatggattataaagcccccaactagagcatctgttgtttattgtatgcggtccacaacgttataaaagatattaaaaatgaataaatttatcctatgacaaattctttcacaaacaagcaatgttaccgacatatagaggaatatataaagaagaaaatcaactgtaaataaatatttttcttcatatgtccacgtaaatttaatcctatatttcttcatactttattactactttaggataacttatattgcctatgtttttttatatatatttcttatctgttttgacgagcgtcatcgccagaaaaaaaaaaagaattgttttcacatggatagcgtggttatgaacttcgatatataggtgtcgtctctgtcggaactcgggagagctctacgttggcctacttcctcgtttatcggaagaactctgttagtctggttgatcaagcgcactgtgtactgatgtttctaggcatgtttgtaagtggttatcacaataattgttcctttctccaaatctccgaaacgatcacatgagatattgagatgctttcagagtaaaatggcactgcaagttacctcccagaacaagtaatataccttgttagtttttttaataatagaaagaatttacatctaagctacagctcctgcctatccctgtggtaagacatataataaccgataaatttgttttattcaaataaggtgataagataaaatccctaacattcattgagttttctagacaataattctactgaatactatgttattgagtttagaccctgtacacacagtaatctgttgtaatgtttgaacctcctaattaaattttgctgggcgccccctgaattttgtttcgcacgaggcaggagtagctgccacctgaattaaaaaaccttcaagaacagtttgttgcaatgggaaatatagtgcgaggtcagcctatatagcacaattcaacggaaggataagctcaattgcagcaaaattaatctgaaagcaatgggacccctccaaatgcaaacacttcgactggctgttgctgcaaaataggatttggacagcagatcagctacatatatatcagataatggtcaaataactattcctgtcaactatgctataggaacctagaaacatctcaacgtctcttcaaggattatccctttgtacggtaggctagggaagctgaactgcaatgaaattgacctgacacatgatgaaaatgaatcactattgaactggtggatcatgagaacaactcaaggtgggaaagacaaagccaaagcaaaaaaatcaatccacatgctggtagaatgggagatatggtgcgagcggaactgaaaagtatttcgaaatcaagaaaaaaagccctgctgcagctactagacaaattcatgacgaagtcaagctatggagaatatgtggagaaacaaacattgcgagattatcggtataatagtacttttgatcgattatattaatagttttcctctctcttctttttcctcctctctttctttttcttttcttttacttttcttttcattctatccttcaccgttagtgattatgtaagtagtttctccctctacttatgctggctcggttttttttttaaaaaaagaaagatattgagtggcttaaagtggcataaatctccaacagtaagcacgttgtcgttttattcttttagataatggaagttgtcgttttctataatgatcaccctaaataaatctcttgcatcagatgatgattccctagaaaattaacttgccggctggtatgccgtgtggactgctatcctgccaactcgcttgcactgtgtcatcatgtatcggaacttgcacacggctgttcatgcatgcgaacttgcgtatgaagctgtggcgcatgtgcgacagtgacgtatgatctaatttatatattttaaaatattcgaaatataacaagattaaagtataaattaaataaatatctctactatttaaaaaaataagaggggcttccatcgtccgtcaaaaaaccgggcgaaaaaaaccaagtttgtctgatcaaaaaataaccgggcaaaaaaagtgcgaaaaaaaaccaaatatgtccgatccagaaaaaaaggcaaaaaaaccgggctagaaaaccaaaattgtccgataaaaaaaacgggcgaacaaaaacgtgggaaaaaaagaaaagaaaaaacaaaatagcgataaaaaaaagtccaactcggtcccgtaaaaaaatagagataaaaataaaaaaaagtccgactcctcgttgcgattccctctcataagaaaaaaaaagttatctgagtcccactcctctcggtttgagtccgagatactaggcaacacttttcttggtttcaatctataccgtgatattccatacatcttggtgaaaaaaattgatgtgctagattgaagatctgtttgtaaaaacggaacctacatgtcgataacattctatttttatatgatttcaatatttggggttgtacatttgcatttgagtccctataatttttatatttacatttgagtacctataatcttgcaataagatgcttttggtctttttaaaaaaaaaataaataaaagggatataacaaaggcagaaaggtgcataaaaagaaaaagaaaagccacacaaaaaagaaaaaaaacaaaaaaacaacaacaacaaaagtctatttcccctaagtggcgaaaaaaactgtagatgcaaacggaaaaaaaatccgattcctataaaaggcaaaaaaaaaagtggtgaaaaaaaacgctagatctcattcctttaaaaacagaaaaaaaaagtctaattcctgtaaaggcgaaaaaaatccgaaaaaaaattcgtctgattccctaagaaagtggcaaaaaaatggttcataaaaaataaaaagctagttcatataaaataaaaaatgcacgcgagaaaaaaaatagaaagggcgaaacaaagtccaatttctaatcagtataaatctcgtctctatctctaatctaatctaactatttaaaaataaaaaatgcacgagaaaataaaaatggtcaaaaaacgtgtgagaaaaaaagtcagaaaaaagcgcaaaaaaacatgatgaaaaggtttttccgtcttcttaaaaaaataaaaaaacgcgtaagaaaaattatttccattgtcggcaaaaactttttaaaacaacatgcgaggaaaagactgtctgaaaaaatgcgccatttctaaaaaaatggtttgaaaaaaccacggaagaaaaaaacactatctatataaaaaaatcactctgaaaaataggatccattgattttttttaccatctactacacggcttttatttcgtcatatattatcatgtattggaaaaaagcaaaaaaatgacattcagaaaaaacaggcaaaaaaaccacgcgagaaagtatttgtcagaaaaaataggcaaaaaaacacgcgagaaaagcaaaacaaaaaaggggagaaaaatatggttttcgtcattagtaaaaaaaaggaaaaaaacatgctagaaaaaaactgttagaaagaaatgcgctatttgtaaaaaaatggtttgagaaaatcgcgcaagaaaaaacaccgtttataaaaaaaagccgctcattaaaatacaaacattgtcattgacatgattatgcatgaaaaacttatattatcattagatttttttcacccgttgcaacgcacaggcatttttgctagtatattataatattgaagtataaattgatcgagtatgcatcataaaacttctctcaagctctcctgccacgcatgctggaagtagaggaggagcaggggagaggggaacgatgggaggtggaaggagcataggcatttttttttctagcttccctctcacttagatgtgaactccatatattttcttgatgactggacggtcatgtggatgtcgcgtcaataaaaactgttcttagaacagttgagtaagtcgttttgcatggttgtagtagttggaggagttagtatatccggttttgccgttgagtaatacaaaatagatgcaacttatattaagggagttatattggacttttctcctttgtgagcaatattgttaggaaggattgcaattgggccctttacataacctacataactggcccataaatagcccaagtccaaaagttctcctctcttaagtatagcagccttgacacagaatattttgtgttgctttcttgattctcattccaggatgagtggtactccctccgttttatattataagattttctagcattacccatattcatatagatgttaacgaatctagacagtattaatatgagcaatgctagaaaatcttataatttgaaacaaaatgagtactttgatttataccaatgaaattcgttgccaatggtgggcttttgcattgaccagcctataacaaagctggtccagcatctcaacgcaattgtgacgcatgaatcgtccaaggaaagtctgcactgggccaaaataattcagacatttcagtggcaccgccagctttgtcttgagctcgatcgaggagcatggtttcagcttgaccttttatcgcgtaatttaactcatgtcaccttgacgatgttctttaccacggctttctcacagtctgattgcttactgcaggtagtacgtgctcacttcgcaacggcgacatcctctttgcttgatgtgaaaggcaagtcaaatggaaggatcgattttgatggcatcgatcgcccataaaactcccactctagcgagcgcaccaccaggagcggagctagagcgaaacagagggtggtgccacttgcttaatttactctactttagattgagtttaagctgatacgagtgtctaagtttgtattgaggggagtgcatacatggtgaaaatagatgatgtatagctaaaagattttcttgaccgggttcctaggcacccccctactatatactagctccgcccctgcgcaccaccaccgcaaaaaggaagctacggaagaacagccaccactgtatacatccccatccccgtccttcctccttcgacgtaacaaggccatgatttgtcctgcaactgcaagcaacgagaccaaaagcggccggaatagctgggtggaaaaaggccgattttcttttttggtgtcgaactgatgtgcgtgattcaacaatcgccgtcgagtggcaaaagcacagtgcatgccaacgacgccacgcccgcgtcctgtgtctaatgcgctgatacgcgccatgcatcccttggcgacttggcgcctttctttcttttgctagagaaaaatctcttgcgatctgcatatctggcagcaatccagaaataataatgatgatattaaacggtataaaaatgtctataggtaaggtgcgtctgcgtgcacatgactgcgtccgtattttgcatcatgcctgtggaaatttaggaggtcgtcattctcggcactgatcacaacagctataagatcaaggttgttttcgcacggcgatgtcaaagctgcaaaatcagcctgtacgaaaaattgcgaaatcaacaattgaccacacacatctctgtagcatatcgcatcgccacaccggcaggcacaacgccttcagcgcagtaggaaagggacgtgagcatggtaagtggatatgtacgcatcaatttggcacctaagctccccggcctactactggtaactggtaagtggtaaccggttgcacctcacacggctcgacagcgaaaagattcaaaagcctaataagatcggtgccgactggatctttgacagccacgaacactactcgattgtgcccacgcaccgcagcccaccgcaaaggcccaaaccgaacggcctcgcgcggcgcgacgtcgcgtgctctcggcgcggcggtggcccgcgtggggcgccgcctccgacccgccgcgccattcctgtgagttccccatacggccataccccatacgcggtgaagggaacaccgaacacgtcaactcggagcccatgcatgcggacgcagatgcgtaggccctcgacgcctttaaagtttttaagcaaatctatggatatccaccgtcaatcacgtggtgggagccgtctagatgcatcgtctcttatcttagtttggcccgtcgaatctgacatcccgatgagtttgagctttcatcttcacaacatttgtcatccatgatgttttggctatcgttccggttggccagtttactctgctgccgggattgtattgacgatctcgaatatttatctgcatggttgtctggtcagtttcatcgtgcccctatgctgattttttttgtcgagtttgtcatcgagaattttcctgtccacggaaggacagaaaactcggcatcagattaccctcctgaagattgatcctgtatttttgtctacgccttctgaaactgacgacgaatttaatttctggaacgcactgttttgttgccaaatcgtggtcattcggttaacagttagcatcgtgtcagcgttgaagaacataatggaatacttgcaatcttgcacacagaagtttaacgcgcggggatagctacggaaaattcgcgagtagaacgaacatggagccaggtactgtattaagtagcccaaaaacctcgtgagaggcatctgttttgacgtacaaggaaagtatgaaccgacagccatacttacggccgcagtagtagatgtacacgtactgcgcgtacgtacgaccctgcctcttcactattcacgccatcgtttttattccacggccgtgcgctgctgatttacctcgcgacgagggcaactctgagctgagagacgactattattattactcctactactccgtggtccacggtccatagggccagctccagcccaaacccacaccgccgcgcggccgtcctctctgcgcctttaaaactgctttacgtcgggcggtgagccggcccaagacccggtccacctctcgcagcccgagcccacctgccgccaccgccgcgcagcgcgtgtccgtacccaaccaatccagtcacgccacgtattatccgtgacgcgtccagccggccgccaggtcggatgacgactcggcggcaggtacgcctcgcggaccgcgcccgttcggctgacacgcgggccgctgctgctcagatgcgttgcgtgttgaggcgacgtgctgggtccgggccacccacgtcggcttttttaactttgcccgcgccgcgagagaaggcatcgtcgtcgcgcccaaattgtctaaactgccccgctcggctcgtggcaccgcgcgcgaacggtggcccggttgggcgacccgagagccgatgcggtgtacccgccgctcggatgtatttttttttcctttcgtcaggaagggtattccggtaacttcgtgtgacaatggaaacgattagtcaattttggcgattcccgcgacccgctccagcatacgggcgtccgacgaagaagccacgcgacgcgagtgccgccgcggcaacgcgtggaagccgggccggcgaaggagggaaacatttgaactgtgctaatctctctaataatggctgcgaatttctactcaatactattctcatttacgctaacgtggtatttgaatcttctaaaaataaaagattaagtatttcacgtaaaacaagatgataataacttgtgattaattgagttttaattattataaacttgaaaaatatattaatttgaattttacaataactttcatatagaaatatttaacacaaaacgaaccgtttagcagtttaaaaagcatccaattaaaatcttaatcttcatccaacttttattgaagaaaagtatcagacctactctctctgtcccaaaaaagacaaaccctggtttccgtgtccaacatttgaccgtccgtcttatttaaaaaaattatgaaaaaaaataaaaagacaagtcacccacaaagtattaatcttgttttatcatctaacaataataaaaatatgaattataaaaaaaattatataagacggacaatcaaagttagacacagaaaactagagttcgttttttttttttttttttgacggagagagactttagcagactgttcggcaacatggttcggtcgctttcgatgttccctaaaacgatggatgaaattaaaacccaatactcgggctgcctgtaaggccgggatgcttcatctgaatgtaactttttgtttggtttacacaaagaggaaaatatgccgtcagtttcgtcacaacaaatggatttggaaaatcgccgaaataatatttgatatgttatacaaacaacccttttatgcgaagaatacaaacatccttttgtgggcatgcttgtttgaattacgacttcgaagtcgatctccaattttaaattatacagtaattttattattattgtttacttagcattagtattttaaccgttagtacaaaagtcttacattataactacttttcaataaaattttactataaaatataatcactttacgatttaagcagtatgacaccacacatatggaaacactctaagaacgtaaagaaaatactattaggcaacacccctataaatttaatatttttgggtagataatggggagaggaggcaaatgtgtgtatcagtgtatagaaatattgcactggagttacggtgggttatgggaatgaaaaatggcttcggaagttcagccttaacgaggggtttttgatttccagttggagcattggaggatgagcttaggttaagtttcccttagcaactagagaggaggcagaaggggatgacaaggcagaggagccatacgagagatgtcttgggtggctaagcgtcaactagtaaaacgacgaggacagcttgaggtgagcaggatcatcgaggaacgatatgaattcagctagtcaatgtgttggtggtggcgtgacggaatgacgcatgcaaagtgcctgaccaatgatctagagtgttttaaggtggcgatgggtcgatggcgaggccaacatttataggcgacgagggttaaaacacgggtcctatataagcgacgaggatgatggcgacgccgatagcatggaagcaatgctcaaggtgaactcttggccacggatagtcaattggcttggcatcggtgacagtgtacggtgggtcgatgtccgagttggtctaagtggaaaacacaaaggacatttacattcttttttcatgtgcgcatgtgccccttctctcgtcctctacttgaaaacattaattaaattaacgtgagcgatgtctaccatgaaattatcatgttttcaaaaatatgtttaattttgcaatatcatacaaccaaaaacatttatggcgttatatagcagttttttctttacgcagatcatgtgtttttggcttttaactgttggctcaaaacttccttcccaacatgcacattgtgtacttgttagttagaaaaatgcaaatcctatatttctatgtagggtgaaatggattggatattatccgatccgatccgctctgaaacgagtatatggtatgtgttctagaaatttagcggatgcatattatccgatatttctattgaattatccgataggccgtttgttgaataatactaagatttcttagtcagatactttcaccgtctatctcacacttatttagatgtatttctatattacacatatcatgtattcatgttgttagcacttaattacacaattattattatgatgggtcgtttattgattattgcatcgttgactttgcattgctaactcaatcgtttattacttgcatacacatataacatccgataaatttaatctatttctgatccatgtctgcgccgatcctgcactattttcgacagccgaaacaatccatatccgctcactatccatatctgcctcgaatccgtttaacaaatatgtttaggatatggtatgatcaccatacataatccatttcgttttcacccctatttttatggagacaatttgctgtgttcgcagaatactactattaaagcagccgattaatgtttgaatggtttttccaagccaatctgtaaatgcatataggtatttttagaaggatggacgtatatatacattgattaataccaaatcctcagcacatgaataattgaatacagcaacagagccctggcaaagattgaactggaagcaaacccacccatcccgagcaaaatccaatttgaacctttccacaatccgcactcacatttcaaaaaagacgccatttatgatttacctccaaaagaagagaggcatcagtgcctcctggccccaccaagtgtcccccccggccactaatccctcgcttacttttacccaaaccccatccgttcaatcgtccggcccagcccacccccgtcacgcacactaatcgcgaggcggcccggcgaggcggggcggggtagaccggaaacacgcaaacgctcccgcgcgcggcgcccaaagtctggctgtctgggggtggctacggttaccaccactgccccatttcacatttcacccctctcttttggcttcttcgaaaagagggcgtatacaaaaagggagagtgatatcagacagatgagattacgaagtggcaagataggatttaaaaaaggctaaaaaacaacttaaaaaatcaaagatagaaagcagtaagcaccaagggcagaaaaagaaaagaagaaaagaggaaagatttggaagggagggaaaaggaattggggaggagtaaaatgggagaaaggtgagggtcgaggggaaactggcgcatttgttgtgggcacggactttggcagccattcaatgctccaccaaacgctcatcccttcttccaccctttccttcccctcctccgccccccctctcgcctcctctcctcttcgcctcaaaagccgccgccaccgccgcccagggttccaacacctcccgctcctcctcagccatgccgtcctacgcgcaccaccacagttctctggtaaggaagggagcgttagcctcaggagacgataagaaaacgactcttttataattctttgatgggattttttatgggaagggggatgacgaggaggagaacgggcgtttcttgagcctgtgtttgcttggtttctggaattttgggaatttatggtttttgctgtgtgtgtatgtgggtgccttttggacggagaaggatgggaagatggacgcgctgaaaagtagttgccggtcggaggaggcggccgacgagggggcggccgcggcgccgtcggcgtgggggatggttgagagggacgggttctccgtcgaggacctgctcgacctcgaggagttctgcgaggcggaaaaggacgccgccgaggagaacgagcaggcgctggccctcgtcgccgcgccagaggaggaaaagtcgaaggacgactcccagccgtcgtccgtcgtaacgtacgagcttgtggcgcccccgccgccgcctccggagattgttgacctgccggtgaggtttctcgagactctcgttgaccgtgcctttcggcggaaaggctgcggctttcgcgatggttgtcttttttttccccctgtaattaatttcttgctgtgctgtatggtttctctgcaggcgcatgacgtcgaggagctagagtgggtgtcgcgtatcatggacgactccctttccgagttgcccccgccgccgcagcctcctgcgtccgtcgtggcgtcgctggccgcgcggccgccgcagcctcggcagctgcagcggcggcctcaggacggagcttaccgcgcgctgccacccgcgtcctatccggtgcggactccgaccatctgcgcgctgtcaacggaggcgctggtgccggtgaaggcgaaacgcagcaagcgctctcgggccacggcgtggtctctctcgggggcaccgcctttctcggactccacgtcatcctcgtccacaaccaccacctcctcgtgctcctcgtcggcttcgttctcgtcgttctcgccgctcctcaagtttgagtggcacccgctcggcggcacgtcggacctcccggacgatcaccttctgccgccggggaagaagtccaagcacggtaagaacggcaagaacaagcctaagaagcgtggccgcaagccgaagcagctcccaccacatccctcgggcgcggcggcgtcggcccccgcgccgggcgaccggcgctgtagccactgcggcgtgcagaagaccccgcagtggcgcgcggggccggagggcgccaagacgctctgcaacgcgtgcggcgtccgctacaagtccggccggctcctccccgagtaccgcccggcgtgcagccccaccttcgtgagcgccatccactccaactcccaccgcaaggtgctcgagatgaggcgcaagaaggaggtcggctccggactcctcaccgccgccgccgccgcagcgcccgccgtggcgtcgttctagctaaagcaagctagccaccccgcgcgcccccgcggtggctgtacatttttccagccgtattagtcctgtaccgtacctggatttttttcccctttcttttccagtattatcttagttccggttggattaattagagttaggtgcctttaggtcatgttaggtctaggaattcagctttccggtgctccagctcaaaagcttttactatagtttgttagggcactgctgctgtagcagcagtgcagccgcggcagcgctagcgcagaacttcatttccattctagcttacccgaaggagttttttttttctctgaggtagtacctgcatatgcttggttcatcaatgccggtgtgattatttctgaggcaaaaggaagaagaaaccaagaaccaaagcgccctttgcatggcgagaaggggaggaagacgaaagcaaaccgatcgccttgttttattccccaaggccaggagagaagagtgcagcacagcacagcagcagtgtgagcgatgacaggttggtgtgtgttgcgtgcacccttggttacatcgcgtgatggtgtcaactgtaacagcatgatatgcttagggggtgattagatggggctaaaacttgttagtctatgtcacatcggatgtttgacgttaatttagagtattaaacatagactaatttaaaaattaatttcataaatgagagcttatctgtgaggcgaattttttaagcctaattaatccataattattaaaagtttactatagcatcatattgtcaaagtcatgttgtaattagacttaaaagatttgtctcgcgaattagtctaaacttatgaaatgggttttgtaattagtggatgtttaatattttaaattagtgtttaaatatctgaggtgaataagtccctgaaaaccaaacagccccttagttaggaggatgagggttgagatagcgaggggtagaagcaatcggcatcagatatagatggagatgttgcatgtttgcagaagtttgtagtactcctgtgattgagatgaggcaggaatgaaactgggaggtagggtcctttgcaagttaatccaagtctagtcttgctgatgcaagtgtgtcctcccactctgccttggtggtgggctctctgtacctggaacagaactgtttgaaaaatggaacatctactgtacacctctacacctcttggggctctccttgcctttgctcaggtacatggcctcgcgtgcgttcccagtagtgtttgtttacgcacaagctttggtgcagcagctgcagcggtagcagtgctcgctcagaacctgagacactggcttctcgtgatcaagcgctactgctagtaccgtgctagacgaagatgatggcatgggagttttgacgggcgcgcggggcgagattttttttgtttgcaccgttgtttttgtggaagtgcagggtggtggtggtgactcactcgtttggacccagctgcattttccgacctaaccagagcggtaatggcgatggtggtggtggtggtggggcaccgagaagatatgtggtggtgaccggccgtggtgaccgcgacgcgccttttcttctactgccgcctcctctgctgccggctgcctcgctgccttgcccggcctgcgcgcgcagccgcgctccacgcacgcacgcgtggctcccacttccactcccacactaaacccgtgtcttgtcttaagcaaccacgcaattgttttcgttttgttccgcgccttcgtctcccctcccctccccactccccagcttggattctttgctcctcctcctttcagttccggctgatcgtacgggctaactttcctgctccgttttcgctgatgttctgttcccaactgactgcgtatctttgcttctcgagctgtctacgaaacaggcagggcaagcgtgatgagtgccttcacgaggacggggattgcgctgtctgagagataaccactacgccaccagaaaacctgtgtcgctcaccggttgatgacaggagatttctgtagccgtgcgtcggggttcagtttaagcagccggagtgcccgggaatttcgttccgaggcagcttgttttcggtttggggggtttttggacggatcgtgggcaagtcagactcgggccggcgcggataaggcagaagacgacggatcgaataatgcagctaagacgcaccgaatccatcccgctgtgagcctgtgactctattcttcctagttttttctttcttgtatcttaaacaaatttcactctcacagttcgtcacgtgagcccgacgggccccgcagcgtcggcgcgtccgggtctttgctcataaaaaacccctcaagttccctccacgatcctgcatttgaacatccgttaccgtaggcatgtgttggatgcgtagtaaggtagtaagggtcacagactatgatgaggacgtctgctctactctctccgtcttaaaatataagtatttttaacttcgatacagtcttcgatatgctattttgatcaataatatatataaaaataagatattttaaataaaaagagttttcatattataatagtttgtttaagataaatctaataacatcaattttatatgattgatcttttttttctataaatagttaaagtaaaaaagtatcacttgacactatgctaatattgcttatattttgggatggaggaagtgtattctcgccaagatagcatggaccgtttagattagtcttttccaaaacataacaattttaaaattaattataccgggttggacttggaatttagcattttattagtgtattccaaattcgaaattagtttactagaaagctgtaattgaagtaaagtatattcttattttaatttatgcgctataatttactagaaaattagtttactggaaaatttcaatatttataaaatcaataacagtagtctgtgcaactgcaacatatgggttagtaaccagtgccttatccatttgtgcttataatttcatcggttcttctcttgttgaattggcccttttatggatattatggatacacagacaagatgattgatgaacgatttaccctagcagttcgagacttcgagggcaatcttagtgtcccggtgaggttaagcctctaggtttaggagcggtatctggcactgtgtagcattgctaatgaggtgagacggtggcttgggtagtgaaaatgaatgaaatcgttaatcaggtgacatatgtgaggtcaagtgttcaactgttcggagtcggtgttaggcaatataattgtaactcctttgttcgtatagcgtatagcgacggtcggtccggtcctagttccttcgtcggttgtttgtttaggtgatgttggtgtgtagtggttctttttcctgactttagggcccctttgaatcacagggttgaaaaaatagaggaataggaaaaacacaggattctaataggaattgaagtataaaacaaaggattgcaaaacacaggaaaaacacaggaatagtcgtttgattggagcgcaggaaaaacgcaggaatcggatcagagagatagactcaaaggaaatttcccaagaggttagatgtaacatcttgaaaattcctaataataaaaatcactaaaatttcgaactttttaaaacttttgcatcatgctgggtgttatggttgtcattgcttgccaaatataaattgtaacaatggagaatcaaattaatggcgtacacctgaacaataaatatatgatacaagaatacattagtgcacaagaaagcaagccaaataaaatattaatttctattataaatcatagatcaaatattaaatattcgaaccatgttgatagctcgatgtcaggtttaactaatgagattgtaagattaaatctaatgtatgtggatccaatctcacatgaagtattataaattcacatgaaatgatgattaccactataatgatcctattaacaaatgagaatttcatgggaatatatatacattaatatttgaacacttgataaagtcactcatataaaataatggtcatataattaaattaagctttataaaattatgtgagtttttaattaaacaattagattaatattgtgccgagtctcaatttactatttagagaataaatagattgaacccatccgtgtaaaatatattgctatacaactaaactcgaccaatctgctaatgtattaatcatgacaagtcgttatattaaattcaatattacctcaaagttttcaaaaatatataagttcaccttagggtcaataacccaaattaatctaaaaagaattcatttatgcgataaataaataaatatgggtggtaataattttggataaattttcatgaggatttagtacttaaatttagttaacatttaactaagtaaaattagagtttataggattaaaattgtataggagataggctaaaatggggtttaattagggatagcactattcattgcacatgaggtgtttgatggagttcctagccaccctagccctcttcctccccactgccgcacctagccctgctgcgccgctgccttgcgccccgcgcgccatcgctatcgccgtcaccgcgcgccgcgcgccgtcatcgtcacgttgccgcaccctcgagccccgcgccccgtcgctgccgcgccgctcgcttgtcgccgtcggcctcgcgccccgagccgccgcgcgccccttccctccgcgcgtgctgtcgccgtcgccccgcgtcgcgccccgtgccgcgccgcctcgcgccccgcgcccctgccgcgccgcgcgcgtcgctgtcgcccgtcgccgtcgcctatctccgcgccgcttgtgtcgccgtcggctgtgccgcgccgagcccagcgccgcgccgagccccgtgccgctgccgcgccatcgcgtcactaccgtcgccattagcgcctcgagccccgcccgcgccgcgcactgtcgccgtcgtgcccgccgtcccgtcgccgcgcgttgccatcgccccgagccccacgacgccgcgccatcccgtcaccgtttaaagc

SEQ ID NO: 4538 - DNA, 45062 bp, Oryza sativa
tgcattgcactgtaaacaagcaggcgggcggtgtcagagctaaaaaatccttcggttggtctaaagatatggatattttatattatggtgtgttattattataagtaataatctcataattcattaaatgctgtaggtgagaggcaaacaatgtgggttgctcctagtcatgacaacgatactctttttgtgggcaatatctgcaagacatggactaaagaacatgtaagatgctgaaacagtttttcttttttcctattctgttgttacctgaataataacttatttgggcatgtacagctgaaggagaaactcaagagttacggtgttgagaattttgatgatctactattagttgaggacagcaataatccaggaatgaatcgtgggtatgctttacttgagttttctactcgccctgaagcaatggatgcttttaggcgattgcagaagagggatgtagtttttggagttgatcgtagtgcaaaggtttcctttgctgattcctaccccgaagttgacgatgaaataatggcacaggtaaccacttattttggtgcttttgtttgttgatgttgcaaatttgattaaatctgttgaatccttattctggttctttggttcaggttagaactgtatttattgatggccttcctccctcatgggatgaagatcgtgtcaagaagtaccttaaaaaatatggagctattgagaaagttgaactagcccgaaatatgccagcagccaagagaaaggattttgggtttgttacttttgatacacatgataatgctgttgcatgtgctgatgggataactaattctgagattggtgaaggtgacagcaaggtctgtttccccaactgagtttgatgggtcttttttactgtctactcattctgttggacatgaactaatattacacaacaccttgctacttgatggttcaggcaaaagtgagagccagattgtcgagaccattgcagagacctcctagaatgaagcatggattaagaggaaattttagggttgggcagggtgctcctcgaggtggacgttttgcatatgatcgtcctcctccacttcgccggcctccacctcgtcttttaagacccgatgttagtcgcttaccaccaccggtcaggagccgcccactgaagaggccagtagatattagagataggcgccctgttatgtcaataccagatagagttaggcgtttgcctccacccgagagatcatatgacagaaggcccccaggtgtgcagatgttatgtgcaatctattctctctctctcttcttttgctgtgcaaaccactgtaggtcactttttcatacttcatctgtttacagctcctgtgtacccaaagagaagcccaaggagagaatatggaaggcgtgatgaacttcctccgccaagaagcagagctacctttggtgactatagttcaagagttccagtggatagacgcccctatagggatgattattcaccccgggggtcagcctattcggacctaggtcctcgtagtgctccccgcctttctgataggcgagcatatattgatgatggttatggagggaagattgaccgtcctttaccaacatatagggagggccgtggtcgtgattatgatacaatgtctggttcaaaacgctcatatgctgagatggtgagggcagttaattattgttctcttgtgtttcatgctttctcctcatattcctcagccaactaagacattgctattgttatgtcaggatgatgtgccacctcgatatcatgacattagtgttcgtcagtctaaggcacgcttagactatgatgttggtggcagcagtgcccggtatgcagatacatatagcgagaggttggtgtacattttgaaatgttccttctctttgcttatatatatatatattttaatatcttacctgtacattgcttgtttttgaaggcttggacgatcacatgcgggatacagtggtggcagatctgtctctggtcatgatccagtgtacagtagtggtcggcatggcatgagttatggaggtatatgctcttgaacgctctgttgtgttagggtacctgtgctcacgtgctcaatatatattagatatctattctcacaccatttggtgtttcaccttttcaggttccgcaagcagtaatgatgctggtggaatgtactcatcaaatttcagtggtagctacatgtctcgtgggtctgatgtgagtcttcatcaaaatgttatctccagctcattatctatatcaatttttgttggcccaagctttctatcatgttggtttccccaatttattcatatttctctttgtgcaggttggtggaagttcatattcatcactttactcagggcgtaatgtaggtagcagcagtggctactatggcggtagtggttctagttcatattactgaggtgcgtgttcaatctgaatctgctctgtttctccttgagtttaaaattgtcctgcataaaagttttcattgatgtctcacaccaccaccaccaccatcgctgccatcatcgtcttaactgctcacttcagagaaggcaaatgcttccccttctatcaaacaaggaacaccctccgtgatcaaccatgaattgttttgatggtacagattttgcatcatatcgtctatggaacacacatggcaccgtaggaggttggtgtaggccccggattgtatggagctccttaatttaaggcctacggacctggacaagaagtggcaattgtgtgtggtgctcctgaattagacatgatcaaagaagtcagaaacaccaagttggttaaagcaatagtcttgtggatgttctggctagtttctttaatgtaaggctttgctttatttggtcaagaattgtgaacataatcgccagctatggtatcttggcatgtttacttccagtgtttctaaacatttttgagagatatggagtgtttcagtaaaatagtattatgaggtagttccctgaaatacatggtgccttgaagatctcttgtgatgtgctggctgaagatcagacttacaaatgaagccttagaagggggcgctttgtgtaaggctgttacttctgaaacatttggcatctgctctctagtggtttggtaatttgctgtgccaaaagatgattggtcagactgaaactctggactagttatttggtaactgctgaaaaattggatttgttggttgctgaaattgggagaaaccatttatatggctcaaagtagttctttcaccaagcgattacctaggccttgccataataagtttaagataacagaacctgcagttacagaactatgattatggtcttggattgccgctgttgattagcagcagcatagaattcagggcacccaggtatatctaacaagcaatgccatcattgagcacaacatttcacttgctactcgtttctgtaatttctgtcaagtgctgcatggagcatggataatatatctttgggaaagaagtggtaattggacaattgcaaactttgaagaaatttgcaggaagcatgaagcatgatgcactgactaaataagtttcagaaaaaaataaatatggttttgctatgacacctatgtttgatttaccatcatgataacatgatagttatggtatatttgggccctttatcccattagatggagatatatttgggccaaatttcttacaaccaaatttattttgtaacaattttttgtaaatagacaattttaccaagatattaacgcattagggaacaagttctctgttgatagctataggcagtagcggatgcaatgtgtgttctagtgaattggtgaaattgatggttaatactaccaaatacgaattacacagtatacagagagctgcaacaaacctagcaaacttgttagtgttaatacaaccattctctgaggtataggaaggagttaatacagtaagtgactgcattgtctgaaatttactcgattcatcatataagtgataataaccattattggatcctgagatcaaagtttgcatttttacacttcaaatttttatgtgtgtactacatttgccagcccttgcagtaactagaaatgttttaatatttctatcacttcctgtttagtgtgtttgttggagtaggatcccataagggcaacccacaattatttcagatcttggtgaactgcattagtttatcatttatggatggaagattgcactatccagcacagagagaaggtatcggtgaattcggatattggattgaaatctgagggaatcagcaccatgttgttggataattaggtgcctgtctaaaatagaaggggaggaggggaaggaagggacagttggttgaatttagtggaatgaagatagccagaaaacagcatgatcataattttacaagatagactatggaagcatttttgttcaagtagcaaatgcaaagcaacataaacgatttgtttgagggcctcgaattggtgaacagaaaacttaaccatacagtttagttgattatttcagctgctttagctacaaaactatactgatttgaagtagaaaagaacaaatacacatattaatctactacatatctattgaattattaatatttaatacaatgcatcttttataccttatggtcacaaagtttcattgcattcatttagttcagtactacttttttggtgatggtatcttctaattttgacatctgaatagtttcagtagaatcaactggcacatatattttattagttctgaatgctatagtgtatctcttgttgatgtttatctcagttaaatcatgtctaataaattcattttatccgcctatttttctgctgtttgcttggccaagtactggagtactttattttttctcatgtggtgtgagatcgatttgatactgtagcggagcactggcttggttgttttagaagatgtgctttgaccttatactagtagatagtgcagttgttatacaagatgctgcttgttgctgcactactatttcgtccataacctggaaggaactgcttcatgagaggtatactaaacgcagatcagagttccttttttctcccttcttttttctacttttcagatttgtaatgagcattgtaagcaagggaacggatttcatgtacaggtatgaaatggttgcgttgagattgcatgaaaaactatacttgattgggcctgtttgtgtctggctgtgatgatgtgctccgtatatcttttgcttgctatcgcggacttgtggtataggctatattcacagtttcatcgggaacgtagtttgcgtcgccacagccttgtcgaagggggttgattacttgaatgtcctgaggctcagctacggccaatgtgaatttgtactgatgatgcttcagcccccatggggatgttactgcgttagaatgcattaaatcatttgaaggtctatataggaatgcatcttacgactttaaggccttaggccattcacaatgtggcgtatagtttcgggttgccatctcggagattcccctctagagcagctgtgttcgtgtgtcgctgcgatgtcctacactcatagcgcggcgtgtggtttgagggttgctagatcggagattctactacatatcagattatcagccacgggcgtaccctcacgaggctactcttgttgagggcacgggtggcccggccgtggcaaggccactcgagcgtgggaaagggctcgtgtgagccgtgttggagcaactgcaacatgggcctaaaggaccacttaaaccgccggtcacactgtgctatagagaatcggaatgaaaaaagaaaattaactttgatacgcacgtatccaggctcaacaaaccaaactaaaatggacccaacctaagttgaggaaacactcttgggctacacgggccacagtgctgagtggtcttctgtggcccgttcgaatctacttaaaatagtggattaaattttggattaaagtggcacttttttcaaactgctaaacggtgcattttcgtgcgaaaactttctatacgaaagttgttttaaaatatcagattaatccatttttcaagtttgtaataattaaaacttaattaatcacacgttattaccacctcgttctacgtgaaacacttaatcttcatctttatcttcagaagatttaaacaccattgtatccccagcccaagtgtcatcaacaaataattccattgtacggttgtacccctcgtgtctgtttcttctccctccggttgcttcgtctcttctccctcacatcgcttcgcctccatctgtcagcgctgccatcgcacggtcgaggctcaacgatgaggctccgaagtggattggagattgttggccctgggctagaagctcgaatttggctaaggtgaggaggaggaaggaaggtgggaaaacatccatctccagcgccattttcgcctgttgtagcttctcctgatgggacggcccgagctcctcgtgcaacaccaacatatctagctctacatgcaacatggggacgagaatgcaagggtgggagcaaccaaatccgagcgtgagaggcacgaatcagtggggcgggaaggtgattttggggattccatctccgaagcggcggtgactcagagccacaaccttcacagcgcatgtgcggttcaagttccttgcggcacgcgcactcgaggcggtcgaagagcgcgcctcccagataaggggcgagcggctcagcaggggcgcggacggagtcaacacattggcgcatatccacataatttgagaatatattctctcacctctcaagacacttgtaggattagcttgcattatgaatgaccttagaattccacaaattagctacctagctctcgtttagagtttaacaattagctacctagctttcgttgaaagtattactagttcaatttttcatcctatataaaattagcttatgccaaaatttaaattttaaaaaataattttagagttaattttacaagtttttaacataggttttttagcattagcttttaaatcttcaaggacgtacaaacataaataaagttgtttagcatataatcagctcctggccaaaaacggggctgatggtaggacactactaggtagtttgtcccgaagacctgggtgactggttctgtgttaatcctggtatcttctctgatttttcgggttgtcatccgtcatcctaccgatgatagcttgttgtttgtccccggtgacaggtgacatggttggctggttctgttaaccctgccaccctggcatcacctgtaatttttcgtgttgttgtcatccgtcatcctactgctactgatgggcaagtgggcggagctccacgcccgcggcccgcaccagccacaccctaccccaaggcacgtcgacgacgtgggcggcaacgccgtgatggcgtgggtctctcgactctgccccgatcccgatcctgatcgaggcggccgcgtcaacacgccgcccgccgttgcacggtttcactcgagctgcgcctacacgccatccacggcggaacccgcgggcgccgcgccccggctgccgcgcacggcacgcgaccccgcgtgaccgcgactcgggccccgtcggtgcggccgtcccaccgcacgcgccgcacggtgaggtgacgtctcggccgctccatcctccgacccggccgcgtcgcccacgagaacgcgagcggtgggtcgcgccgcgccgctcgcggcgtcatcgccatgtgggggtctcacatcacggccgcgtcggcgaaaccacgcggtcacacgcacacacggggccccaccgccgcgcgccgccgccgccgcaccgcgcgccaccttgccgctcccgcacgctaccgctacccccttcgcgcacggcgttacaccaagtcgcaccgcatgccgccgctcccggcaaacggcacccccacgggcgtcacggcggaacacaaaactacggccaaacagtaacaaattgtaccatttttcttaaaaaaaacactatatccatcctaaaatataataatttttagcctttttataatttatcttaaatataatatcttctacacaaatattttcttctcaaccaattataattctttattatttaattttttcatatatcttttctactaaattattataatttttcaccacttaattttatcggttttcataataaccgtatttaactttaaaatctatatattctagaatggaaatggtaagatttgatacaaatcgaattatcctattcgatctgacggctagagtaacctgtgggctcaacaaaaaaacacttcttttagccacgcaaaaagtcgaaacacgaaagctagaaaagaagaaaacggacacgaaactttaacgccgagcgcggctgcgccgcgcgggggtgtcgggtcaagatgtcaacccccacaacccgcggttggcgccgccgccgacgccgcccaccgccgcccgcgtgcgcccaccgccacctgtcgccgccctaaaaagactcctccgttataatcccccctcaccgtcccttcccccaacctccgccccacaccaccaccaccgcctccgcctccgcctccgcctcctcctcaccaccgttgcgatggcttcttcttcccccaccaacgccgcggccgccgcccgccgcgtgccgccgccgtgctggacccccgacgagaccctcgcgctcgcccgcgcctacaccgcgcgacgcctcgcggtgggacgggcgcacctgacctccgccgactgggcggccgtcgccgacgcggccaccccgaccaagaccgcgcgccagtgccgccacaaggtcgagaagctccgccgccgcctccgatctaagcgccgccgcccctgcccgctcctcgacgcgatcgatctcctcgacgggccttccccttccgcgtccccgtcgcaatccccctccccgccgccgccagcctcgccgccgcctcttcctcccgctccctcctccccgcctcccaagaagaggaggctgcctgatggcgatgccgatgccgatgcggaggatgacggggagagcgacgtggtgaaggcgctgagggcgatcggggagggtttcctgcgggcggagcagaggcggatggaggcggcgaggaagacgcagcagatgcgcatggagatggcactccggcacctcgattcgcagcggaggctcatggaagcgctcgtcgaccgcatcattgactccctagagtaaatctcggtggcgcaaaggtgtctcctgtcaaggttttcttgcttgtcctgattgcccactggcttggcttgcgagtttaggagttaattagagttgttcatatgtactgtgatggatgtctgatgtaggcgtagcttggaaatcgtagtaacctttctatctatcttgtatggcgtatggaaaataataacttagcctgttctgtgtttattgttttgtctcaagctttaatttgttcaattgtgtgtggcaacctaatttgaagatatctgaactctagaatatagtagaatttaactgcatctccccccagacttgcagtttctgaccgccaaaaatcagttattcctgttcttttgcagcttgtcgacatggttgatacctttgtgacaactgcccaagtagtcaattgaagccctaaggaggtgtttggataatgggttaagggttatgaggggtgggattgggaaatggaaatgaatagagggttgagataaaatgaggtgagatgaatgaatggtcaagataaaaacttacatgccctaacagcagattatgtaagcggaagaaaaaggaattcactggaaatattgatgttgttgagctttgggggtatcctgattgtaccagatttcgcttttcatagcagaaaatttttccagcgacttggatttagaattcatttgctaattcgtccatccttactgggttggggctgatactaactttgtaaaccgagaggcagaactacaatctaaatttttttagcccaagcaagttctcatgtcgtggtctcatatttatagttaagcagagcataatctttgttctggatgtcattttgttggatagatctgaatatccagtagccagttgaccattacatggcacagttgtacacattgttctgttgtgtcatttgttgtatgtcttcattctataactctctaagtggttatttcaagcagttgcggaaggaaaaagcagtagtgatgttcaaattacatataatgtttttctttgtttcctgatagtgtgcactaaataaattcatacattagaaaataataaatagcacctatgttgaatgcctccagaaaattccatgcaaaatttgactacagagtgatcaaaagcaatagataccaggaaacaaagaaaaacatactgcaatcaaattttgagcatactgtttttgataatcaaattttgcttttttgataatcaagttgatctattgcaaaacagaaaacagagaaaacagaaaattctcttttttgtagaacaactgtaatgttgagcatactgtttttcatatcaagataccatgaggcctttctttagggcatgttctactcagaaattgttggccgtcttacttcttgccattaaaggtaaatttattctcttcccacttgaaattgtttaaacttgcttatatacattaatacatagattgcttcagtgagattctgtggtgctcttctttttgaaaatattgcggtgctcataagttgttctcttttttaaaatttgaacactgcctgcaaccattattttcttgactgaaccaacttgagacaattctacgcttgattagaacttttattttgccacagggttttcagatcattgatggtaattgtatctattttgtctgtgtttttgtctttttgataaaaatcgagccacgcttgtgacacagattttagaggcatctgtgagtaaattactgaaatacgcccaccatccttttacaactgacatattccctttgcttgatattctaatttatcgatttatctgtttgtgtcatgccaagtctcatgctctcagctgagctggaagtttagttgctttaggtgaaaaacatcaggatattgttgatcaatatgctatagttacctcgttattgcctagaatcttcctatccaatgagaactccacatgactccttgaaacttttttgagtataatataacagtgaaatctagtgttccctttatgtgtcagccaattttctgcagatgaaggcaagtgccacttaagtaggatgttggaccacaatcaaagtgagtggtcctttaacatgtttttgcttaccctttagctaactggcatgctcatcaatgggcaaccacttgagatgagcatcagcaaatgaaaattcaggtatgctcattgactcaatgtagcatgttgattttgaaagcgcgaaatttctccatgatgctcggctttacttccgtgttccaccatgtgtggtccttgaattcttgataaggttatgtataataagcagttacatttatcagaaatcatttcgaaggtagagttgcgactggtgagagttgctttgtgtggaatattccttgaaaattcccatggctttcaaagaactagagccatcttttgaaataattcagctgtatctttttattgcatatgcaaatattagttatttgataagaacatttctgttatgttgtttataggacttcggtgtgttctcttgaaccgtgttggtacgatattctgggcacaggaaggtaaatttaaggatctttctgtattggtccagacttggagtatttttaatggttgatacatctgagtgcaatgttcttgaatgctcaggaaaatagcactttttggttctctgtttcaaatatatcaaaacattagcttttatactgaaggtgtatctgccatctgcagggttttctttttgcctatattgtgaaatttatatctggtatattcatgtgatacattcaactactttcagttataacgaaatcagtatgttctccagattcgttatgttgcttttcatggctacacttacaaaaaatataactatcgaggttgcattttgtgcattgctttggacatggaagccagtaaaccagcatttgattgtcttcttttgcactggcatttcctgttgcacctgtaaatttaatcagtacttctaaaagaacggaaaaacagatacttaaatctagctgttaaaaattactcttctgctgtcacttggtactttctacggaaatggtcaccttctatgtttaaagtagacaaaatttctggtctttgatcaaaaggaaaacatgccattcacagtcctgcatgtacactttgagaaaaaaaaaagttacaagccaatttgcaagcacaaaagcaggaaaagaagagtctaacctaatgcaaaagcagcttctcttttgccctccatcctctttagattcgggaccattctggagacagcctaattgccaagctagttagctccaaagtaactcctagatcaatgtattatgtgctgctattgctaagatatgtccatattggcatgatgaatcatagcattgacagcctcattttcttctgcagagtatgtggagtgcaccccatagcagacatagaagactatgatcacaaagctccagaggccaaacctctgaaatgacatcaccttgagagtggtcatcaggaacacattcaggaagacggatgcagccgccggccatggcatcagagggaccatccactctgatggtggctctggcatgtctcgccgtaccgcgcagtggaacatggcggtaatcgtcacggaggtggcgccgaacaaagccattccccatcggcattgcccatggatcctcctcgagagggagaagccaagggagctcagtgtaaggatgagcaggaagaggaggacatgcagagatcggttggcacccagcttcgcgtatcggtggtagatgagcgcgttggcgaccaggtagaagaccaggagtgttccgattgatatcatctcgaacactacctgcagctctgtgaagagtgcgattgatgctgtgcacaatcctgcgcatagataatggtgatgatatttgtaagagcagttcaagaaatgccagaaatagtattgctgctagttatgaattatgataagttgtaacctgcaatgacattatctaaaaaaaggtacctgcattgcagttttcatgatctgatacagtggtaaggaccttgacttcggtgaagttattagtgtattttatgcttccgtttgctctatctaaattaggtttattatgtaggttgcagggggtctaacatcacataaacccatcagttcactactagtttacctcatttgtcagatctttgcaaagctgtactgccttcaacttttctatttacatttttgacatttcacggccttcgagacataactttgaccaatagttctcgtaatcttatcacagtacatttaacattataatatcatataggcatttctagtggcaaaactaacgaacgatacaatctttttcccaaaaaaactgtgaatacaatcttcattaactaatttagggtttcaaacatataactggtttatgtcaaaattaaaaatataactggtaaaatcgttgaatgttggcagcaagtaaaagagaaagaagatagtatctatagcaagctcacaatctccacaaattttaaccctccacttctaaactccaattgtgaaatggcataaactgcagatgtattaacactaatcactctatctacaacctctcaacctctttcaaccagaagagataaacaacaactcaaccacaattctacaaaaccttgcaaaacttttcttaaaaataaaaacatacaaccttatgaacacataaataccagtacgtactccaaaagttgaaatcaatcgatccgttatatatatagattaactacaaatctacaagttaacaacaaccttgtactgtgttttgaggtacctagaaagatggtggcgttcataggagtgccggtggaagggtgcaccttggccagccacgccggcaccagccgcgctctggcgatgacgcacaggtacctcgcctgccccagcatcgccaccagcagcgacgccacgatccccaggctcgccccggccccgacgacgctccccgcccactcccaccccgccttctccctgaacaccgccgagaacggcgcgctctccgctatctacacacatacacacgtacaccccatgtcaccatcagaatgatgatgagctagtaatgtgtcaatgtgagtgacaatgtgtgtctacctcggtgtagggaagcatggcgcagagggcgagggacatgaggcagtagagcgcggagacgacgaggactgagccggcgatgccgacggggagggcgcgggcggggtcgcggatttcctcggccatggtggacgccgagtcgtagccgatgtagctgaagtagacgatggcggcgccgtcgaggacgccgcggacgccgtagggcgccaggccgtgcggcgacaccaggttccgcgcgctgccgttccacaggccggccaggatgatgaacacgaagaagagcaggtggaacaccgtgatcaccatgttcagcatcgcgctctccttggtgcttcacttagcatcacacgaatccatccatcaaaaaccaagtaccaaccaaccatcaatgctgctggttgttgatgaattgcacatttgaaacgcatttctcatcttcttccaaactatactgacaaacgtacataatcaaatcacatgctgaactctagcccatggcaaggggacattagctctattctgccagtaccatgtctgccataaaatataggatctaagaacacaaaaccacatgcatgccgctgcgcctaattaaatcaagctagctagggtaggttaagtacacaccagtacaaaaatgacaaatcgaagaagtattattgagtcatttcacccataagcttaaggtaacgaaaaacacaaagcgattcacttctacttaataaacagtttttatcaacggatcaatgtccgtgtaatcaaatcaaatgcgactcaacaatgatctgtagtatgtgtacctgtagcacaagcagagagttaggacaaggatgagcgcgacggccgggaagtcgagcgcgttgtagcccttggcgatgccgtcgacctggatcctccacgcgtccggctccgtgatcccgcacgtcgaggccaggtagtccgtgaagctcctcgccaccgccgcgttcgacagcacgtactccatcaggatgttggctcccccgaagaaccccaccagctcacctgatgagagcaacagatggagtcaattaaccgcgctcgatgaattgatccatcgatcgttgaagagtgcgttggattaattcaacaatgtccctgaaccgtttgcacggcgccattaactgcggattttatggtggcgcgcgcgcgcgcgcgaagaggttaatggcaggcacacacaccgaacgttacgcggaggtagctgaaggcgccgccggcggcggggacgcggacggagaactcggcgtagcagaaggaggagaggagcgcggagacgccggcgatgacgtaggaggcgaacacggcggggccggcggtgtcgcgcgcgacgcggccggtggtgacgaagacgccggcgcccagcatcccgccgacgccgagccccacgaggtcgtaccactccagccgccgcttcatccgcgcccccgacctgtccctcacctcgctcgtctcctgcgccggcgtccacgtcaccagcgcccgccgccgcagccggtgcggcgtctgcgcgatcgacagcagcacgtcacgcagcgccgccatgactactacaccaaccaattaacctgcaaactaatcaagctctctcccactgtcattacagcctgctcatggtttaacttcttcactgatccatctcttctcagctgtgctagctgctagctgcgacgacgagccgcatcgatcggagattcatatatatatgccgcgacgcgaaagagcattcaatattcgaattcagtgttttatttggacggtgggaaatgaattgaagtctctctctgctcgcgctcggacagcacatatatgtactgagtactgactactgcaagtatactgacctagctagctagagcttgcatggagtatgctggagtagcttcaaattaaggcactgtcttttgcagcttaatttccaagcagcctctgctcactggctcagtgtccacacatgtgttcagctcataggacacatgaaagccatatttgcacatgctctgatgctcaacagttggggtgtgctaaatgcccttctctgaaacaacactgtacacccagtccaacgctgaacaatctaaaagtctgaactatatacagttgaaaaaatttaagtgatctgatctctgaagtctcctgcatgcagaaattgctagcagctagctaggtcgctgctagatactgctgtactctatataattcttcctccattttaaaatataagtaagcatttctaacgatgaatatgaaccgagctgaaatgccaaaaatacgtagaaatgtttatattatgaggattgctatggtacagcaggttgtaccgggcggtactggtaccgcgcggtaccaaaacacatctaaccgttgaatccgggatgggtaggatcgggagagaaaagatgagcaagggtggatgagggagtacctgtttcgagtcatcgttcccggcggcagcggcgtccaagtcgttgtcgttcccggcggcggcgcagagcaacaagggaacgctggcgacgtgggagaggataaagtctggcggcggcgcgagagagaaaaaacggaacggcggcggcgcgggagaggaaacaagtccggcggcggaagaggaacaagtccggcggtggaagaggaacacggcggcggtggcgaggaaaaagaacacggcggcggcggcggcgaaaatcatccagcttcgctagggttcaagccgctcgatctcgatccagacccatcaattgcacgcgaaattacaatactgcccttccaccgattatcatcactcggtaccgcttcggggacaaaactggtaccccgcggtaccgatctacgccagccgttcgatctgtctcgatccaacggtcaataatcggtaccgtaaggtaccgttggactgtaaaaatcctcttatattatcgaaacagagtccgctgtgactgtgaccatggaaattactccgtaatcatggctcctcaaaagctaatgtgttgtctgcttgctaacaaatgaagctcacatggcatgaggttcagacttcagaggtacagacatgtagatgcctcaagtagctgtttgtaaatggtgatcaaatccatgcatgcagcagagaccagatatgattcctgtctcctgatgacaactggtttagcaggtaagattaatacctaaccacaagcaaaggaggtcaaatctacatgagccctataaggaggcagcgagagagatgctataaacatgatctagtaggaaacatctcatatgcatgagcatatgccgacgtgtcgacaagccattcacacttggtgaaaattattaagcaaaaaggactgtcaggtaattagatctcactcatccattgaatttattttatttccagtagtttcacacatgtgcgcagttacaacaaagtatcaaagctgaatccaaattaaaaggacgaaataatattgttaatggataatcaagttgctctatctcctgatcatacataagatgagcaaacattatggaattcagcaagaagaaccaaagcataaaagatggtcatctcccataatcactaggtttggcagcatgccgaatcaaatccttgacctggttaggtatattaaacagttgataaaaagtgtccaatcgagatagtatatgataagcggaataaaactgtggaataaaagtgattctttgaatactgatccaattccttgatcaactttacaaaagcacgcgactttgtagacatagtgatatgcatgaggatagctggagtacattaaacggcatgaacgagaggccaagacaagttcagagcagtcaaagattcagagagcaagcataaaacgatcgaatagccacacatcaacgcgaggacgagctgctgcatgaaagcgtcagaattattcagaactgcagatcgatcggtggaatactgtatgtaattaatactcgatcgagtaaagattatatagctaaagattagctgtctagctagctgcagccttcctgcctgagcggtctaagcactattcgcgtaggatatgcttatgtaaaaagggcttaagcagcagctagctggcactatatggggttcctgaagaaagaacaacacaaggtatcacacttgacacatcgtctgccactaatggtggccttgatggaaagagagagggcggctttgcaactgctaattaatcattttgatttgtggccagaaggctagcatggaatcatctgttaatcaaagtggagggtgtaggttagatgctacaggtctaggcatgcagcctagcctgtcctttaatttggaatagggataatgaggtgtatgatagtataaatcctaatccaatcgcccataccttgaactcagaaaaggttatgccatgttcatgtgggtgttcagtatatatattgagaaaagctgagattgttcaggcccaattgcccaaagtcaaataccatctggattttgtattatgctgcagaggccaagatgtaatcctcttccttattgaaaaggtaacttaagcttatgtttacaactaacaaaatatctgaacatcaataatattgcacacaaatttaaaaggaagaagtgttggagaacaattcattcccatatcaaaatcatgaaaaaattacccatgtttgaaacaatgcctggaatagaatgtatatttcattgcttactgaattattccattgtctatactcctttaaaaaggagtagtagtagcggtgaatctttttttagataatggattaaaccggtctctacacccaaaggatgtacacagcctagtagcggtgaatctgtcaccccctattgctatattgttcaactattgcaatcaaacaacgacagggcttagctctggtgagtcggtgagaaaaaaaattcattttactactttgaactatttcattggttcacttagccaagtaaaactattttttggcctattttacaccctgaactattaaaaacggatcatattacttcctaatggttcattgcaatgaaatttggtaggattggtaggtacattataacctacctcacaatattattcaaaaaaaatcgttactatatacaaatatttgaagcactaagcatgatttaaacaccaatggatctacaaaattttagcttttgaaaatatttttgaactttgataatagtgttatctatagctctacaaaattgtagtttaaaatgcgactcatgtaaagagaatcaaatatgagaaatgctatattaagcaataaagtaaactatttttaatagtttaaaggtaaaatgaaccaaaaatagtttagttggtcaaatgaaccaatgaaataattcggagttaaataaactcttttttttttcaatttgtaatcatcacaatggtaaatgggccatatttagtgggccaagataaacccaaattccaagaaaagccatctccttggtcaaccttgggcctagtagaacaactgcagcccaccgttctttccgttctccgctaccgctagcttcgttctccgctgcggcagccggcaatcgcacggcggaagcaaaacgaggaaaaaatggggagctcgcggcgaggggaggagaagggactccctgttcctcctcctcctcctcccaaccctggtggtgtcacttcaagacggcaaaaggaagcagccatggagatcgaggccgtcggggccgatggtttgtgcccttttccccttagcatagctgtgtattagtaactcgttcgtgtccctgcggaacggaagaactatggttgggtagtaacagcttgtcgcaagatctccggttattgttgcggcggcgcggggtcggtgccgtggattttccattcgggccgcaaagagtcaagagtgttcttcctgtaggtgcgccttgtgattgggcacaagcacaacagcgtcaccatggatctttgtgtgatttggtggaggtggaagctaggttggttcttgcagtcactcaaagaatgccaaggaggaaactgagaaaatgtatttttgtgcttgcagtgtaactgctctttcttgaaatcagatcagatgcatatatgtttcacaatatctatccattatctaaaaaaaaaaaaagaactgattctgtccatgtagattcaggggaatactattctgagaactgcatcccaaagtgcattgacttgcccttaattaacctccgaatatgcagcttcagcttgtttggttttattcatcaatcttgtttggagatgtatgtgtgctttcggtcttcaccaaactccaggatgataatccaactcgactttaattaaaacaaggacaatcaaaaagaatgcttggtagttgaggactcgaagctcccatggagataggcaagtgcttattgcatgcttgtcttggctatgaggaagacatttgttgatcctcacctaacattctttcaggcaatcctatgcttgcacttataaacgcataccttcaggcatataagtttcaaacttcatacgattgttcaagtgacactattgtcatggctttttgcaaaccatgtctagtattctattctgttcttacttttctgatcctaaatggtggtccatctcatgtacttgcaaaggtttttatggtggtgatggaggatgacccaatcatttcccccaagtcaagccaaaagaaagtaatgtacgtgacttccatttaggaatcctgttagtttaattctttttggaaaagaacatttatgactgaactttcatccaggagaggtgaggaagctcagaagtacaaggcaatgaccacaacgaagcatgatatcttcctggattcatttctcccagctggatcttacaagaagctatacagttacacccaccttctcaatggctttgctatctatgcaaaatctgaaaaggtgcttctatttagttgatcttttatctgcttacctgtttatgaaatatttatctgtctttgttgtatgtgtaataggcaattaaaactcttagtggagcaaaaggagttagactcatccaagaagatataaaaatggccaagatgaccacatacactccgaggtacattggagctaatgtagtctggccgctcctcggtggtgccgagaaggctggtgacggagtagtcattggcatggtagatactggcattgaccccagcaacccaagctttttaagcacatcggaccaagcaaaaccaccaccggccagtttcaaaggaacatgtcaaactggcgaaagatttcctccagattcatgcaatggtaagattgttggagctaggtggtttgcacgtgctggtcaagcaactggagagttcaatgctacaatgcactatgcatctccttacgatcctgatggccatggcaggtgcatgctcctttgctaacaatgctaatcactttttctttacgacttgcctatgttgcatttttaatttcaaggacttaccaagtaccaactgatcaaaacattgcctacacagccacacagcgtccactgcagctggcaattttcatacgccagcaatatcaaagggctacaactttgggcatgcaagtggcgtagcacctggagctcagtgagtgaacaatgcttattccattcttcagatgttcaaagcaaaactactcttatgttgtgctgtctcttctgattatgtgacagtcttgcaatctacaaagctgcctattcttttggtggatacatgtcagatgttatagctgcagttgacaaggtttgtaaatcatacttctttcataactactattctcttccgtaggttaaaatgccagtgtaacttatatgcaggctgtagaagatggcgtcgatattatcagtctttcactgggaccaactactattacatctgggccagcatcattcctcaatttgctcgagacacaacttctccttgccaccaaggctgggatctcagttgttcaagcagttggcaatggaggccctgatgcaaactcagtagtttcgttcagcccatggataacaagtgttggggcatccacaactgacaggaagtataacaaatcaattataattggaaatgggcaagtcttctcttgcggcggcctatcacgtaattcatttcaacctatgaaattaatgaatttggagccttctcaagttctagtgtttaactgatgatactaagttccatacttctcttttctttttctttcagaattcgtagttcattttgctcttagattctatatgtcctagattacatcatcattctgttagggttgcactgaagtagctagaaaactaacattatactggggctttcttcgtttcaatttcttcacctggtaccaattttgtttcaacagtcttccttgttctgtccagcatcgacaccaggcgagaccatgtaccctctagcattggctgatgatgtgtgcaacacgaattcaactggtggatcttccaactgccaagatccggatgtcttcataagatctcttgtccaggggaaggtgattatttgcatgtttgtgtcgtcaaactactacgaaggcgacttccttgctggcattgtcgatacgattcagaaaattggtgctgccggagttatcatcactgaccgttcttcgagtgactccgacattgaatatcatcccacatttccgacgtcaatcccttcagccatagttgtgaacagtgctgatgcacaggtgattgtagaaacatttttgcagaccaaatgatttgctaatgcccttgttcagttttactattctcttatgcagtaactgggctctgttgtgttttgcaaccggatgcaggctctattggagtactacgacgacaacttggtccgagacaaggaaggaagtgtcaccaagttcggcgcaaccatccgaattctggatggacggcgagcaatctacaccagggaggcgcccgtcgtcgccgagtactcgtcgaggggcccggacgtcgacgacatgcagatgcaggcggcggacgtgctgaagccgaacgtcatggcgccgggccatcacatctggggagcctggagcccgacgagcgacgccatggtcgagttccagggcgagagctacgcgatgctgtccggcacgagcatggccaccccgcacgtcgccggtgtggtggccctgatcaggcagaggcaccccaagtggagccccgccatggtcatgtcggcgatcatgaccaccgccgacgtcaccgaccgctccgggaggcccctgatggcgcggcgtgacgggggcgtcctggagcgcgcgacgccgttcgacatgggcgccggggccatcaacgcggcgcgcgccgtcgacccgggcctggtgttcgacgccgggtaccgggactacctccagttcctgtgcgccgtgcctggcgtggacgacgccccggtgctccgcgcggtgggcgtgccctgcccgccgtcgcgggcgcggtggtgctcggacctgaacgcgccgagcgtgacggtggcgagcctggtggggtcccggcgggtggaccggcgggtgacgagcgtgggcgcggagaacgaaacgtacatggcgcacgtgcaggcgcccgacggcgtggcggtgcgcgtgtcgccggacacgttcgccgtcgcccccggcgcgacggccacgctgaggatcgtgctcaacaccaccgcgccggggaacaccttcagcttcggcgaggtggtcctcaggggcgacaagaagcacaccgtgaggatccccctcgctgtcttccccgccgcggcgttgagcccgtgaagccccgaacagggatagtcctggtatatacaaatattacttacgtatacgtatgcgagcggatggagttgtacgatgaatgaataacatgtatacatacactatactcgtgttcgagcaaacaagaatacgagccatgtatcgtataatcggatattatgggccgcaacggaccaaccggactgtgcccctgctgggttattcctctagttgggccggagcacggaggagagctggtcagccataatgggctttcgttctgatgcaaagcaacggcctctgctaacttcggcttgtcgagcatctctagcagcttttgccagatgccagactaccatggacgggtttgactgtggcttctctttttaatttttttgatttgatgtgtccagtgatctaatgattgtttagcattcttaacgatgatattaactagaagcatacgccatttacggatacggaagtccacgtcgcgtgccagcgcgctggctggtactcccctatccccttctgttctggagtagaacagaagccattgactttcagctttctttccctttccccttcgcggttggacccgcgtggccgcgtttgagcatgcgtgctacaggtaacgatggattagaaaaaggattatccgcggatgaggcgcatgacgccgcctcgacgcggcgcccccgggccgccgcgcttatccgcacccacctattcttactacggacagggggttcagatcaaacggcaaattttttttccaagtcacacatcgaacgttttttatcacatgtacggagtattaaatattttaaaaaaataattacacagtttgcgtataaattgcgagataaatcttttaagcttaattgtaccatgatctgacaatgtggtgctacagtaaatatttattaataacgaattaattagacttaataaatttatctcgtagtttacatgtgtattatataatttgttttattattagtctatgtttaatatgtgtatgtatatatgaggtgtcgcggtgtcagctatagcgcgcgtgttgtttcaacgacgcagcccgctcgctttcacggtctcacttttcacccatggcggccaccatttgacctgtgattttactccactcgcgagtgtgtgtgcaggtgagctgcatgcacatcgggatgtgacgcccgccggctggctgggctcgcgtctgcgttgcgtgaagcgtgatggcgtgggggctctccgtatcggccgcggggcgagcgtccatattccacccggcgcgcaggggtgatggcgtgttgctccgtcggtcggtgacagcttcggcgtcggactttacaatggaccggtggtggctgctcggaaggaacatcgggccgactgccgagacgttagtcgcatggagaacatcatatgatttcatctgatctgcaaaaccggtctcgttatttgactggtactaatttcaactccccccacacaccccccatatctttgatttttttttttttttgggggaggtagtcgtatctttgagagaatgcttctcctgctacccgagaaaaaaaagggacgccccgatatagcaaacatggcaggagtgcactacttcatctctcttttaaggactttagttgcaaattttttcttcaaactttcaacttttccattacatcaaaactttcttatacacataaactttcaaattttctgtcacatcgttctaatttcaatcaaacttccaattttagcgtgaactaaacacactcttaagcgataaaataaagtctatcaatcttcaaaataattgttcacctgaattatttatttcagctattatcgtattatgccgttgtatttattataattaaatctttatgacaagttactcggaaggaatttttttttagtaattttgctattgtagattttttttaatattgtacacagttttgtttatatgtctcattaagtattttactatgtttattagttcatttttaaatgctgaagtgatgttttttttatatttcacccaatgttttgtgatgttctaacatttacatattgatgtttcatatgtcatatagaataaggacgcaacatttttttatatatattctttcattaaagtgtaataatgtaatatcttattataaagatttaattattacaaagatttaattgtaacgaatacaacagcataatcaaatcatatattgaataaataatttagaagaaaaattgtttaaaactaattaattagtagttagtttggtatttaatgagacatcatggaagatgagtgagagagaaggggggaggccatgtggagcagagcataggaggaccaccatgcgtactacagtagcatatgatattttaattttcgtcggacgtccgacgctaagtcatctctaaaagaatgtttttcctcaaatatccggctcaaggagaaaaattggatgccccaatataacaagcaatggcatgcgtaccacagtagcgtccaaaattttagttctcatcggacattggacgcctagtccttggactcctcggacgtttggtgcgaggagaaaaactggatgccccaatttagcaaggatcagtacatgtgaggaccattttggcttctactcttccaagtgataaagcaactttgtacgatatccgatatacgatttgaatatattgttatatttgttataattaaatctttacgacaaaatattatatgattatattttgattttttaaaagttttgttgttgttgccttttttttaatgttgcgtacaactttatttgcatgtttcaataattatttcatgatatttcactagttcatttgtagatgtttcacgtggttattttttatatttcaactagtttttatgatgtctaaacatttacaacttgatgtttcacttgtgataaaaaaattcaacataattaattattggtaaaagtatatttagatttgtcgtatgttttttctttgcgatgaagcactcattgtgactcaacgttttatgcaaaaggtgtcagtgatactgtcaatatttcttaaatgttgcatttttctaaaatatttaataaaattaattgaaacatttgaattaataaaattaattgaaacttagttaaatgttttaataaaattaattaaaatatttgactaagttttgtatttttttcatcaaaatataattgcatttgatcttgttgtaaaattttagttgtagtgaatataagggataaataattttgaaggaaaaatcattcaacgctagttaattagttagttttgcattcaaggaaccaccatgagagagaaacaagagtgtgggggaggccatgtagtggagagcagaggaggaccagtttgagaaaaagaaaagaaaaaaaaagatgtagtgcgcgtacccataaaaaggtctaatttttcagttcccgtataatgtcctactcctagtactctccgtatcttttgattatgacatatatagtgtggcacaaaatttactattttcttcacttctactacctttgattatgacatatatagttaaataaaagttactacttatagcttttcttttttacttatttgttatactctcgtcgttccaaaataagtcatcttttgcataagaatttattataaccctctcttatttatttttcacctactattttatttcaactaatcataatttttcatctacttcttatctcaacaatttaatactcacagagacttctaaggtgtttgtattttaagagtccttgcattttggagcttggacaattggacttcggagtggctggacaccatctacgggcaactcgaaaatggaaatatccgagcgatgtgcaatcaaaatgatttgccaccctgagaacagaccattgtccccgcgcagaatcgaagattttgccaccctacgggatgggaaagagatttgtttgacacatgatctgtttaacgaattacggacatgggcgagcactgttctgtgcgtgctgctgcccactgtccaaactccaaagcacccacacccattccacggccatacacatccgccgcccagacttttggacggggtggatctcttttgaacagcacttttcctggggaggcagccggctgcggggaggtctctagtccacgagtgttcgcgagcgagattatctcacgaatctcaagttctcaactgagctagatgctgactgggtcaggcgctaccccatgctagcctcttcgggtctgctcttgactaaaggatcggcttgattattttctcaatttttgctagtatgtttttaaaattgataaatggtgtttttatataaaatatacgtagaagttactttttaaaacaaatattttttaaataatccaccctcaattaatcacatgcttatttgtgtgtgtatttaacgacttaaaaacaaatattagaaggaagctaaattaaaaaaattctaaaataatcttcaaaattgagttttgtctagaaaatatgcttgtgcgttgcaacagataaatgctattttaacctaattattgttatacggtttggctagggtgaatttcactatgggaattcgcttgattattttttctagaaaatcatgagctgcaattaggagtccaacatttatctcaagttagcatgcaagtttttaaaaagatttcttatacgactccttttgcatttccaaaagcaaacgaacttagaatccgactcaaacacgaatatgtatttaaaaacgaacaaatttaaaaaccaaatcaaacacaaatgacgtaccaaaataccggtgaaaacatctttaatttttataatagtacagatggtggcagatgagaaacgctaggggtagcttcacaaggtatagggatagccaacctggattcgatacatcaccccttttaattatttgatattagattcttttctaatatttgtgtttttttttccttgtaggcagatgatgaggctgccagggagcaacttgggatccaaaggtcttgtttagttggggaaaaaattgagtttggttgtcacatcggatatacggacacacgtttaaagtattaaatgtagtctaataacaaaacaaattcagattcagccagaaaactgtgagacgaatttattaagcttaattaatatgtcattagtaaatgtttactatagcaccgcattatcaaatcatggcacaattagactttgtcggtgacatgggaccgggagtatcatgacttagagacttgaggcagacacgatcacccacgtggcctaaccccctcggggggtcgggcccgagggtgatacggccgcccttctctttgtctccccgaggggtcggaccgctcccgtctcagccccgagggccgaggcgccccgaccccttgtgggtgttgcgccgcgtatatggggtaggtgagcatagcggggctcacctaaccacatttattgcggtttggacgagcgcgtcacgccgcatgtaacgcagtgcagcgcgctcgtttatccggtctgtgatcagtcacagaccggtcaaatcgtgggttaggtggcgacaggcggtctgacgcacgcctcgccccatcccgtcaggacgagagcctccaagcactcgtccctagccggagccggcgtgttagctcctagagatggcacgttggttccggtcagatatatgccaggcttcatcctaaccattacaagcaagacattgtatgaagaggggcgaacatgcagattgataaactgacgcgtggtggacaagaatgaccgatttgtgaccggtctgacactggtcatgtcgtcagcagacagccatgttcccacgtcgcgcctgcttccggcggaagtggaggtaggtgtgggccgtcccatcagaaggtcattcggacggcaaccatacaagtctccgtctgtttatgaaaagataggataagtccccacaaaagaaagagagggagagatggtgcatgtggtatccccttgagatataaaaggaggaccttgcccacttagaagaggggaggggaaaaaacgatcccagaacgatcgggggctggcccgcactttgtagcttcttcatacacagatccaccaaaacacaggagtagggtattacgcttctcagcggcccgaacctgtatacatcgcccgtgtcttgtgctttttccattctcgcgaaccttccacacacagacaaggagtttagaacctcacccagggcccccggccgaaccggcaaaggggggcctgcgcggtctcccggtgaggagccccaagctccgtcagacttaaaagattcgtctcgctatttacatgcaaattgtttaattgatttttttttcatatttaatactccatatatgtctccaaatattcaatgtgatggataaaaaaaattgttttggaaactaaaccagggccgagtttagttccaaaatttttcttcaaacttccaacttttccatcacatcaaaactttcctacacataaacttctaatttttcctcacattatttcaattttaaccaaatttccaattttgacgtgaattaaacacaccccaggccaaaatacagtagtggcatcgtcccagcactagcagtctagcactgactgaccaacaccaccagagaccaaacatggcattgagggctggtttggttggtggtctaaattggtcttactaatttttggcaatgccaaattttatcaagttttggtatggctaattttggcaaggtaaagttgcgtttggattgaagccaaaatagcctaacttaactattgaaatgatctattttcttaggcatgccaaaatttgacttcaaaccaaatagacactaaatactattaaaattactaaatattaataagactaatttaggcctcaaaacaatccagccctgaaggtagggcagagaatccggagtgagatgcagacaaaaaaaaacctgaaaccacgttcatttcagctcagggcttcaggcggtagctgggccagaaaaaagggagaaacgaaaaagggcagggcaggaccgcaggagacggtgcacttccgctgacaggtggaccacagactactggtttactcgtagtatgatgaaagaggagtagacgacgagtagttcttgacgctagtggtggtggagcctggaagattcgggcatgtgtagattctaatttttttctttaaatttttaactttttcatcacattaattttttttacatataaatctttaactttttttgtcacatcgtttcaaattctttaaacttttaattttaatgtggaactaaacacagctttcagcgagagatgagagagagcccaaagcaatggaagaaaccaagtaatattgtactagtaggaaataggaaaagcgttcgaaatttacaatctttgacccgcttcgtcctcaatcttcttgcttatacacagtcataatccctcgtactagaaattaccgtgcaaaatttccccacacacgtgctgctatggttctaaatttctaatcggctctgatgagtcaccttcccaacagatgagagaggattttctggctgagtttagcaattagcacagctctttgatcctatctttgctttcttgctccgcctacctggatggatggatcccccctccctattaatacagcacgcttcttcctcttcctcctcacgattcaagccaaacgcagccggccgacctcctcccgtgccttcctcctcgatccccggagagagaaaaaaggctccatcttttttcctctttccgtttttgggcgcgaacgcctcgtcccccccggatcgatcttgctcgcgcgcggtccgtagtcgcgtgctctgttcgaaaggcgagtccctttttttttttcttctccggccgcgggcgctaatttttttggagggcgacgcgccacctttggcccggccatgaacgcgctcgccgccaccagccgtaacttccggcaggccgccaggctgctcggcctcgactccaagctcgagaagagcctcctgatcccgttccgcgagatcaaggtgagacggggttttttttttttttgattcctgtttccagcttgttttgctgcggttgctggctttgttgtttcatcaggcgtagcgtaaccccgctctctgttcaggtggaatgcaccatccccaaagacgatggaaccttggcgtccttcattgggttccgcgtgcagcacgacaatgcccgcgggccaatgaaaggtggcattcgctatcaccctgaggtgaggattgtggtttgatgagaatctgtttttgattttgtccagtaataatgccggggatgtaaatcatcttccttattatctggaaatttgaccggagatgattaagcatgaataaatagtgaagtggttataaactcggaatgttttgacagtgactgtctcatgtcaatgggatcattgtttcgttttggtgagttattagatctacggtacttgttaacttgttattccttccttgtttgcatatggcctttccagttcggtgagttattcttttaggaaatgtgcgtgatgttactttcagtttcatacctttatttgtaatctactttatgatattttgtggatcgtctgggcactgggctgtcagtttgtcatgcagatggcgtgaactgaaaatccttgatattttgcaaagcatgtgttgcttttgtactactatgcgcttatgtgcttttacattcagatttatatttctttctgttgaactgtcaacctaaatgtatcttttccatactgacaaaagaatcccaatgggcacatgccaatcttcttcctctgtcaaattgtttctgtaatttctgttttttcttgaactattatttaactggcattttgagaaactagaaagtttgatgcccagacatgctacagatgctagtattcagtattggagacaaccactcaaccagctttgttttcttctgtgataatttcttttgttctttactgctccaatcatacttcggttcttgttgctggaagccattaaatttcatacagataggtgcttgttataattaaacctagggaataatcccttaggtttttccaaaactgcgagcttatggtattttcctgttgaaaatgccagagttatatatgtgcaccatttaggttccaaatgaagatgagggattttcaaattttaggttaaaaaaaaaacagtctcctggagtactaataaatataaagcattaaaagcgctatgagcttctgagacttttattgtcgtgttttactttgtacttaataaataaatggatttcctttgatgatgaattgatgtttgttatcagttagctaacagaaaagcagctaacctatcaatcaattcctagagtaagcaattgatgtcagcagttgttaatttgcaaaggaattttttgtaagtattaccgtaagactttcacaagctaatgtagaaagtcaactataatattttctgctgaccatactttgtcttataaattattcattgtagtctgagattcatctgtttctcatttttaaaactacaattgataatgaattttgggtgaggttccccctcctttataactttcttatcttcttaaatggcacccagctctcttgcgtgttcgagaaaaaataaaactaaaactaataagctatggtttcaccattctgctttgcaggttgatccagatgaagtaaatgcacttgctcaactaatgacatggaagactgctgttgcagcaattccatatggtggagcaaagggtgggattggatgcgctcctggtgaattaagcacgagtgagctggagcgtttgacacgtgtatttacacagaaaattcatgatcttattggagctcatactgacgtgccagctcctgacatgggaactaattcacaggtatattctgctttctctagtatttttctactacttcccttcatcatgtaacatcccctgtaattttgacacagaccatggcttggattttggatgagtactcgaaattccatggtcattcaccggcagttgtcactgggaagccaatagtaagtatactatacaacaacacaaatctagtttgtgtaaataaacaatttacatccagtgattgtattttggatatttttgttgtaggatcttggtggatcattaggtagagatgctgctacaggaagaggtgtgatgtacgctactgaggctcttttggctgaacatggaaagtccatttctggatcaacctttgttatccaggtcagtcataattaataatcgattgatttttgctatgcggattatttctaggatggttgaaggacaatactccatccgtcctagaatataagaagttttaggcttggacacggttattaagaaagtaggtagaagtgagaggtggatggtcataattggatgagtagtggaggtaggtggaaaaagtgaatggtggagtgctgttattggttgggaagagaatgttggtggagaagttgttatattttgggacaaatcctgagggctaaaagttgttatattttggtacgaagggagtaacatgcatcatcataacagcaaaaaaaaaaaaaaatctagctttcttcctgaaaattttaaaaccgcaattcagctatcaaatcagtctgttcattatcattttatcagtatgccagcaacatatgtattttgtttgtaataatcaatggaattttccagggttttggtaatgttggttcatgggctgcacgaatcatccatgagaagggtggcaaggtgattgcacttggagatgtgacaggctcaatcagaaacaagaatgggttagacatacctgctctgatgaagcacagaaatgagggtggtgctttgaaagattttcatgatgcggaagtcatggattcttcagagctactagtgcatgaatgcgatgttctcatcccatgcgctttaggtggagtgctcaacaggtaaaagctagtgtccatgtcgatccttaaattttctgccaatatgagttgtttatcgggtcggggatgactcttgaaactctgtccttacctggttgcagttgcattttcacccattatacctatctgttttttcttttttgtacttttgacattaaatggtacacagttgttttagacggtaatcttgttacatgttgaagaacctattttatctgattattctagttcaacagtagtatgcaccaagaaaaaaatagccaatttacatataattgatcttctgaagggaaaatgcacctgatgtgaaggccaaatttataattgaagctgctaatcatccaactgatccagaagctgacgaggtaaccacagaacaaaacattgtaccctaactttgtctttgagaaacatcagaaatgttgccaattttggcagttctgattgatgctgtatgcactacagattcttgccaagaagggagtgaccatattacctgacatttacgccaactccggtggtgtgatcgttagctattttgagtgggttcaggtaattgaaatgccggttcctacgatcttgtttcgcattagctttggatgaatacagcatctcccttatgcgctttgaacggttgcagaacattcaagggttcatgtgggatgaggagaaggtgaacatggagctccacaagtacatgaacaattctttccagcacatcaaggccatgtgtaaatctcatgattgcaacctgaggatgggggcgttcaccctgggagtcaaccgggttgcacgtgccaccctcttgaggggatgggaggcatgaggccattaacaacactcatatccatgtccgaaaatgttggacgaccaatgtctgatctgataaattcatcagaagtggccggcttggaaggagctcacttgcaataatattcaagatagatcggcgtcggcgtccttccaccgttccggcgaaaaataataataaatatattaagggtacctaacaaaaatgtgatgtttcttctttcgtttttacaaaaggccgattcaatcgtgcgtgattatagtattgacaaaaaatggtgtaagctctagaggcaatttgaatttcacaaaggttgtattctgtcattgtcattctgtggttcaaagtctgcgagatggttgacccccaagtctgaattatataaaataacattgcaaaaaaactagaatacccacatgaactgatagggcttgtttggtttgaagccaaaatttgccctaccaatattttggtagttccaatacggttttggtactaccaaaatttgtagcattgaatttgaactattatagttttaaaatttggtaccaaaacaaatatgcatttgccaatgttaaagttaccaaaattttaacaggacaaaaattggcatcaatccaaacaaacccacaatacaccctcattcaatctcaatgctaccgcagcaaaatacgcggagttgtgaatgttttgcgcctgagagaaatgtactgaaaaattgcacaaagagagagacggggatatagttcaccaggccgaattatttgagcccactagactgggggcatttaagcccaaccccaaagaagaagcaactgggcccatccatggcggctacggcccaatagtccggctccggcacgccgcaaaccctagcacccttgacccccctgcctcctttatatacacgcatcccctctcccccaatcgaaagctcaccgtcgccgccaaaacggaacattctcccaagcccctcgtatccgtcagttaatccccaataatctctcttgtatggtaaagtatattggtatctcttgtatgcacatcttcgttttcatatcttgtataatcatggattcgtggtggctgtgacgactaggtgaaattcaagctcaacagaccaaatcacaggtctctctccaaggcctttggagatgggatctgtatgccgagtttccgctcagccgagccatctatgatccatgcttactcgcgctttgtttgcctatttggctagattgtttttaaccctttggccagattgtttttttttccgttttgttctgcttggtttggtttatgttccaatttcacgagcgatgctaatctcgcacggttgggttgtttaggcctgatgccacgtcactgttagccacgagcattgagctgtgatgctatgatcaggccgagacaaagctgattctggcgtctcacaagttgataggaacctggggactgctgttccatcggtccacagagccggtttctgtgactacatttaaatttgattcaaatttgatgtttaaattggattgaaactttgtcaatacggaatcttttatggcgatgatgataaacttaaggcttgtttctcataacattcgcagttgccgcctaagagctttcgccttgccgggcttgagagctaatgctgctaactccttccttggatgtctgagccatatggttttcattacatttacatttgctattgggtcttgccattagtattcttggttatgattagggttaagttctgtctcctgtagcaatgataattgtactgtcatccaagtatccatgtgtgtggttatgttttagttttctgttcatgtgtgtcatgttttagtttgctttgctgacgggcaaatgatgatgaaatcaaggcttgtttctcataacattcgcagttgccgcctaagagctttcgccttgccgggcttgagagctaatgctgctagatccttccttggatgtctgatgcctgttgcctagtaaacttcacgtgattgatgttcaagcagtttcatgtttcatatttaattgttacatcttagtagagtgcttgttatgcctgcccagtgatgatgaaaacaaggcttgtttctcataacattcgcagttgccgcctaagagctttcgcctcgccaggcttgagagcttatgctgttaaatccttccttggatgtctgagggcccgccttgtattctgtttacaaaacttaattacatcatctccagtgtgcaattctttttgtttgctcatgttctcatttcaagatgcagcttctatcaacaggtttgcgaaagttctgcctggctgatcagactagctgaggacatgcttattcacaggttcgcagcatctacacactgtttacattttggcagtgatctaaacatcggcgatcatcacagtaagcgtgcaaccatttcatcaacacaacactgtttacatctgatacttagactgagaccactgtcctcaagctacctatgctgctccaataccagaaaacagtaacaagacataactgaggacccctgctccacggctcctccaataccagaaaacaggaacaaggcatggtatgcaattgtatcaaattggaacgaaattcccaagagctttgtatctctccgactcttgccaactccatagtgtggtttctaccaccaggtgcttatgtttccaaatgtaaaacttgggccccttctgaatgtcaaaactgagctttatttttgtttgtttgaattctttatgtttcgcacactgtctttccagtctgcgaagttacaagaatgctcgtggttttcaccttctgctgctggttcgcacttctgctcatctatctcttgtgacacaaaagtcctggcttgtttcggtttgattagtgatgaagcaattgaccaagctcactactagtcactggcagctcagttcagacttcagaacatagctgtcaaactggagatggagtatttaactattatcacttttgatatgacgtttaataatttagggtgggtttagttccacgctaaaattgaaagtttaaataaaaaagttaaaagtttatatgtgtagaaaagttttgatgtgatggaaaagttggaaactaaacctacataagcacataaaaattcatgtatcataaatatatatgagtataaattatgaaattatatgagtgaaattatgaaacgttatatctaaaagtgataaatatctaaattaccgcgctaaaaaccgtggacattcactgcccataagtacaaaactgacacaggtgtgaattgtgagaaatgcgaagccgaggcttgcataaattcagctgaccctcgcgacactcggccacaaccggcggcatggacggacagcggggtcaccagccggggcgggggcgcgggcgggcggcgccgcccggatggaccggcgacgccgggtccgggcagggctccggccccgacggctcctggaggtacgggtgggggtgggcctcggggcccggaggcggctggggctacggccacagctcggcgcagagccccggcggcaccgcgttcgggtttggcttcggcggcggcggaggcggaggtggaggaggcgttggcgggcgcggtggctccagcggccgcggcggccacggtggcggtttcggctgggctggcgggcagggccacggcggctggggagccggcgctggggcgttcggaggcgggagtggatcaggcggcggcggcggcggctggagcgctcgcgggggattccacggcggtgacagccaccggcctcagcgcggtggcggcaactgaaactctgaaaccgctggacattttgccttgcatccgttgtacacagtagctgtgtgtaatatgtccatctttggttgagctttgttacctactgaaatactactaagatatatgggtacttaagttatcttcggttcctgtataatatgtccatttttgttcaaactttgtacctgaaatgctgaaataagatagggtcaagtgcagagctgatcatgctcgtatatatattccggatcgtgttggtgatgttttaattctggactgaacaatctgccatgtctcaataaaaaggtagttcgactcaagtttctcgagaaaaataaaaaggttaactcaatacaaaatcgaacaaaaaaaaataacaattgagttcatggaatagacattctttggaggcaaaggaattgtggccctgttacagacatcagaatgcagatttcgagcttcacatgaactcatctatgataagaagtttcagtactacaaggcagcacgttcttggcatcatgggtaccaggttttttatcttccgctgcaaacgttggttttctcaatttagaccggccgtttgaaacccttctccaaatcaaggcccacaaatggaggctcctgcacctactacaatatatcaacgtttcagactacccaattctcatttctatttagtgtttgcctaaacggccacctagcccattagatggtgattaatcgctagtcagcgacaatttgtccagtttacaccctagacagtgaattagtcgatttaccgcctagacggttctagtcggtcctaggccgcctggacgggacagtccctgggcgcaattggacaatgggacagtgcgtctaggtggcgactaggcgatagaaatcaaaatttgggcgcaataaaatttggaagcgccacacggggccgactcagtatagatgaggatttaggttaccttatttgagagcctagagagagagcgctgcccatgcctactccccttttcacgccgccacaagcgagagctctgccaccgtacccaccaatttgccaccgcgccgccacgttcttcactctcctcctttgctgcttcacgttcttccccctcctctgctgctcctgctctccctctcatccttcatccttgccgtcaatggaaggtggcaaacacatcgattgaagcagtcaaacatggaaccactcaaacagccagtgccaaccctagatcaggccatcaggggactagactcccttccaccacctcacctcctctattcttccagctccaggtaaatttttattcctctcctaactccagcaccttagatctgtatcagatctgtatgtatgtgattgagtttttgagaggtatgctcatgtgttggtgttggtgctgtactgctactcccctagccttctatgctatatatatacctatatatatatatatatatatatatatatatatatatatatatagagagagagagagagagagagacacacacactaaatatgaaatataaagttctgatttatgaattatgatgtgtatactgatgtgttcgctattcctatagatttgtactaaacccaatgctttaaacccaatgctttgtgtgcagtgtcagtgcgttgtattgacttgatgatttctgaacttaactatgatttatgctattttcctaaatgcctatatttaatgagtaccgaatgtctagaatcagtatttttctgtgaaacaaatagaaaaaacgcctaattcgcctaatccgtctagtcgccgcctaatcagcctagtagctagtcagtaggtggccgtcccactagtgtttagcaactaggtgaacactgtattttctaagtccttcaaatatgtgaaataatccatgagatgatagaaccatatctcatcctcaaaatatggtgctgtatttttcgttactggtcaaaactgaagcactaactatgataaataggagcgaatagttgttattccaaatcatctcgaagtttctaacttttgctggtttcagtatttctttgaaatgtttgtacaatatcctaatagcttagtagtccaaaaggacctaaacaaatgttacaagaaccataaaaaataacttgagacaagaaactaaaccaaaaaaaggtaatctactaaccacaactgcaaaatttaaagtaacaaattgtgtcagactcggaatcgtatcaagataacatattctggcatatattgagctacatgaaacaacatgcttaaactttcccttaaaagaacaacacatttaaccattgttggaaacaattatggaagacatttgatcagcacaatgtaaaattatttagtaagttattaaatgattagtgcaaataaaaaaaatgacttggcactttgccaatggtggaactgcaaagaaagaagaaaacattaacctaataattatttcgatttcatttgtaatcacagtataagctagaagaagatttcatgcccaatgaaagaagttcaattatgcctctggaaatagtacactctcaagcctaatacaaccaaccatcacactctatagagccacagagacattttttcttcttgatgttaccattggcatcatgaacctgatctattgtatagttgtagtggtatgaaagttcttggcggggtggaatgtcctcacaggcaaagaacataatgtgaggtacactcttgtcgtcatgatcatataggacattttgtgcataaaggttaggggtgcaactatggttgatgaattttgcaaagttgcccatctttgaagcatcaacagcaaagccagcttcctcatctttatcaggacccttctgaagtgagggtatggatcttgataggccctcccaaagggcttcatcataataattatgaccaatagcgaataagtattcatcggtcgaccttttctgtgcctcttcatcctccaacacttctccaatgtattcacatacaaagcttccagatggtatgaagtcaagagttcttactccccagcccatcaatttggttttgaagacttgcaaacgaaacctaaggccatgttgaccaactctgttatgacatgtaggagggcacttgcatgaaggtccacactcataaacaagaggttttgcttctaagatgcggcctttatcattgaaaggaatctccccaccatttttcactgcacatgcacaccttttagaatctgagcatccaccaacacaaccacagcctgctggaggtgctggctggtagttacgggggtactgcaggtgtgcaatgtagcgatagggcattgggtactcatcagatattgaattaacaacagatacagggatcttctccaatcctcgggatatatcttttatgataataccaccatatgattcagcttgtcctgaattcagaatgtcttggatgtcaatgtgtttctgacctgccattcttctcagtcggaacatataaacataacgatcattaccctctttctccctccagtatttctcgactatatataaacccccatatatataagtagggatcttctttcgctggcagtttccattgaggtgagtgacgaaaccatggataacacggactggtgtgttagtgtccatactcttcttgagtgctaagttggtaccctctatcttctgattggctatagctgtcattgctccagaatacaccaagacatccaaattattcttaatatcggaagattgtgcatatgatacaatgctaacagctatgcaagtcccatcctcctgtttgatatgatctacacccacccggtgtgggcgatgaagaccaacaacacaaagctctaccctcaagtggaagatatcaccaactttgattccaggcacattgccaatatatttcttctcatcgcagtctgtgatgaaccgctccctgaaaattctgtaagcttgtagatcaggtctaatcactgcttctgtcgacttctcttcttcttcatccaaaaggtccctgtaaattaagcgaaaattctgcagagatcccataatgttttccctagcgaggacaactccattctttggcatcccttgactaggaccatccatgccagttttgctcttcttatatggagttgatgtttccttctcacctttcactgagaaatcacgcatggccgagactctaacaccagaatgagcactcgcataacaccggacagaacttcttgttgctggagtgcacggtgtcgaagagtcttgggctctgtagaattgagtaccagagggccctgaagattcactatcggagcagaaagctttcgagaacgaccgcttgaacccaacctggaacctccatggaagtactaccttccgccccttacgattcgtttcgtcgccattgttgccaggacatgctaagttgctacttttggctgcagcattacactcatcggcacctccattgccactgtcatttccctttttcaccttcggcgcgcaatccgcggcagaagaaccattgctattatttacacaaggcttcttcaaaccctcagaaacgcattccccatctcttgcatcgctgccgctctcaagatgcacatcagcatctccgacgatgccatcggggttggacttctccaaaccacaatcttcggcagctgccgttccaacgccaccgcccctgccattcctcaaaccctcaaatccggagccctccgccgcgacgccggatttgcccgaaccgccgtcgtctccggcaacacggggaccgccctcctccacgctccgcgcatcaccagagcccttcgcgctcgcgctgcgggtgcatctcctcgattgaggatctccccggcctccactggacccgacgccttcccccgacgcccccaacccgcgacccttgccgccgggcgtgcccgcgacccctcctccggcaacggcggcggcggcggcagggggcttgaccggaggcggcctgacgaagcccggctggaagcgccacggcacgagccccttgtacctccgcgggccggccgccctcggcggcaccaccacctccgggatccccatccaacgccccccgcactgcccccaccaccaccagaagcctctaaccctgcacgcggagatgacgctccacggaggcagcggggagggggcgcggcggaatggggccaggtgggtggggtgggggctgtcctacaatggtggatcgggga

SEQ ID NO: 4539 - DNA, 13357 bp, Oryza sativa
taagaagaaacaatacagttgaaggttagaaaaaacatgcttacctattattatgcaccatatctgatctttgttgaaaatttcatctagtacaaattatataaggcaaaaattagaggtgaagcatgataaataaaaataatctaactaccttaattcagttacagttagaaataacaaaagttacagctgtaactacagtgcatatggactgtaactggaatcatgcttaactttctcctaaaattcaatagcatcagcattattccatattgtaacatgttataaaatgacccaaaacatgcaggatgtcatagattgcaggctcaagttacagggaatacacaatcaaagacatgtgtaagtgacataatcgactccaaagaattaagaagcaagaagacaattcaaggtcagaaaatcatgcttacctgtcattggcaccatatatgatatttgtagaaattttcatctagcacaaatttatatacattaaaaattagaggtgaagcatgataaataaaaataatctaactacctgcattcagttacagtgagaaataataaaagttacaactgtaactacagtgtatatggactgtaactggactataaggggaatacattaagcaaaatcaacatcatatgaagaattagaggctaaggataatgcagtagtatgtgaaagcaaaactaatagagtgggacttattcagattcaaaaatataaatcaagcagtatttagcctcaaaaatggtgtcaaaacaataaaaaaagcctttcattttgtcaacatcatatgatttttttttgcaaaactcaaattttgactaatgatgctttcattttcagttctaggatctcattacctccaggattttggaaaaaggcaaaaaatcagcaacaattggatcagagattggcaaaaataaagcacaaatactttatgatcaatacacatttcttaacgaaaatgaaagactggtaagtacaatcatgttttccaaaaatgaagaatatatttatttctttgtcgaataaatgtaaacaggtgaaggggggacaaatgagctatactaacctcatgcaacacataattctaagtccacgtgtcagcttgcaagcaaatgaagtatcggaggtgtacaacttgggaattttcaaaaagtaaataacaatttctgcaagcatcggaggtgtacaacttgggaattttcaaaaagtttcaagatgaattaatggagacattaaatcttgaaatgtcagctatacaacatggaaagacatacaaggtatatgcagctgcaaatctaatatactgctggttcacaaaccagacagaaaaatgttttcacatttacttttactatgcagattatattgctatatatagactatgcactgttcagcattcagtacagttaaagatttgtctcatttcatgctctccccaaagaagaaacacaaaacaactctaataaaacatgcactaaatcagaaatgtcaattaagaaccatacagtccatccaaagtcagaagctagctctgcctcatttcattggcagagaagaaagtacacaacatgtacccaagaaaagggggtacgcactgaaaaagcatccagatttttaacttgaaagaacatcaaattcagcaaaaaaaaaaaatgaagccaagactccccactctagcccagagacaaaattcaaagcaccagccttaaattcctgaaagcatcatacaagttctactatccttgttcaagcaaaacaaattctgaaccaaagaacaacatatacacagaaagagcaacaaaccaagaatcaaggcaaaacgcatgcaggggattggatttcatttaaccaaacaactcagcatactgggaaatcaagccgcacatatctgaaaagaagcgattcataagatgaagaaggcaacacaaaacatacttggggatgagttaacatgcatatgtgaaacgaaattcttcatatgcataaaaattcagatatacgcagggagttgacagatcaatcatctctgaaatgaaaatgcttcacatgcagaaaaattcaaacacatgcaaggcgtttaacagatcagtcaactaaatatctgaaaatgaatgcaacattcagataaagttgcagcgatgcttcccctactgtattcaaatgacacatatcagcaatataatgttgtcataattaattccccctaccaatcctactggggtggagctaggaaatccccatctaccagccacaaatccaagatcagtgacaagccaaaaaaaaaatcaccgattcgctgtgcgctaaccccacatcacacaaagcacaaaatatacactgatctgctgcaagtgatttgcagatttgtgcatagtaggagttctactccagcagaaacaaaacacagacaactacatgatactaacatacaaaaagaacacaatgagaggccagaaaatactggattttatagtggcttgttgctaactaatttggatcagcaccactgaacaatattgggatgcattcataattgaaaagaaaaataaggcactgagcaaacctgaaaaagtattgatacagttattatatgctcataataagatcaggaacacacagggaaattggcaagatgccatgccagatttacttggcatcattaagaaatatgaaacacacatggtatataccattaaccatgtaggtgcatcattcaaaactatggaaacagagctaagcttatgtgtgaaaaaagcaccccttggaaaataacctcttctcctaatcagaaccatagatgtctgccaaaaaaacatagctaagcttatgcgttgaatgtggcatcttcttcctacttttccaagcatagacacataaaaaagctgtacagagaagcaaatcaatgattacacaaatttataactgaagttgcacagatttgaaaatgcaactacaacaaccagggagtgcaatacgtcgccgaatgtatatgcagtttacacaaaacaaatgcaagcccagtccagtcctgaaaaatatggtgtgctagtacgaagcatcatttgctatccgtcggtactcaggcatgtgctgggtgaaagtgaaccaagaaacacagagaaacatttcagaaagcagagttgtctctcttcgcctcccatgcaaaattttgaacaagcaaataatctatagaaatatagcagtgtcactgtcttcagtcagggagttcatttcgtgatctctgagccaaataagatcgctgaaacctttcaaaacatctctctctctctctctctctctctctctctctctctctctctctctctctctctcatttgacaagtacacagttcatcactaaatctgctgcttgcatatcacatatacagaaggagttgtgcatgttaagaacagaaggaaataacaaaatcccctgtacaggacagaacagaacagaggggaaaaatcctagcaaacctgtaaatctgctaaaaggatgtccaatttactccgaaaaatgcaaatcaaacacaaaaaaaatccctatctaccagccacaaatccgagctcagtgacaaggcaaaaaaaaaaaaatccagccatcgtttccaccgatgcctagttcgttggttacgatttagtctaatcccaaatcacacaaagcagaaaattgatatgctgataatctcatccatgtactctatctgggcaatccctctcaatctttcatctcatgaacacagaaggaaaaggtactgtgaaagttcacctgcaaaaaaaacagaaataacctagaaaatttcaaatagtgtgtcgctttacctataaataaacagatcagagcactgctcacctagaacttaacaaaataaaaaagcaacagctaggcagttccctaataattatttgaacatataaatctcatcggcatgacatagaaatcaacagatcagggcactaatcacctagaacatataaatctgatcaacaatacatagaaatcacggatccactgaaactaaaacgaaaacgaaatcgactcaggaccaagcttcgaaaccttgaccgattcaaatcgagaaaactaaccaaaaaaccgttgaaaaaatttcaccagtgggaactacaaacgaagattggactcaccggttgaatccagggggagaaaatcgatccaaacgatggatctctctccctctcgctggagagaatgagagagagaacaagaaagcgagagtgaacgaaagagagagcgcgcgcggagacaacgaggagaaagcgataagtaagaaaaaaaaaacggctacggacatggcgtggaaatcgaaatttaacagcgccacgagaccgaggagaccaggttttgactcccacgcgtcctgatccaaaccaaaccgtgcacgcatcttaaagtatatcggactaccaaaaaaaacgacaaatatcgggagaagaaatttaatgacaaatatctagcaaaatcgtttttttttctttccctattctatcaatatattccagcactgtctaatactagcgtcttctccgacgacgaaaaaaggtggtagcaccaccagatagagggttggccggcgctacggtgggctggtggtggccatgatggggtggagatggcgccaccttggccatgagataaaaggggacggacggtgtgggactgtgggtggcaagagaagcttgttgttggctgaaattcaacccaaaactactgaaattgcaccttagtaccttacatttaccttacttaaaaggtggtttcttgacgaaacgtaaattacaggtagcgcatttttcttatataatgcaggcagtacatttttgctgctttatactagcaactgcaaatcttgttcttattcactaagcgatataagtctatatttattctcatcagtagtctcttgggctaaatgcactcactttgaactccacaaaagcgatcaccaattccttcccaccaaattttcacttctttagaccgaggaaggttaagacgaatccgacgtaattgtaacggtagagctgtcgcatcatggagatcttgctgtcatcccacggcgggtacctggccgtcagctcgataaggtatcctctcgtcagaaccgccttcttgtggctgaacatctcgaaggagtacttgccgtggtactgcccgaatccgctctcgccgacgccgccgaacggcagcgaatcgatcccgtactgcagaggattgccacaagaaaagatgacatcaaataactctgtagtacgtactggatctgcaattcctatgttcttgtttggatgggctcagtttggcccatataaactgatgggccgagattgaagcccatcaagcaaggcctgggtggggtaaggcgtgtgtgcatacttgtacaactgcgtcgttgaacgtaacgctccccgacgacgtctcctcgacgattcggcgcctcagtgcggcgtttttggtgaacgcgtagacggcgagcggcctcggccgcgctctcacgaaggcgatgctgtcctctatcttcttcacctgtgagaaaggtagccgtttcatttgatctgtctagtggtactccgctctgcatagaggaggatgttaagaactttttaatttaccgtgatgatgggcaggagagggccgaaaatctcctctgtcatgatcgcggagtcgagtgggggattcagcagaatcgtgggctcgatgcacctgaaattttttcgtgagttggtcaactttgggttgtcttaccgacagattgatcaacgacacgcagttttgttcagaatttacaggttcttggcgtccaatgtgcccccgtggaggacggacgccgcgaccgatttgtccttgagaaggtcactcagccgctggaagtgcctcgcgttgacgatccgcgccatgtggtccgagtcggcgaagaacttcttcagcgtcgacttgagcgccttgatcttcggacgagaccgacacgtgcacgccgcgagacagacacacaaacgtcaggcacaaatgcgactcgggtagcaaagcagaggaggcgtgacgtgaggtgaaaacgcaccaggacgggcacgaagcgctcctcgacgaggacgtagtcgatggccaggcaggcctggccggcgcaggacgaccacttgcccccgacgacgcggttcaccgcggtctgcaggtcccgcgcgctgccgccgatcgtgtcgaagatgcaggggcacttcccgccgagctcaagcgccacgggcgtcaggtgcttcgcggccgcggccatcacgacgcgcgcgatgcgcgggctccctgcaatgccgcgcgcgacagaaacccaacacatatcaacggcgtttcagccgggggacccaaaagctaccagtgtgtcctccatggaccatggttatattaccggtgaaaaggaccttgtcccatctgtgttccatgagctgctcgccaacctccggcccgccctggatgaccttcacggccgtggcgtccatgtatttgccgacgttgtcgccgaggaacttagcggtggccggcgccagctccgatggcttcagcgcgaccgcattgccggccgccaatgctccaacgagaggctccagagagaggcctgcatgcatagagcacacaaagtcgttgcctgattagttgatacagtacccaaaagtagccagtcagtgtactacccttgtccctcatggcctcgtgggcacccacccttgcgtctctactctctggattattacatgcatgcatgtgcaaaggctgtggattgtggtagccagagtgacatccacaggcgcagaccgcgcgcagatgaacggtcagtcatttacgtttttcacaatttcactgcctgtgaaaattctgactgctgtatcacatgctagctagtactatcaccgtcccaaaataagtgcagctatagatattcgtgcccaacgtttaaccatctgtcttatttgaaaaatttgtgaaaaatttaaaaatatttagtcacacataaagtattattcatgttttatcatctaatagcaataaaaatactaatcataaaaaaaatttaaataagacgaacggtcaaacgttaaacgtgaataataaaaaactgcacttattttaagacggagggagtacgtcgcttggtttatgctgaggcgagcatagcaggggtacacatgctaatacgctgtttttgcaaaaaagaaaaaaaaagtagaaagtccaaattacccttttgagcacacagtgaaataagtatgttgctatagtaaaaaaaacagtgatttgcagtttttactgtagaaagtcacggtactgttaacctctgactttaacacctaaagtcaggatctcaatccgtacgaattacctctctcaattaaaaaaacaaacatattttttcaccctcaacttgttacactgaacgaaggccaactccaaagcagtttcagtcctacgtggcacacacatggaagtccaatcagcataaaaaatatataaacaaatatggggcccacttgtcagttatgcttctcttggtcagtacatgtggtccctatctttttaatgtatttttatgatgactggactgccacatgtgtcatgtaggacctaaaccactttggagtctattcgagggataattcgtctggtattaaaaattgaggacgatgaagaatgtctagttttttaattgagggaggtaattcgtagtactacaattttttttttggggggagggaggggtattcggattttttcagaaagaaacatgctgaacattgggtttgacgactgaagcaatattctgagacaacgccccaagtataaactgattgccacccaaaagaaaagtactttagttccaactatcaagcgtcaaactagctaccaaaagaaacagtggtagctctgtgtatgttgagtttttctgggacggagagatatattcgtctgaagtactactacgaataatcaaagtttgcatgttagcaactggccctactagcaacaggataccatagcacagctattcgctgttacttaaactcaaaagctgtattgaatccgacaattcaaggactatcgtaagctaatcatgtgcactgagctatggtactagtacaccctttgagctgaaggagtgttggccagccagacaatcggtaggacgtaaatgagtgttgctatacgtccgatttcctcgtccgacccccatccaatccaaccttatctaccaatcgtttcgctccacgcagaccaacttctctctatgtgggcctctatgtgggccagagcagttacggagtagcagctaagtgctggtcggacataccagtcatatgtatagcgattttcgacgttaaataccctcacacaaacacaataaatcgaatagagccttctaatactccgtatatacgtttgctatatatatattgctattcttctatactcttgtactgctagcagcatgcatcgccgcatggcaggcagccatagctatatttgtcccgacaaagtataggtgaaaatttaatggaccgattcatcaatgcgagagtagcaccgttttcctgacaatgcttcacatgggcagccgcactctctgctaatgctcttgcttgaagaagggtaaacgaaggaaaaaaaatcgctgtgacctgtgagagattgatgatggtttgcttacccaacgggacattccagcaagagaagacgaggatgaccccgagcggctgcggctccagctgcgcccttgccgggaacgcgattagcggcacccagacctgcaaccagcgaggcgtcagaactcagaaccaggagaagcaaaccattcatgtaaaataatcgaacagtgcacactaaagcgtggtcagatcaggcttgccttctccggcgccatccatttcccgacctcacgcagcgcggcgttcgccgacttgacaagcacgccgatctaaaatcacacaaccattcgcatatatacaagttaaacggaatcatatcagcagatcgatcagttggcagtttggcacacgggaaatgccaaatgcatattcatcgccaactaatcaattaacctcgtctctgtaggcctcggcttggtgcttgccgaggtcctcgcggagcgcccggaacgcggcggcctcctcctccgccaagagccggaggagcccccggagctgcgactgcctccactccaggctccgcgtcctgccgctctcgtacgccgccctcagctcggccaccgtcccgctcacggtctcgccgggcccaagcgcgggcggcggctgctcgcccccgacctcctcgacgctaggcgccacccttcccatcctcctttcctcactctgcttcaccaacctcactgactcactccagtgtattgaaactttgcaagcagaaagttgaagaaagcctcgggccggcgaggccaatttatggcaactgacgtgcgcttgagcctatggcctacgctacgcatgaatgcatgatacgaattaaatgctggcaccagggcggttcagtagaattgacgtccattattgttgtaaactggtgcaaaggtgcatcattggtactactgccggttgctaggaccgaaaaagtgagcacatgccatgcgcccatgccacggagaaaacttgaggattttgccagggccagggcgatccatcgccgtccgggtgagtacgagggcgtgtgctcgtagcatggttgtgaattatattctaataatctaacctataattcaccaactacctcttacatccttcatactttattcatcaaatctaacggatgaaaatcatcgaatccaaccgctcctgttgccccacgtctcccccgcctccccttctcacaccccatcactcctgaaatcacggcgcatccaccctcctctctttctctctagctcttctctcctctctctctctcgcactcacccgacgtcgccccacccgcgcgtcaccgattccccatccacgatttctctcctctcccgcgccgcccctccgtcgtcgtcgcgtgaagtcctcgccgatcccccgcctccgtcgtgccgatccaagtcgcggcatcgtcaaacccctgttcccaggtcgccgtcactgatcccgcatctcctctgccccgttcttgccgatcccccgcctccgtcgcgccgtcacgtcgccgattccctctcctcgtcgggagcgccgccgggttcagtcgacgctgatccccaatttgttgtcgccgcctccttctcccctgattgaagtgttgtcaagtttctccgaggtgtttgtttttctgatggttaaagtgtagtacaaactgtgcaaataaaatcaatgttttcatcccgttcatttggtatccatgactaaaattttcatcccgttcatttggtatccatgactaaaaattattaggacttgatctagcctgagatagcaacgatcgattcattttttttcttttcaagttgtgctaatgtatgtatgttcagaattacatgccatttgggttcacatgtcattagagtagctggactttcattcatttatagttacaataattcctgttatcaattctccagtggtatatttgctgaaaatatatgaaacttatgaaacttgacacaaatctcacatcttaatagatcaaaatatatgtaatactactcaaataaacttttcctgaaggttttctattgtgctatatgtattatattttcagatattcacaacctattttatactgttgattactgataatatgggaagcattggtaagatgtacaggaatgatgattatagatatatggtacagcaaatttgtctatcaccaataccatgcaatttaatgattttgtgcagtccttgattaatgacatcttgaagtatatatacagttaggacaatgtcagattaaaatctaaatccatgcttacagttacttcacatctgaagtaagataaattatcctaggaattaaatccaagattttattggtattttggttcttaggattaggatttttgcatgaaaagagtactactagattgcagctaggtcaaggctctccctgaaacagccttttacatggacactgcatagtaaggtccagtgagttttatcatttcagacgtgtgcaactctctgttctttactccttgcccaaataaattgctctatataagatatccagttataagctctagaattttgaatttgatttttttttgctcatttttgcctactgcacgtggaatggatatcctgcttaatgaatactatcatgctgcaggatatcctgcttaatgaatactatcatgctgcacttttcctttttgttttggtgaatttagtactatgcagttggccttgatcaattcgtgctacttttgtttgcagttagtgaaactgagtttggttctttctattctattcagatacattgtttcatgcatgatcaatgactcaaatctcaatgaagataggcatattgctattccaggttggttatctgaatgtgcgcaggtttgcaatttgcatatcattggatgtatatggttgataacttgatatgggagtaattgggaaatctgtgataaggtatgaaccttcccttttgaagcatttctacagcaccattgaagtaccacatagtttttttggccatatttatttataaccatgcaaggaataataactcttcctgattagggctaatttttttttacaaaatctatgattaacagaattgttctaatttgaaacagagccctctggtttagagcttgatcagtgagttaaaaaaatggtagaatatgtgagtaccgaacatgttataatttgaagcgcactcctctgattgaaaacttttgaccagttaggtttgaactttgaattatgtctcatctttatgcatatactttctttcatttcaggtgagggtcattttatttagagattgatttgaaaaaattgtagtaataactctttctaattagggctaaattttgtataaaatatttgagtagaagaattgttctgacctaaaacggagtcctaacatgatatcagtgagagttacaaaatggttgtaatatctgtgagtacgaggatcgttctaatttggaactcaactcctctgatgacaactttaatcaggcagtgtgaattatgcatttcttgttctcatgaacaatatttgtttgaaaagtgaaagatcagaggtatgttttaccacggtggatgaacagaaagcccggtgaggatgacaaacatggagtgaagagggtatgatgtatgctgtggccagaagaagttgctcctatgatggaaattgtgagcaagacaggccctcgaatcctttttttttccctgatgaatctgtaatttggatatgctgctggaatcggttgaaatctatttgtaactccactttctcatttcccatcatatatgtatgcaatgctgaaagtgatgtgaagaggggaatagatagcgtgtagcctggcagactatggatcattggattgcatctatgttttcgttggtcttgcgggtttgagactttaagcttgagaatgtatttctatttttggatttgtctttctgtcatctcgatggatggatattgtgggtttttagttaacttttacctaactcattttatttatgaataaaaatgtaagtttaataacttattatttattcaaatgttatgggataaaatccttatttgtctctgaaggttgacatttaccgaatggtaccgtagcgtcagcgcacgggtaagttactagtgtgaacaattcgatgggaatacgggattgaccatgtgtcatcatctgcattactgcagggagaatcaacatacgtgtccgatctgcgttcgtcgtcttcaaggtgatgggtcgaatgcgcatgcttcagccgttcaccgccagggaatatgccgcgcgcgttctgatacgattcattttcttgtggacagatgagttctcaacgtataaaccttcgcccccctcaggccttccagtaggacgtaactacacagcgctaccacttcatctataaatctataagagcacaccatctacctatatttcaaatacaattttcttttaaactactcatccaatctacgatccgattgcaccgttgtattcgtaacaattaaatctttacaacaagatctcacatgattatattttgataaaaatcacaaattacttttatgatatgtctaaattacttttaaatatcactaagttacttcttagatatataaaagtaaattcagtaaaacctaaaagtaatttacat

SEQ ID NO: 4540 - DNA, 25478 bp, Oryza sativa
ttgtcattgagattttaaaaatcgaatatgattatcaatggggtttgttttttttacttactataagtcctggcaaccgccttactcatttgcttcgcggcctgcttgacgtccctccttcacggcaattgtgttttattaacaatttttatatgtcgtatcaatcgccaccactctactcttttataggcatgttacttaacttatctcgtcatgtgttttagatggtcttttctttcaataatctttatttttatcaaaaaattgagttacttataaattgtattcctaattgaaatcttatttttctttttctaatttcagaaattttttaaaaaaattagttaataccgtattgtgttcttttaatgttttaatttcggattttattttatttttatttcgaattttgatcaatctcatattgggttcttatatggaaccttctttcaatattgcttatttttaattccgaatttcagctatttttaaattgtatttctaattggactctattttcttttctaattttagattttattttatttttatttcgaatttgtattaatctcgtattgggttcttatatggaaacttctttcaatattgcttatttttaattccgaatttcagctatttttaaattgtatttctaattggactctattttcttttctaattttagattttattttatttttatttcgaatttgtattaatctcgtattgggttcttatatggaaacttctttcaatattacttatgtttaattccgaatttcagctatttttaaattgtattcctacttggactatcctttccttttctaattttagattgtattttatttttatttcgaattttgattaatctcgtattgggtttttatatggactcttcttttaatattcattgtgattctaaaaatcgaacataactatcgttggaattcattttttattttctagaagtcccgtcaaccgtcggtggctctgcaactatactcttatgcaccccgcgcgctgcttctcctttttattgtcattgagattttaaaaatcgaatattactatcaatggttttttttttactttctagaagtcccggcaaccgccttacttgtttgtttcacggtctgcctaacgtccctcaatttaatcgtcattaggattctatttgttgttttattaacaatttttatatgtcgtatcaactatcaaccgccaccactctactcctgccaccactctactcctttataggcttgttacttaatttatctcgtcatgtgttttagatggtcttttctttcaatagtctttatttttatcacaaattttagttatttataaattgtattcctaattgaaatcttatttttctttttctaatttcagaatttattttttaaaaaaattagttaataccgtgttatgttcttttaatgtttttattttttattttcaatttcagttgtttcaacattgtattcctacttgaactctcttttaatttttctaattttggatattattttattttttattcaaaattttaattaatctcgtattgggttcttatatggattcttctttcaatattgcttatttttaattcagaatttaagctaattttaaattgtattcctacttgaactcttcttttattttcttttgctaattttggatttatttttatttttattctaaattttaattaatctcgtattgggtttttatatggactcttcttttaatattccttatttttaattccgaattccagctatttttaaattgtatttctacttggactctcctttccttttataattttgtattttattttacttttatttcgaattttgattaatctcgtattgggttcttatatggaaacttctttcaatattactttttttaattccaaatttcagctatttttaaattatattcctacttggactctcctttccttttctaattttgtattttattttacttttatttcgaattttgattaatctcgtattgggttcttatatagaaacttctttcaatattactttttttaattctgaatttcagctatttttaaattgtattcctaccttgactctcctttcctttttctaattttagattgtattttatttttattttgaattttggttaatctcgtattgggttcttatatggaaacttctttcaatattgcttatttttaattccgaatttcagctatttttagattatacttctacttagactctccttttctttttttttctttttctccgattaatgtgggaatttttagcccccacagcgaacgtggtacctcattttcaagctgtcttaataatataatagatagatgctgcagctttgctgtaacctctagaattgtgttttttttttgaataaattttaaacgtcgtaggacggaacgaatattattttctcatttatgtgtgatatcgcctgttgatatggtatctttccgagataactgtaggtgtggtgtggcatatagcatgccaggttatcttgaagttgaaatgtttttttcccctcaacaatgttaaagttctaaacagtctaattaacttaaaaaaaatgttatttaaattgttcatggagcacaattgatttatttagccatgagcacaactgatgtcacactgaaatatgtcaatacaactatagaagatcacttctattttggtttgaaaagtcacttcctttaacacatagtgatgatatacaaaacagtacgcacacaatacgtccttttttcagctttgtcttaacacctgaccatgcaaatttagctatctcgaaccatttacaatccaaagctgaatctttctacggattgctttgtaaagcaccttctttcgaagagaaaattgttgcagtctagtctgaaacaattgcagcccactgcgattaattgcttcataaccaatggagtactagttttcttctctagggaaaacgtagaacttcagaaccttgaacctcacgtcgacactgatctaaggtggtgtttacatccagggacttaacttaagtccctgtctttagacactaatttagagtattaaatatatactacttacaaaactaattacataaataaaagctaattcacgagacaaattttttaagcctaattaatctataattagagaatgtttactgtagcatcacataggctaatcatggattaattaggctcattagattcgtctcgcaaattagtccaagattatggatgggttttattaatagtctacgtttaatatttataattaattttcaaacatccgatgtgataggaacttaaaagttttagtcccatctaaacagggcctaatactaacaaattttttaagataatggaataaaatttcagcctatgcttaactagccatagcccaaaatactaacaaatagtactagccatcgaaacattaccccctacaatcccgagcttagcaagaaatccccaaccttttttcatacggatcatcagtaatccagtacaacacgaagcaggttgctgatgtgtggcggcagcgagagaaacctccaaaggttcatatcctttttcacaggtcgaggaagccggtggtgcgccacaccgcgttgcgcacgcgccggaggtcgcgccctttcagcgtccgcccggcgccctccatcaccgacgccgccgccgcggcgcggcgcgcggccatctcgtgcggcggcaccacgagctcgtcgtcatcgtcctcctcgtcgttgagggcctcgtgctgcacaccacggcgacgcctgtcgctgtccgtggccttgggccaggccggcacggcgaccggcgccgactggtggtacggctgcgggggctgctgcctctccgggcgtgccttggccgggatggacgccgtgggggcgtgatcgtcggcgaggagggcggacaggccgacgctgccggcggcggggaaggcgtgggacgacgacagcggccggcggacgcccacgcccgcggacgcggacggggtgagggacggcgaggaattggttgaggaggcccacgaggagggcgaggtgttcgacgacgacgacgacgaccagacgacgtcgcgctcgtcgagctccagctcgtggtcgccgctgccgtcgtcgggctgcttgaggaggccgaggaagcggagcgacggggacgtggcggcgccggagcggcgatcgggcttggacatggccggggagcctcggcgctcactcgctcagctgccgctgccgcagcgcctgtgccgctgtgtggtggctactgaccagcgcgtcgtgggttttttttagcctttgggcgcgctgctattattggcgggctagtggcggtcgcgatgtgggcggggggaggtgaattattgtggggatgatggcaaccgagcccgagcggggtcgccatgtgttggcgactccgtgtcgtgtgctcgccgcgcgagggatcgcgtcgtgacacggccgtgccgagcggcgcctgaaatccaccagccttttccgaagcctctgcgcctggaatctggaatcattcctcgtaaaatcgtcgcccagaaaaaaaagcagcgaagcttttcgttgacaggtgcgtgcgagcagaacttcggagttcagaagcagtaatatcgactgtatatgcgtacagatacactcgtttacagatgaaccgatcagcatgtcatcatcagcaaggaagtggacagacttggtttaaaatggggttacagataaacaatcggatctcgctagcatcactagcggatgtgcgttccccttgatccaatggttatagaagcacgaatcacggaaacgattgacagggcacctaccacccccaccgtccctattccctgcacttactccctccgtcctaaaaaaaaaaaacaaacccagtttccgtgtacaacgtttgatcgtccatcttatttaaaaaaattattaaaaaaattaaaaagacaagtcacgtataaaatattaatcatattttatcatctaacaacaatgaaaatacgaattataaaaaaacttcatataagacggacagttaaagttggacacagaaactcagggtaagttggacacggaaacccagggtttgccttttttttttggacggagggagtaggtttttctttgttgaggatgaggaaaaaaaaaacgaggggtgcgatcaatcaagcttgacacggggaaaaagaaagcttggatatattattagccggtgaggccgcttgtgtaagacgtcagtctgtctgttcgtttcgtttcgttttcagtattcactcgttgccaacttgccttccgagcccaaattagctgaatctgctgcttatttcttggacgtgcagagaccttcgaggtttatgcaggctcagacctctcgagatttcacagttttttcaagtgcacgtgtggcagaaggatggaagccttggagaatgctgcttgggaggtaaaggcgcttatcattttggttttgcaaagatggggattggtgaacactgaacagaacgacaaagactggcaaggttatttgtttgaccacctctttaagactttaaccatcgggaagaaaattacgtactaactttctgtattgttggcaaaacaaaaggacctgtcaggctcttacagaaaaataacagttctgtgatcggcataactcacagggcactacgcaagtatctgcaaggaaccaaactatgaacgtaccaccgaggcatctcatatactctccactagtaggactagtaaaactgaagataagagtagtacactatcggcagaactaccaatgtacagcaatgataaatgaaggggccaaatgaaatgagaattgagaagatacccaatacacttccagatcgggcaaggcattagcaatttcaatcaagtaagaatttacattctaatgatgttgtggtcccatagaagatcccaaggggcaagggcattgcactagcattgttagctgttacacttacatctcatgagttctgacatcagttcacgaaacaccagaattgtgcataaaatagcttctatcaactaatctcagaacaataccatcaaaataagttggaaggagaaacgacagaaacacacaacctgtagaaataggttcaggtggtggaagtatcatgagatcgccatctttcttgcttaaaattccgatcacgctcaatcgcataccttcagcgatatacctacaggttttgcattcacattttaagtttccaaagatgcaatatgcaaagatgctggcaaaatgtatatctattatcgagcaatttgattacccttcttcgagacggataagctgacattcttcagaaggaatatttctttcatccagccaacacctcaaggttgaagataactcagtgttcccgcttgtcgtaaccagaagattttcatcgatcaagggaactactctcgagtcgtgcccagctttcaccaaggctcttttacctgattttgcatccgttatgtagaaatcagcagcaaacctctgcccaactccacaaaatatttgaataagacaaacatcacactatctatggcatcttactgcctttataatgaactcaattttacagcaacagatacaatgacattagagaaattaaaagactactaaataaacaactcagacataacgcagatgagcaacagttttaaaattgtgaaaaatgggtaatgtctactcgttgatctacttatgaaatgtattgttttttttgttccattgtactatgcagtcaagatctctcgaactttacatacaactgagaaacggtattatgaatttccaatttatcaccaatattgcacaagtggaactggaactgaaacaataggttattactaattgtgtacaataataatgcaagctagtttatgaaatagtaatgcttttgtaatcatcataaaaaacaaacacactagtattacagttggattgaattgggctagcttgagtcatgataaacaaaaaggtgaaacaataattaaaaaaacaaaattttaatgacataaggtgcaagataaatgaaaatacccatgtgttctgtagactccaccacacatacactagaagcccttgagatagcaacaaagcatccttacctcagcgtgtgtcaatttccacttggaacagcggttcttaggattagctacttcagaaccccatcttccacattttcgcaataatgtagatgtatatacacaattctctactttctcgtatgaagaaatcagtgaaatatcaccgcacgcaacaagctgcataaaacaaggggcatcaccacacatgcaagaataacacattatctgattttttttaaacaatgcaagaataacatgctgaaaactgaacacaactaaaaagaatattttttgtaacaagagtagaacataatgaaaaacaataaatgtactgtaataggaaaatgtggaaaaaaacacaaatcaatgcatcacagcatacactccctaaggtaaaaggcacaaaatttccccttcagactagaagatacattcaatgtactaccagtacaaagttgagaaaggaaacaaagaaactgcccttgactggttcgatatggccagtgaacctactgcatacaaatctggacattgctgtgcttgctccccattgcacgattatggaatccataatttggcgcatcctatttacactgaactacgtgaccaccaaaaaacgaagaacactcaaggtgcaaacaaaccccactatgaaacaatgcaagtgtatccggtccacaattccacaagttacatgaaagcactatatgatgtagaattacggcaccaaatgcattattctccatgcatctagtggctccaccaaaatgctccttatcaattcagcaattcagaattcagagacttaaagacggaataaaatagacttattggatcaatagcagcacattcatggcaaaagaaagataatgcttttgcaaatgggcaaacatacaccggtgatcttgacgagctggtcgtcggtggcggagcggaggctggacgcgggcagcccgtccacgaaccgccgcagggcgcgccccgacgcggaagccgcggcattccacaggaggaacgcgacgacggccgcggagaggagcacggccaccacgagcagtgcggcgctgtgcacgacggcgaggacgagcgcgccgaggccgagccccaccgcgagcagcgccgcgaccgcccaaaccgccgccctcgggaacggcgccagcgcggggagcccccccgcatccccggcggtggcgcataggtcgttcagcgaggccgcggtcgcggcggcctcctcgtcggcggtggcgccgcggtgcttgccgccgtcctcgcctcccggaagcataatcagctcgcgccgctgctggggtgggcgtctcggggtcggggggtttcagtttactcctctttcttttttcctttttttcttctattggacctttttgtcctcaactcggtatggtgggtttggtttttggcgtgcggtttaaggaaaccaacgtggagcgcatcggcaactctactttagcgtgacatgtgggaccataacaaatctggcccgcatgtcagtgacacagacaaggctgtggggggtgagctgtggagtacacggcgtagttatcctcctctcgcttttggagcaaaaaggagtactagcaatatgacatgtggggcccgggcaacctgtaccgatgtcagcgagagcccgtggtgcgatgcctcgtgcgtcggagaacgtggaccacgggatcagggcattgcgtgctcacatgagctgctcctcatcactgggttgtgagtgactgacactgaagcggttggcgttgtactcgcacaatttgtgtccctggctagtggggcccggttcatgtgcttaccgatcatgtgtacttgatctagtactagtactcctagtaccgagtgatctgtactagtactatgcacaagtatggttgggggcaaatggtatagtagtacaggaggagctaagcagaagaattaagaaactgacacagccttaacctacgttttgggtggattagttaacagtaatctcatgacctcatccgacgagcggttttgagccgttgcgagaagaggaagcaaacagtcacatgcctaatcttttcgatactctcaagtttgaatcgccacttgccccgagactgacggtggtgcagactgcagcgacctgctctgcatcacaccactcgtatacatggaggcgctactgcgctagtggtgctagctagcgctgcgctgggccccctggatccgatctgcaatctgatccattcaattgtactcgccgtactctccctctcggtcaatgctactgtagtatcgtactcttgtggccagccgctggcgtccgtggtactgtacctcgactggttgacggaagcggcgtgatgccgtgcgtagaccaacgcgccatgtttcactgtgctctccgtatactgttcacaatgccccacgcagaaagccacacccgtgaccgctccgggtgcgtccggtggtccggcggaatttcgaggggaaaccgagccgagcgctgcgccgtgccggcgtacatgcgtgtcggcgagcgggggcacgcgaggcccagcaacgggtagtggcgagatgggcctcccactcggccgctcctcgaacggccaatactgggctagagaaaggctcatctgtaacagcccacacacggaccactcaccctagccgagttaattagaggaataagttcactctgactcccttacaggatttgagatccgtgagtattcactcgagtcccgctcagtgagagattgaaaggttctgtacatctctttagcttacgttggcgacaagtaagccagccgggagggcttagtacgtgatgtcaatgatttcatgcttacttgtaactgcagactgctcatctttagttccttcccaattgctatatacaatatgctctggtcaatcgaccggtactagataatgacttgctcctacaaagtttacacacaccacccccacctcaagagaaagcaaaggctttgcccggtcctcagtatcctcgcgcctacgctggcagagaattgacacttaccaaccaacctcgtcttttcggccacgcgcggacaccttatcacattaacaacaacgggatcgatcgatcgcgccgatctttagctaggtggccaccgccgcattgccggcgatcgataagatggccagatgggaggatggaagagacggcgccacacgacgtcgcgctcctcctcgtactcgcgctacgcgctgtcccgtctcgtcgcggcagctagcgcatcgtctcgccacgccacgcacaccggtatacccgatcggtgtggatggagctagagtaccaattaccaaagctctttcgtttggtccctgtcacgtactgcagttgcagggccagctcatgcatgtgcacgcttcgcgcccctagccagggtagctgctatctgcaactctctctccgctaaagcggcacactgctgatcgattgtaatttgatggtgattgctgaagctttttgccacaggcaaggaccaggcactgtgcaagctggatatacaagattctttacttcgcgcgaacgcaagtttgccatagcaaagctttcagtggcattaagctgaaggtcgctaagacggccggggacaatgcaaagaagtatgagtgcgattgcgaaagcaaacggtatgttacacgcggcatatgcaaccggctcgggtcaatggggaaaaaaacgatgatccatgagtccagttacgcactgtgtgatcagatacagacatggaccataaagcagtgcaatgatcgaatcgttagccacattatccttgcaaagtggtgtttgggcggttaacccaacggaaggtcgcccagctctttctctgtttttttgagagattgggaggcccagcttttcgttgcgcctttccggtgtttctagaagatttcacacggcctgaagctggagctccaagacaccgttggttttaaattggggttttaatcagctcccaaagtcgcagctttagccgtgttggactccttttgatctccttcttttgagcaggtcgccatcaggtgtaaaaagcacttttttgggtgaaatcggagatcagagatcaaaggataaagttgcccccccaatagcataaaaaatcggtctgttggtttgtcaattgtcaagctcgaattggtgtacaaaaaattctgaactagtcgttctctgtcgatcaaaacagtgctaaacaaatgtgtgcaacctctctttcacgtacattgccgtataatatttccgaaacggtgtacagatatacaagtggaataattttaaattccaaagagcttttgattggggataaccagttcgtcatggtttgtctgaagatctctctgataactaacgatttgattggataccttagtttttccacgtagtcgtagaagcagtggtttagacgtcatatgtattgagattcttctctaacaggtccaataccaaagcaaataagcaatgcccaccaatgattatttagaaaactggagtataacaatgaccttgcctgttgctttgactataatgatcatttctaataatgatcctttcaattctcctactaacctacgcatttaaagaaactaatctgtatcgcaccaaacagttaactaaccataagtgatcatcaattctctgagtctctgacccatcattggtcacgcatgttgaatgcgtgaatggagaacagcaatccagacagggaaaaagaataaaacaaaccaattaagcaccaacatataggccctgactagtcccaatatcaaattaatttccaacataaaccagcaggacttgtccaattcagagctagtcaggtttcttcataaataagcatacatccagccatatgatctgcacaagcccgtatttaccaatttaaagaaaaggcaagttcctttatccaaaaataaacaaaccactactgccaaaaatacttgtgctatcctacgcgtccacgagataaactccattttagaattctcaggaatatctgtccggcaaaaatcgttttacgtttcaatcatgacacagtacgggaggactggaggacccgtttcggccacacattcgagccaccgggccacggctcgagaactttctcctcgctgcctcactctcctgaattcctgatccgtgacgtgcaggcaggcaggtccagaagtactcatactgctgctgctagctatcgatcgatcgatcgatggatgtatccatccctttgggatttctcactcttttatttttcatgcattgtgcctgcacagtagcggccaattcgcaaagcggcaaagggggacaaaaaagtcgacattgccaagcagtcgaatgtttgctaggctccaaagcgaaaagccctggcacgtattcatctcctgttgatagtatagcaacgagacgacaacgacctgccgactactgggtgtagaacaacggcgtcctcttttccttgacgtgtagtgtcgtctcatcgcaagcgttccggacagatcacgcgctgtattatcaaccgtggactgaatgcaaacccagggaggatttgtttttcattcgctgagaactctgggtcagtttgttaaattttggcagggtagaaatgagaagatatttgattggtgttagaattataatggtaagagaaagtcctcgagtcttatcggctatcaccataagttgatgtatattattagtcggtccgggtttgagaatcattcattgcttaatactattgatatgatagtctctccattcatatcttcctttttgaaaacgtgctagtaaaagatcaatatatttgcaatgcctaaactttagcggagtaaattttccatgtaacgttttgggtttgctatcatacaaaaattgttgctttagccctactatcagaacatcgaagttttagctagggagcactataaatagataccatcttttttaaatagtaagcagtctctgactttgcataccagaaatgagaaccaaagttgtactaaaattatactgttctttttttatttgttccatcattatacatccttttattcaataaaaaaactactgcatgtgtgccgaatggcaaagccgaggatataaatcatttccatttatctaagtgagaattatgtgtttggtactccacaagaattttaaaatgtgttttaaactacatgtttggatataataatttctattgtctgagtgggaatgcataatagttgtaaaatgtgtttggttctccacaagcgtttctatatatgtattcattcactcatgtgagtgagaataatggctgcatgctactccctccgtttcacaatataagtcattctagcatttcccatattcatattgatgctaatgaatctagatagatatatatgtttagattcattagcatcaatataaatatggtaaatgctagaatgacttatattgtgaaacggagtaagtaagtagcactgaaaaactgtgagatatatcgaattacgacttgtgatcctatatatgccttgtcctgagtcaatgcctatctaagattgacggtgaacatcttggaactctccgcgtcaatcttagatgaataaaaggctacaaattccaaaattaattaaaaatttccatatctatatctatatctatactattataaaaattgaagatgtttttgctggtattttggtacgtcgtccgtgtttaagtcagtttttaagattgttcgtttttggaaatacatatccgtgtttgagttggatttcaagctcatttgcttttggaaatagaaaatgagttgtataagaaatctctttttagaaaactccgcatgctaacttgagatgaaagtctgactcctagctgtagctcatgattttctaaaaaaaaatcccaagcgatatcccacagtaaattttaccataactaaatcatataacaataataagattaaatagcattcacccgttgcaacgcacgggtatttttctagttattttttaaaaaagggaaaatactattcatccaaatctattcaactggtataacaatattaggataagatgaatctctatcatttggtgtattgtatggatacccttaaaaaaatatataggtctaatatatagagggtttacactaccaactcaagctgatcgattttcatgaaattttgtgattttgaggtggctcaaaatgatattttgagggagatttgaatggtttttcagaaattcaaatttgaaattgtaaatcgaatagaaatttgatcaaaattggatgaaaattaccggttgtagacatgttgttagggatcaaaatccaatccccatggttttgtgaaccctactaatatgactaagaactatcatgcattctccactaactgcatattttcttagataacaaaaggctcaatagcaaatagcacctccgtatcaagagatgcacacaagaacataaccaacaattaatctaaattacaaaagggactttaaggcgagaaaattagcccgcttgaatgcaacacactagagtacaaaatctaaaacttcattgttttaaattaacatgcttgcaaaaggtaaataccatgattactcaacctggaaatcttatatacgttcaagagagcgatcgatcaaatgtgaatttgatgtgcttgcgacccattgacagtgagcagtaaaaaattcttggccatgcatatctcagactctcagtagtgttcctcgtcgagccacctcaaacctaagaaagatttctttcagttgctcatttcaaacgattcaacacttcagttatgaagaaccatgggttgccctaaaaagaataagccaatgccaaaattttaaatttaaaaacttaattttgagtttattttaaaatattttcaacatattttctttttcagcattgggttttcagtcactaagaatatgtctataaaaattttacaaataaattaaaccgatgaggcctggacaatatatgacagagtcaaaaggagcatcgctaaatcaagaggtcactagatcgggacatggaggtgtgaggagacttagtgaattagagttaaataaggagcaaaagagactaaggctgtgtttgagggagagggaattgagaagattggaaagatacgcaaaacgaggtgagccattagcgcatgattaattgagtattaactattttaaacttcaaaaatgtattaatatgattttttaaagcaactttcatatagaaaatttttgcaaaaaacgcaccgtttaatagtttgggaagcgtgtgcgcggaaaacgaaacaaacaatttccctatgttctccaaacgaacgcagcctaaggttatctataattttccttacaactttcatcaaaatccgtgtttggggtctaccaatcacactgaaactatggagtatatatacctaaataaactaagaaatgatcaaagttagcttggagaatcctacaaaatccttattatgttgacttcttacatgctactccctcatttccataatataagacacaactacattttctggacgttccataatataaggcatgcatgcatgcatacaattaattaggacctcttctccattaaattattacttttttaaatcttccatcctcaagatctcttattctattggatgcatgcattatatttattagggtgatacaaactatgagatgataataattgtttcttggtctttgggttaaatgtggttgtgccttatattttggaacggagtgaatatcatcttagtatatgcatgtgtacttatgtgtagatataaaactagtttaataatatcgtcaattgaacatctttcgaatagattactactaaatccgaattcgaagtgaccacaaaagatgcttgaattcctatgcaactcttccaatgagctcgatctagttttctccattttagcaccatccaaaacacaaagtccattggcttaattgcttccaaggtttccaccaccactactccaacgagattcctcttgcaaccccaatctacaaaccggccccacacgtcattgccacggccctcttttccctctctgtccaagggagacggcagatcagtcgaggagacgtgatccacgtactttaagctacatgtacacacaaattaacctagggtaatatactactctctgtctttcaagccaccgcattccactcgacgagcggccatggctcccacagctccggcgtggcgcagaaggactccgggaacaagccctcatcgtagtcaagctggtcgtcgcactgatccgactccaccgacacgtccgccggcgtggcgcacgtcgcgccgccgagcacgcagctctccggcggctcgaggtccaggcaccccgcggcggcgttcctcttgtcgtcgtcgtcgtcgacctcctcgctgcctgatccgttgcagctgctgctgcttgctgccgtcgtggcggcaccaccgttgccgctcctctcctcccgttccctcagcctctctcttagctcgtgcaactgcatattacatgcaaagagcaatcaagttagcgtttgaattaattatggaacacatgatctgcatgttcctacgattagtagctaagctagcttgcttaattcatcgttaattacctggacggtgagagcgagcttctcttgcttgagggactcgacgcgggagtggagggcgtcgtacttggagcggagtgcggcgtagtcgtgctcgagctgcttggagcgccaccgcgcgcgcttgttctggaaccagatggccacctgccgcggctgcaggcccagctcgcgcgccagctccgccttctcgcggggctccagcttggcgtggtgcgcgtggaacatggactccagcgaccgtatctgctcctccgtgaaccgccgcttcctctccccggccccgcccctccccggcgccgccgccgccccgccaccgcccaggtccatgtactgctcgtccgccatcatcgccggcatgcacagctgcggcggcaccaccggcgcaggcggtggcatcaagaactggtgctgctgctggaggtggtggtggtcaccccgatccatggcgatcctagcccagctagctagctgtgttcgaccattcatccctctcccggctcccggcccggtcggccccttttataccggtgcgaggagtgacgtgtccacgtccggtccgggggagatgcgaacatgtggtctttgcgattgcgggtaaagaaaaccgccggggccccacgcaccgtgacaccgagcaaagctgcttttgtttcccgccaagtgtcacgaatccgcccgcgccaaaagctgtgcccctgcccccgatggttatccggccgcctcgggatcgccacttgacacgtggcgccggtgacgagcacgagtgcgagatattcttctctccttctcccgtaccggttccttgttggcctactgctaatcgttggctgctgtacaacacctccggatttctttttcgtttatttctctccctctttggcctctttcgatcgatcgccacctcgtgcaggaaattggtaccactgctgctaaggtgtacatgcagtagtcgttcactcgttcgtacgaagaaccggatgatggcgtgcgtgcatgcgccaatgggtggcggaaaggtgggtgcgccggagagagacggagacgcgcgcaattggaacaggtaggccaatggccgaggagagcgcggcgcacgcggtcgcggtcgcggtcgcggcgccaagtgtacggggggcttcgcccgaaaggctcgtcgaggtggcgcgccgcgtttgtcccgttgcgcgcgggcgccccgggctgcgcgcgcctgcgctacgtcgtaccagtgtgtagagctagccagcgcgcggtgccgggtcttttcggcttgatgtgtgatggcccgctgcttgttcacgtaccaacgagacagtggtgggggtaacaagattagagacagataattagatacggctaggtgataaccacttcgatatgaatgatcaactggatcgatctgattagtgcgcagggcttatctcgatggatcattatcgtcgatctctgtaccgggtgaattttctcctactcgatatcggcgaggaagagaagaaaagcggttcgtacgttgttcccaatctcttgtccggtcacgtgttggagtcgatcaggtaagttaaaagcggtggtgatccaatgtgttggatcaccttttacttggattgttcaattcgatcgaggggataatcacgccgcaatcgcggtagcgaacgagttaacttaaaagcgccgcgatcatctattatatactaaaactccataaaactttctacaaacgctctcaaaccgccacgtggcgctctaataaaatagagaaaatcctataaattctaagaaaaaaatagcatatatcccttgattttcacttaaattggtgggtccaatattatacaccgttagataaaattgatcttaaaacaaactaaataccatgtgtcccacctatcctctcctcccgtgcattggcaggtggagtatataccgtaccctcccccctttttttccttttttcttcttttttccatttatatatataatgtatatatttttaaaataatgataattttacaaacaaagaatctaccatcatataacttaagccggtgtactttttactctgtactattattttcaaataatgcactattttaaaataaattttacacaattacatcgtgtcctataaaataaacaatatctatattaactaatttatacgtgcacttaaactgatggctccattatataaatcatcggatctactttttattacactggtctattattctcaagtaatgcactgtcaccattatattgtgtacccattaaattaacaatttaaaatctatattaactaatttacacttacgctagaactggtggacctattattataatcatcggatctattgtttgctaataaataaagcgtccaaaattctctttttgcccactgcacaatgcacgtctgcacctttgcctttcgcacgtgtgacgaagcatagtgtctgagacatctaaggtgatcacaaccgctatagtactaccgctttgccacatattaaatcatatatggagatgattaattttgttaataacatgaaaaaaattaaaggtgtgatgcagtgagagaataattaagcaccatgggttgtgtttttctcaacactaattagctctgtttaagttgaaaacgagagttgttacataacaattataatgtatttgtgttatgtcgtattttgattttgtactatttgttcgtaaaggtgaaaggaatcattatgttataaatatgagcgcaatattgacgaatatcaatagaactcttactacgacaaaggtgataaagggagtttaaggccctctcttttttttcccgatttcatattttggatttttgtttgcacgttttccaagtttctaaatggtgtcttctttaaacaacattctaactttttagaagtcaattcattcgtttataccctcaaatagctatcacataaattatataattcatcaatttcagctatcctaaaccttaagtactacatattttttttcatgcgagccatggtgatcaataaattggtgaacaacggatcatcaaagtcgtaagatgaatatataagagttactctgaacaattgtaaataggtgtcaaaattaattgttattaattagacatctaatggcttgctagccacaaaattaatttctctctacatgtatataaacatggacgaagttggaacaaatattaccatatgtcccatacatatatattgcgcaattaacattctaattagtcatttaaaatttcttaaaatgctcttaagctgccacgtggtgctataataaattagggcaaatattaaattctaacaaaaaaaatcaaagtatctattattttatttcgcttaaatccgtaggtctaatattataaaccgttagattaaattgatcgtaaaacaaactaaatactacgaggtcccacctcgacataggtacgcacctacatgcgcgggtacgtacgcctcccctcccttttttcatttttctctttcttctttttttcccatgcatatgcttccctccctttattactatatcatgcgtcttcatgagatgatttaatcaaaagaattttgagtatcttgcactcgcatttttaatttgcgggcatactagacggtatgtatatacatagactgtatgataattaactagcaatagtttcttatttactcgagaaaaaaatatgattcaaaagtcgtaagtaattaatccatctcctactcaaaagtttgtgaatggttttataagataccttaagaaaaatagaacccttaaattattataaaataacattatccaaattttagtttgccctgaatctataagacaatttctgaacaaacaataattttaccttttaaataatataagtgcccgcgtatacgcgcgggccaccaccttcctagtttcgggcaacagcatcacgtcaggacgaggccagccaccaactctgtaaccccacgaaaccacaccacgtcgatgattttcggattttctctccccgggccgggttcccctattctgattcattaattaaagacaaactacggagttgaactaccacgttgataattaaacaagccattaatgacgaaactagcctgttaagctacaattaccgggatatatatatatatatatatactacagccgtggcggtggtagttcgtcccgtcaagaaagaaggatatgataattggacttccggccggcttagctagcttgggtgtggcttgctactagcatgcacgcgcgtccacactccacaggcagacatgcttccgtgtcggcgtcgcgcacgcggtagcgaggcgctcggcgcgggcacgtcacagtagctgtccgtgggtcacaccgcgattaatcacggctacagctacagctgcacagtgcacagcggaggggaagagttgtgttaattatgtgggctctagctagcctcctagccttgactagctgatgtcgatgacgatcactgatcaggatacagccggggaccagcaggggtggcggaggaggacgaggaggagagggcgcgcgcggcggcggggcccgcgctcgacggcgacgggcgaggccgcgcagcggcgggcacatggcggggcgcgagtggtggcggggagaggcgggtcagcgtcgcgcgggtactcgtggctgctgcgcgcgtcggcgtcgcggcgtggggacgggggcgcgaaagcttcgcgcccgcgcccgcgtggccacaacttgggcgtttctttccggtcacgcatgcgccttcgattcgcacaggctgccgcgcgctctcccggccggctcccactcctcctacgtcgccgctctgggcttcccgttcagcaatgcgtagttgacatatggccctgttggtttaattctcggtgtggtccttacacagaagatcaaccgtgcacctcagcttatcgccctctctttcacatggatcagtttaacgatccgatccatggtctccttagataatggaatgaattccaaagaaaataggcaaaatgaactattgaatgatccgatcgacggctccttccttatcgttcttgttgctcggcgatggcgaggcgccgaggcgtatcttgtgtgttcacgctttcttctttcttaaccttcgttgctgcaaatgcaagccgggttttctgaagcgaaatctctggtataacacacgagactcttgaaaatcacatggcaaaatcatgcatttagtccgcacggcaacagagctatattctactactcgcacatacttttgtcagtaagggctggtttagttcctaactttttttttaaacttctaacttttccatcacatcaaaacttttctatacatacaaacttttaacttttccgtcacatcgttccagtttcaatcgaacttctaattttaacgtaacacaccctaacttcaaaactaaagttagcccaaccatttgaagaaacgcacgtttgctagctaagtggtccgtccagttattctggaaaccaaaacatcgctagcccctttgcagaattgcgctaaatcgcactgaccattagaattttgtaagattatcgtagttgattagctggccctaccagatcgcttgtgctattccctcattccatcgtttgagtttgacctctaacagtgcttcaaccttttctaatcaaggaggcgttgcgtacgtattaaagaaacatatctcaaaactcgacgtggaatttggtgtcgaccactctgagaagaatacatcggcagaaacccccaaaaaagacatttttacacgtaaagtgcaatattaattctaggtttctcattcgtgcatctttcttggtctcttatgcatgcaactgtacaacttggcatcttccaaatccaaactgtacgtgaagttcaatgcgtcgattcatgtccaagactaattagagtttttacgcaggtaaacaagtttgtacgcagaacctgtgttctttgggaacccgactatccaaacatgtctgcgagcgtcttaagaaaatgaaaacaacatgtttgcaagcgaaattcatagaatcaggttaaaggtgtggaaatcattaaggacccagacttaccttggccgcacaggcaatcaaagcctacaaagctcacagctcggaaacgaaagacgggataaatgcaaatgctctttagcaaaaacaatatcaatgaaaagaatcaaggtattctcctataatcactcgaatatacagaagcatcacagcattgtttgttcagtccaaattctcgaggtctgcacgttctgaacccactcacacaccccattagcaagtagcgaaatatagacaactcaaaagaaaaaaaaatcagttgttcgaagtggaaacagaaaatacagtgcctcaaaaactcgaaattcaactaattttacagcacttaagtagattgtctgctttgccggccaataagcatgcattgctcttgtaacagggagcagagtacatgtcccttgacgcggcaaagctcaccgtctattccacacccattgtgcgtgtttgcacctggtttaagcttgacagactttacctgtgtcaacgtcagctaaaagttagatattatccttggtagatgaaaatataagtgcaaataataatttagcccagagccccagagcatgttttgataactattcgccactgtcttaatttaggtgaactttcagtgatccatcaccagagctgacataaactcccagaccgcccaacaggtccaaacagctcatacttctattgacataacaaaagttaaaatgcactgcagactgctgctcttaagaagccaaaaggtttacgataataaaaaggtgaaatcaggtattcatgagcgtatatgataatatcctctcaacaaaaaaaaacagaatatacacattggaatatgtttgttttcagaatgcattcaactatgtagagaagttaatttgtttcaaacgtaaaaacggtatttatttcagaggacctaagtaataaacaggtattcggaaaatttgccactggtactcgaatgaaaaatcccttgtctgaaaagcataaatacaagagggtgaaaaaatagcttgagaaaagaaagaattgtgcatgttaccttcacatattccacataaggcaaagaaagatggcgaccaaattgcagaagtatgaaaaatttcaacaacttccatctaccctttccaccaactaagagcaagtccaaagtgttgtcatcatggttggcttttggtgcaataacctgcgaactcaaactttgcactgtcttgcatgaatgattgcaaactagaacaccaagaaagtgtcctttcctgactacccatttatcatccaaatttggcacaagttccactgatggtccaatttcattgtcttctggtggtccagggagttcaatagggtggtcagactcccaggttagctctgtatcccattttggcccattgtcccactttggttcagagtcccaaataggtcctggatctgaaattgttgaggaaatgtcctccttgtcatgaattgatggggctgcccaagataatcgtgtatcgttagtagtgacaccaactgaatttctctcagttcttgttttggacctggttcttggccagaatgatgaatgatgtggttgagggtgtaaaacttcctctggttctgaaacaatgttgcttctgcccaaagaaaggcgttttgcttttggatcaagaccacgaacatactctgaaggttcagtgcttgctgctgtgctacctgatgtatcaacgtccccaagtgacatccgacttggagtcataatagagtcaatacttgacaaactggaagctcgtggaattccttctctttttgatcggctgcgcattacattggtatatacatcagacacaaagttttcttgtcctataccttttccatggccagtcatctcctttgaagaaggaagatactctaactcatagaaatagcttggcaggcaaaaaaatttgagtattccagccacaaaatatcgaagagggccaaatttcttttgatatttctcagaaagctccaggactgcagcaaagtaatagtgcctttttcagcttattaaattattatgcaatcctgtactgctaaactacattgcactgctgcaaatactggaacatagataaataaactacactttaatgagcagtcattgaagaaacggagacaatagcaaatttaccaatgaagcatacaagttatctcaaattttacaattaagagtacagtaagataacttgtatgtgctaattgagtgaaatgatgaaagtatatgccagatcattagcctagtaaagctgttgggaagagcaactcagcatgcatcagatcaagtgtttagtataaggataagtactcaaggcggtctaatttttggtaaaccaaaagtattttaaaaactatcgtattctaaaagtacttttgtcagctaaaaagtttaccattgtcccaatacaacttatgaagcattccaaatttcaagatttatggaaaaaatggcaatgcaagatatatgaatctgagggatttagaatgtacgcaacttttgtggccttagcccttaggatatcagtgcatacagtataaatgagaactaccataat

SEQ ID NO: 4541 - DNA, 60930 bp, Oryza sativa
aaaacattaaaagaacacaatacggtattaactaatttttttaaaaaatttctgaaattagaaaaagaaaaataagatttcaattaggaatacaatttataagtaactcaattttttgataaaaataaagattattgaaagaaaagaccatctaaaacacatgacgagataagttaagtaacatgcctataaaagagtagagtggtggcgattgatacgacatataaaaattgttaataaaacacaattgccgtgaaggagggacgtcaagcaggccgcgaagcaaatgagtaaggcggttgccaggacttatagtaagtaaaaaaaacaaaccccattgataatcatattcgatttttaaaatctcaatgacaataaaaaggagaagcagcaggtggggtgtataagagtatagttgcagagccgtcgacgggacttctagaaaataaaaaatgaattccaacgatagttatgttcgatttttagaatcacgaggacaataaagagtaggcggcggacgggttgtagaggggcatagtggcatcgtttgatgggacttctcaaaattataaaaaatgaaactacaagtccaatttttaaaggttcgaaacttctaaaaagtaaaaaaaaacaatgctaatcatgttcggttctaaaatctcaatgacaataaagaagggaggcagcgggcgagccgtagaggagtacaatggcaaagccgctgacggtttggtgggacttctagaaagtaaaaatgaaccaaaacgataattatgttcgatttttaaaatctcaatgacaataaagagatgagatagttgatgggccgtagaggagtataatggcaacgtttgacgagacatctagaaattataaaaataaaacccaacgtgacaataaactctaaaaactataaaatccattttttaaaggttccaagaagtatgaatagaaatagtggtagatcgagcaagcaaataaagaaggagatgacataaggggtagtaattggtgtgacttttaaaaactatataattagaaacacgagaatgataaggtttggtctttcaaagtcttaagacaatgagatagctatttaacaaattttgaataaatcatattaaaaatagataattttgtatgggtgctagccgcgcaattgcacgggctacccagctagtttgcattaaatcaaaacctatggaaatagtacaaccaagagtattaatgaggcacaatatgatcatttctccacactactagagatggcaatgggtacccggtccccggtcccccgtggagaattctcccattaggtgatggtgatggtatcaattgtgtctccatggggaatcaaatggagagaaagtagtctccgtcgggtctggcgagggcgggtttggttcaccgtccccgtccccgccctccgtggaggcccgatataaaagtatgtgtgtagtaatatcctgtgtatttggcccataaaaaccagcccaaagcatagagtatataaagcaattgtgtaaccctaaccattccaatccttatcccctccgtccccattccccagtccacacgccaccgtccgccccgctcgtcccaatccccacgccgccacgcgccacgccgtcgtccgtcggccacagcggctgagtagcgctggctcccgatctcgcgcccgcgcgcagggccgccgcacccgccgtgtcggcgtccgcgccagcgccgagctgcccggtcccaggtggcccagctcccagctcccgagccccgtggccaggtcccagcgccacgccgcgccgtcccgttcccttcactcccagtcccagcctcccaggtccgaggacgtcgtggactcggcaccggccaccggacgtcggcctcctcctccaccctccgtcaatatctgatccatcatgtaggcttatttgttttgctgatggtggatgcaggtgaaggcttcggtggcaagaaaggggaaaacgacgagtccacacgacgaccagccgctcgagtccgccatggcttcgccttcaccaccgctaagctccgacgacgatgcaaggtgagcacatctagctgtcctactcccaacttagtacccctccctagatgcctaactacagtaccatatccccctccccctccactaaattcctcttccatggctgcatcgttgtctcgttgagtcactaactcacgttcggcggtccacaataagggacgccaatgcggtgttggaccagccatcgcatgctagacaggtacctagaggatgagttggtttcaattaatacagaaaactttaagattcttgattggtggaaagtggctaggacaagctttcctacattgaggaaggtagcacgagatatatttgctattcctgttagcactgttgcatctgaatatgcatttagcacaagtggaagggttcttagtgagcatcgtagccggcttactccagaactcttggaggccttaatgtgctcacaagattggctgcgaaacaagtatcgaggtacatatgctgttttattcatacatcatgcttagcatagattttacaatgcaatggatgcaaaataattcttataattgttatcttgtagctgataatgaagaagcagcaagcttttggagttgccttcaagatatccaagatcagattgaggtattctttcaacaacttaaaattagcaatcaaactcctactgccattatttgttatatccttataaaatacttgactaattgaatatcttttgctacttctttaatttagggacttgctcttgtttgaagacatgaatgtatggacatgcactgttcttgcaatgattttggatgtttgtaacccctgttatgtgtcatgataaacttgtaaaaccatggcaatgcttttggatatttggcacaaaagacctactccgaactatggttttgtgtatgcctaggacaacatgtgttgctactgcaatgtggtgataactaatgagtgatgactgatgaatgatgaatgatcatgtattattgtgttgttgcttaatctgggaatatgatggatattgtattcttgggcacacttttgttgcactacttgttgctgcactgctgttgtaagtgatgaattgatgatgtgcatttgtgaactgatgatgtgcatttgcgaatttgtgatctgaatttgtgaacttgtgttcttgtagttgttgttgatgtgctgaaattgatggctagaattgctattttgagtgttaatcttttgtatgtaaattattgtttgatatgagaaatgcatacatgttgactgttgagtaagttgatagcggggatggaggctccacggggataaattacccgcacagaggcggtgatggggaaagatgttgccccgttgcatttcacggtgatggtgatggggaaaattctccaccgcggaggcgggtatggtggagtaacctccgacagggaattccccgttgccatctctacacactactactaatttatctcgcaattatttgtctttccaaaatatagaatatgatacgatattgcctagcagcacgaatctgtacatgccactaatttatctcggaattactttctctatttcaaaatgtaagtgtctcatacatgatgtgatattacttaaaaccggcttatccagattcacagtgttagataataccacatattgtactgagaattagatatattttgggatggagctagtagtactgaaattaagatgcttctttttttttatgatggaggtagtattatgcaataaactctggttttgcattcagtgccttttcgcggtatttttcaaccaccaaaaacctacatcctctatttcatattatgagtcgtttcgactcttttttctgttataaaagttagccgatatagcggaacgacgactaaccttctcgatcgcttcaatcattgatcacccaagacatgccagatgacgacacaggaacacacgatatttgttaacgaggttcacccgaagcctacatccccggggctctgattatgggcgctcctccccaaccaatatagcttttagccgctacgagtccatggccatgccgccatcatctccctgcgtgtctacgctacattgtagtcgccatggttacattgtggtgcccccctttctatttaagagagatgccgggttacagactccgactctaactccaccccctaacacctattacaactccaagtccaaccgtaaccaaataggactagtatattcgacatctattctaacattttccaatttggtgctttggatattgtttatagaaaaaataaacaatatccaaaacatcaaattagttatattctaataatatgtttattttgtgttgaaagtactactatgttttctctacaaacttgataaaaaaagtttgaggaaaaaatcaaaagacttataatattaaatactagatgaatactgctttatgcaattgttgaaatgatatcaagatgatactggctggatgtattcttactttttggtgaaggtgaaccctaaccgtctgtcttaattaattaccccccgggtcttgtctctcccaaaagcaaagagaacgattggtgcttgctgtcaagattcggaatcattatttgtggattcggaattattatttgtgaattcggaattattatttgttaacttggaatatttcgatcgtgtcgatgtatcgttttcaaaaggactataactatcactgttttaaaccatgcctgccaaagtgccaatcgtaaataccgcgaatacggagtcctccgtgagtcaagtgttagtcagttctagaagggagcacgagacttcgatagatcaaagtaccaaagcccatttgaattgtaggattaagaaaacgtaagaataagacaaacatagaattttgatagaaatataagtgtaaaataaataattgcaaaacacaaggaaaacataggaatgtccgtttaattgaacagtaggaaaaacacagaaattggatgagagagaaaaactcaaagaaaagttaccaaaagattgaagctcttactaatttcctctaaaatttctataggattgtccatttcataggaatttcaaagaattggataagattcattcctttgaaacaaagcgcttcataggaaatttttctatataattaaaatcctataaaatttctatatttttcctccaaataaaggagccctcaaagtggagtaatccttcggtacaaaattctcctgtggacagcatgtgcacgcattgtgtagaacctttgctaatttgacgccaaggctgtgttcttcttatatgtttgaaacggctaattagtcacacgtaaaacataaaaaacgattagcatataattaattaagtattagtatataaaatgatgaatatattagatttttttaaacaacttatatataaaaaattttcacctaaaatacactgcttaacagcttgggaaccatgtgttaaggaaaactgagtagcagctaaactataatatttgaatagaacgcagcccaagcacaatgaccaggcgattggatagatggtggcctgatcagtcgctgctaagggcaaaagaggctaatcaacaaaccatcttcgattcatatgtttggtttgggaataagctaggatgggtgggttcattcttaaattttaggatagaatggttatattttctgtttgattggagggatggagtggatttttttttattggaggagtgaaagaagatggaatgatcctacacttatttggttagagggatataggtgggatattgcctcctcaggagtgttaataagattgccacagaagagggcacaggatgatgttgctgatagtcaccgctgccgccgccgcttcctgcacgagaagacgacatgggaggagaagaacagagggaagaggaaggaggccatggcggatgctccctcacacactcgaccttgccgctaagcctgccagtgggctggattttattgggcgaaatggattggatgttgatttggatggtggtggttggattcaaatgggctgatattaattttggattggagcgggttggcctgtgaagaattgcggtttgggctggagtggatgcgggttggcctgtgaagactatccatggattcagcccatgggttagcctccaaaacaaaccgaactatccccactccactccaaaccctacactccccgcacgcgcctgtgtgcggtgcgccgccgcgcactgccgccgccgccgccacaaccgcgcgccgtcaccgccgcgtgccgtcaccgccgttcgctgccaccgccgagcgccgtcaccgccgttcgccgccacagtcgccggactcactcaagaaggtgactcatctttcatgtttcttgaagtggcgttctctctctgcttggtcgagctccgctgatatatgttcttgctgtgggcagggaggtggcagatctgcggttgcgtgacctccatcttggatctcggtgagctagggggactgttcttggaagtggttcttgggagcatcctggtatggtaccttggctatttttgtgctttttctttgtttcgatttttagataatgtgggttggttcgattggagatgctgaagagtggtgggtttctgttgggtttaatgccgcagctggtgtcccatcttagttgtctcatgtgatacatactctgctggattgtagtatgtgtgccatcagacatcaggattagtcacaataattaggtcttaactcttgaaaggtaaagacttatgaagctattgccaaattagcagtaccaatgtctcatctaaccttgagaagtcatctagatctctggtatactgcaatgctactgaaaaagaaaaaaaaagatgttggagatttgaacaaattggaattacacaaattgattgctagcaatgttctgttattcgcaattaattctgtcagatggttgtttataatatatcagtgcaattgcaccctttcccaagtcccaacctctaagtcatgtttattaagcatgcagcttttttgctgcttaatggtgactgttgagcgcatctagaaaatccagcacttaaacttttaagctgttggtcaaaggataaaacattttgaatgtcagttcattcagttccatataactactaatctgttgatttaggtggctgtctttcactgtagtattaagtagctaactattttatgtgttgacatgacatgaggcctgtctttcttgttcaaagatgtgatttgatattcattatgttattagtggagtttcaaaaggtgaaaaaaaagtgcacaagaatatttatgcacggttctttgaaaagaaacatgtccagcccccaaatgctagatgcatgattacggtgtataacaggttgctgttgggtatgcttatcatttcactagtttttagcacaagtagtaaatgtaaatattaattctgcacaagtagcaaatgtagatattaattttctattcttgtcaaacacaggtttattaaacatgtctatgcaaaattctgaaagttcatctgccaatatttctagtcatgagctgccttcacaaacacgtaagagagcaaaagtgtgggaacattttgagcaggagcttgtcatgatagatggtcttccaaaagcacaatgcaaatattgtggcttaatgttgtcagcgactagaaaatcaggaactagccatctcataaaccatatttgcgaatcttgtccactagttgatggtgaagttagaaataggtttatatcaacagttaggaaacaacccgtggaaaattttgtgtttgatcctaaaaagactaaagagttgatgataaaatatttcatccatgctgagataccattccataaaattgaggatccctacttggatgattggatggcatccatgcagccaacttttaaacttgtgggtcgtcaatcaatccgcgacaagatttacaactattacaataggctgaaacaagaattgcatgctgaattagagaatcttgattcgcgtgtatgcctaacatcggacatgtggacctcaaatcaaaacctaggatacatggttgtcacagcccactatgttgatgctgaattcaaaatgaaaaagaaaattataagtttgaagcctgtgaagtatccacacactagctttgcaattgaagaagccatgatgaggtgtttgactgagtggggcttgagtagcaaactgttcaccttaactttagacaatgctagtaacaacaccgctgcttgtcaagaattagtgaaaactctcaaggatgagttggttttggaaggcaaacattttcatgtgaggtgttgtgcacacatcctcaatttgttggttcaagatgggatgagggtgattcgtgcagctatagataagatccgtgagatcctaaagtacattgagcattcaccctcacgcattcaagcgtttaattcaattgcttctagtaaaagtcttcctccaaaatctggtttcactcttgatgtaccaacccgttggaactcgaccttcaagatgattagagaaatattgccttacaaggctatcctcaatagctatgcctctgaaaattgtgaacttctaccaactgacgaagaatggttgcatgctgaatcaatttgtgaatttcttaaggcttttgaagaggctactagaggtgtatcagctcataggacaccaactgcacacacattcttgccccatgttctttgtatccgtcatgctttgagtgatcctgattggcaaaccagcgatcttttaaaatgattggctgctcctatgcacaccaagtttgcaaaatattgggatgaaaaattggcaaacaacttcaatttggcacttgtcattaccactgtgttagatccaagaaggaaaagagactatttggatttcttttatgagaaggtgtctccccatggttctaatgttgaaagtaaagtggactctattatagaggagatgaaatcatactttcatgtatatgaaggaattgcaagaagaaggggtgtatcctacatgtcacagtctagtgagagagttagtgttgtaggctcacctgttttgggaaaaagaaagctagagcatgaattcatcctcttcaagtcaaaccggaaggttgcacgtactcagaagtcagagattgatacatatttagaagaagtatgtgaggatgatagtgaggattttgatgttttggcatggtggaagaaaaattccaaaaagtttcctgtgttggcaattatggctcgagactttcttgcaattccacttagcaccgtgccctcagagtccgctttcagcagtggaggaaggattcttggagacacaagaagctcattgacaccagagatgctcgaggcacttgtttgtgcaaaagattggctacatagagccaaaaaacaaggggattaaaggtataatatctcacgccttgtatttcgtctcagactttgtggtctgtgccatacaaatagtaattgtagatgtgttttcattttatattgtttgattagtcacaaaatctagattaatttgtctgagtgcccaccagtattactaatatttgtgccaaattttctttgatctaggttcgtactgagtactgaccatatgatgttttgtgaagaaggtttggtatgatggctgtttttttttttacaatggtggggtccctgtgctcagtaacttaatgttgttttttgttcatcagttggtgaaatgttaggcagaatttgtaacaccttgcaatgccttttatatctattagttgtatccttacttgtatatattcttatttgagcagctagagcatgttcaggagatagatgagagcattgtgtatgtgaaggataagcaaggaaggtggcctctctcttctcccagaggggcaaaaaaggccccaaccaggactctgtcatcctctgccaggtaacatcttcagctctaactctctgtctctgaatcttttctttctgtttgatgtgctcagctcagatcaatccgctcaatttctcctcttgatgaggctgctcaggccaaatgttttgttttgtactcaaaagggttcagattagttcagggcttcagggtgttctctagtccatgatttgagcttccatgagctaattaggtcagcagttagtagagtacttttttttcaggaagagttagtagagtacttgttagaaatagagaaaaatcttttctttctcttgcaaaattgtttgatatgatatgttgtatcctactatgttgattctggctgcagaattttggggctctcaaccttgttttcttcctctctttttttttccatttcttgaaagtccttgtggttgtatatagtagtatagatatttagttgaatagtggggatggatggattcattcttcattcttactagtgtgtccactaactcatgctagtcatatcttatagaaataataatattcaacttgtaatctttcaatgttatttctgaaatataaatttctgatggcttctttctcttccagattatctacaactgcatatggatcaaggcatagatgatgttttggtagtttttgttgaagatataaaccttattatggcccttattattgctgtagtagtgagcaattgacttaattgtaattatatgacatcattagtcttctggtattcatttcagtgctggatcagctaacaaacaatgcgatgcgtatcattctgagtattttttttttgtttcattttcttgtttttgcccaattttcagtgtttcagcaagcaatgatgttcttttaatatttctgttttgaattaattgtctgcacgtgtgtctacactgctgctctctatactgtagctgagatccatggctaaagaagtaacgaggcctcctggctccaagctctctgtagtgtagctgggatccatggattgaatccattccagtgaagtggactgaacccattttagtgtaatggtttggggtgggttggactgaaatctgatgcggggtgggttggtttggattttggaggagaggaaatggggtgggttggtttggcatgccattccatgaggaggtgggctggggtggattcaaattggatctcagcccactggcaggcttacttgccgctgcttcttgccactaccgccgtcgccgtcgcttgggcatacgcacggtcgccgccacttctcgcatgggcgccgatctagaagagacaagaaacggtgagagagagatactgtgaccacacatgtgcatctcatgtgactcgcgcgatagagctatgtcgaatcgatttgctagattttcatcggtgagttgaacctgaatatcagtggaatattcttttttggagccaacccatcccacctagtatcacaaccaaactaataaaggtgtgatgaggacatcaagctaataaaatctacatgtcgactacttgagacaacagtcatgcagttttttgccaactttacttagaggttcaccaataggattcaataatcaatgggtctttgttttgtgtggattcaccaataagattcaatagtcaataggtctttgttttgtgtgtgtgtttttagtttgtgtgaatttgtgtaacaatttgtagttactctagcaaaggtcagaattttatttcattatctaaaaatcacaaccaaacatctatataaaaatagattcaacccaacgtaatccaacaaatcccttcaaccaaacacacgcgactaggtgcgccgcgcgcgtggccccggcgtgccccgcatgcgggacggggggagtcacgaagggggctgcgcgatcacgcagccggcttcgctcgggcgcaaggggagcgtgggtcggggcatcgcgggtaggcagcgcctacgcacttacgcagacgggcgaaggcgggtctggctgtctggcacatggacatgggtggggctctcgacctctcgtcgccctgctcgtgttcggcggattcctgcacacgcgcggctcccaagatcggacgtgcgcgcgggcttgaatcgtgctggattctgacgcgaactacgaatctgttgcgatcacgtagatagtagtagttccgatgaactactatctgttataactgttcgtctgttcggaaaaactagtggaattctggctacgttcagaggacttcagaatctggacggggattgtgtgaggcccacatgtcagcggcagaggatctgcttcttcagaaaattctggttcaatccgtgcatgcaaagccactttcctcgggatggaaaagcaatcgatttcaccaatcaaacagaactgacaggacatcaggcagtacgcgagggttccatgaaatactgttgttttcagcacagaaactgaagaccaccaccctgcgcatcgtcagactgtataggcatcttcagcgctcaaaagtgaggagacatcagtgaacgacgtcgatccacacctagctgttcgtgtgaaggccggaaattccctatcgatccacaagatgccctgtccctttcaggcatcatcatctggattgtaatgcagaaaagtaaataatccggtgaggcggtgactgtagcagtgtggctgatcagttcgctgtcaaagattcattttttaaaggcaagttccttttggttcacaggaaactttggccaagcatgcccactggattgttttatggttttcattgatcatttcacctatggccctaggtgatgtaagcctggctgtggacagatgaacaagttggagagttgcttcggattcaagaaccctattatggcgaaacgcttaagagtcaaccaagcaaccatggctagcaatggagtgtccaaaccagtctctcgttttgagatagagccaattagagattcttatccttgaaagatctcgtcaaatttctctgaattgatggtaccaaatgcaggtcactttttcatgaaaaagaaacgccgcacaacgataacgactcaaaacttttttgccgcagctgcttttgtaggagaatttgataatcaatcattgcagtggttttcttggataggcagatctttcacaatacctggtcagtattgatcaatccatgtagtgcaccatttgataactctctcactgtcacacgcatcagataacatatcttcagatgaaaccattagctgaaatcagctggaaactggcaaagtaagaattggatcagctgatcttgaaagagacctgttacaatattcggtcttcgggtccaacttatcaccaaatatatacatgtatacactaaacatttctctactatacaaaatttcttctattagcgcctacaggctaaaaccataaatcacattggtaagagatgaggcaataaaaatacgccattgttatgagatgaattatcttgaatctgttgtcttacttcattgacatggaaatggtaacaatgtttggtacctttccaatatttactgcacaggtacctccaggaatcccatataatacttcattattgcattgctgcatctttcctgtagtagatggaactgccatgtaattataatccctgctactcctctagtttgtagacctaaatgccatgcacattggtgggctgatcttggccaaagcaagcaaggacgcagggaagatccaaagaccatccccgcatatcaaaccagatgcaactgctggcaccattagtgctgctttgcttttgtcaattatatgccaggtgaagactatcaggctcccgatacacatgtcgatggcaaagcttgcaccaaccaggaaaggaacccccattgccatcggtaggggaacccatctcccatacttcggtgggcaaaggtccctcgtaaggttagctgccactgcaaagccaaaaaacccatagcagagctgcaagcaatgctggggcagagcagagaagccctcaacaccaagaatcgccatgtttcggtagactagagcatatggtgctttccagtacccttctgggttgccaatgtcaaaggcactgtagaacaagaagaaagttagtggtgaaattacacaacccatgacagttccaatggcctgagcaataatcatcgatctcggtgatgttaatgttagatgtcccgtcttgaaatcatgcatcagatcagcagatatggacaccagcgatttcaccaaaccacagcctactaggccagcaactacaccagagtctttcccagcccaggctgcaagaatgaagagggcaatctttccataattgtaggccatattgatgtcagttaggcctgctccataggcattgcagaaaccaagggcaggcgccaataagtatgctatgacaacataataccacttcatctcatggaacatcatgggaatggcaattactgcaataaaagttaatccaagataaccagagaaggctagccaggaaggaatattgtctgttgtaaaaacttcattacgatgaagttcatcgagcactggcatgtcttcccctgtaagtggaatacaccttatatcagatcatatataaactagaaaggtcatattgagttctgtcagattatttacccttctttgcattcttcagttttgagctatcaaacagattcttaatagtgagtgcaactatcttcacaaaattgtataggccatcacctaggatgagagctacacagatgaaggcctaaagaatatatatgaggtggtaagaatcaaaagatcatactatacttgtacactaccaaaataaaatgacgaaactaaccttgtacccttgcaggcttttcatgctgctttcaggtatatctgctgaataccaatcccctttcaaatcactgatcagtggccacattactccccatgagagaatggcgccgagtaggagagacagattaacaaggtgggagcaaatcatccctgccccaacatatgtgagactgaaatcgaagaagaatctgataacccaaaaagttttgaatcagatgaacttgttttttgaacaaatcaggtgacactattgttggtcaaaatttatttaatagaataatgagctaagtgattgttgttacgtttgttgccaagcttttagtccaaaagttggaaactgcgagaacccacaattgtctccaccagagtaaaaccactggaagaagctccaaaagaaactcatagcaaaatatttggtgaatccatttacttgctgcctgatgtgccaaaaaacacgttcagttaactgaaattttataatgaatagtagaactcattatgagttatgttagagaaccacatactttgccattgcatccccatgaggtgtgtggaatccatttataagcacagctgttgcagtcccacttgggtaagttaatttgtagtcaattatcatgacctgaaattttaccaagtttaagaaacaaatggaaattatcaagatctggaattttactaagtttggtaacaaatgaaatcatccatttacatgtggaaaagcactgccagctgttcattttttatgtattcacaagataaatatgttgtgaaatgaaaaggagaatatgtccagaatcacgcataataagtctttgcatgtggacttcaaattatgctttcaattaaattcaactgcaactcaagattcaaataataagtatgctttttttcagaattaaaaaaatatattttatttataaaagtacaactcaaaccacaagcaaaatagctatattttcttcaggggactagagaagtaccacacgctaatgagttggtattgtttgtttcagcacaaatcactatcaatcgattaagcaaaaatgttggtatgtcttaaccaataaccaactaggtggtttaataaagccagactgaaagaggtttcatgacagagacaaatttatttaatataccagaacgattcattcagcacgccaatttcaaacaactaaacaagaccatacaagaacaattcaatcagcagtccagattcaacagggaccataaggccatcaatcagatacgttaaaatactagctgcacttcaactctatcacctagctaaatacaggcataattgtccttttttttagcttatgtaatctgtgacatcgtgaaatgaaattaaaacacctacgaaatgttgaagggacaaaagatagaaaaggctgaaatggagatgatggtcagtttaccacaattttgtgaaattctcacaagggtgaactggtgaacgacaaaaacgcctatgaaatgtagaattgcagttctaaggagtaaggagctacagcgaaccgtggtcaaatggcagaactgttgaaattataagcatataatgatttaatttattctataaataaatcaagacattgcagatataaactagcatgagcgcatcattagatctacacatataaactaagcagtaaaacacgaacagaactggtcaaatggcagaactaccgaagatacagagtaaggctgtggaagctcactgaccttcctaagagggacgagagcgagaagtccgacgaagctgacggcgagaaggaatccagtcatccacgcaatgccgggctccttgtagctccccggcacgttgccctccgtgtcctcgcccgccatctcgtaagtcctcttgttgagcccaagcaagtaagaaccaaacccacctgcacagaaagatccaaagaaccaatcagtcgggatctccattagactaggtagacgacgaatggaggatggatgcaatggggggtggtcctggcctccaactgcgatgctgtagcaggcgacggcgcaggtctggacgacggtgttctcctgccgcgtgaacgggcgggcggcgaagccgaggcgggcgagcgcctgcgtccagccgcggaggacgacgaaggcgatgagcgcggctgagacgttgagcgtggggacgaggcccgtggtaaggttcagcttcatcacgatgacgctgtacatggcgcccacggccaggctcgccaccagcccgcgcgccgtcagctgctcccgccacggcggcggcgcgccgccgccgccgcgggcatgcgtggccccctcctcggcgtcgccgccgccgtcgagcccggccatctcctcctcccgcgggtgcgctaccaccagctcgaggcgcggcggcccgggctgccgcttcctccgcctctcctgcttcatggcggaaagaattttccggcgtcagattcacccccgtgtccgagttccagcggaggcatgtgaatgagagaatgaagggtcggtgaaacaaaaagatcttttttttttcagtacgaggatgagttagcacgaatatgatgctagctagtgagctcctcacttgtgttcttctacatccgttgtgctaagcaacgaagctatgaacaagtgcgctctctcgccaaggatcagtgcaagaaatccataggggcaaagaaaaagatgaaatttttatgggtgattctccaaagaaaatcactgccttttatcttcagtgtggtatcgaggattccagaaagataatgtaaaaaagacccacctgaattagcctggattctctcttgctcttgctccaactgaaaagacaagaacagcgagccaaacgaaactgaaggtgagaaagagaactgaatagcacgtcacaaaagaaaggggaagtgattggcaaagagaaatagcgtatacttggttttgtttcgtcagaaaaggaagcaaggaggtttggtaatgtttttatctaccaatataatcactagtagaagaaatagaatttatctcacccatttatttatgagttaaataattagtagaaaaaaattctcctagcattagttgaagtatttgaggtggtactataaaatatatctattaaacggtttagattgattatgttgacaattactccttctatcttaaaataaatatatttattttgagatgggaggagtataaaacaatttctttttcagatagcatcaactgtcaacagtaatggggaaaccaataaaaataaataaccatgatcagtggaagccagtgtacaggaactaaacagcagacacatactccctccgtcctataaaaaggcaaacccttggtttgcgtctctaactttgactgtccgtcttatatgaaatttttttataattcgtattttcattgttgttagataataaaacatgattaatattttatatgtgacttgtctttttaatttttttcatattttttttaaataagacggacagtcaaacgttagacacggaaactagggtttgtcttttttttttggacggagggagtcggcacaacatacagtaaaaaatcgcttccattaacattccgtgcaagaaacacaggcagagtcccgccactcacgcgcaagcaaaccagcagaccctgaatgcttacgaaatgacaaaggttataaaaacaaagtcaacaaagaagaatcagtcaatcagaccttcaaagcaagatcgaacgattttaaactaagagccaacctgcaattatacgtgacgccggtaaaagaaggaagagaaaaagaccgcgaaggcgaagctgtcaagaaagcttcgtcaaaactcaaaacgacagtgaacgaactcgcgacctgaaccattaacagtcgtctgtcagtaataaacagcaacagaaaaagcattaactcgccggcgtaccaaacaactagtattagtactcctgctttccttcgtaccggtctcctcctcgacgagacggcgacgtcgacgacgacgacctgagctgcatgagccaaggctatagcgccgcggtggctaaggagcacacgcgaccggcgaccgtacgtaagcaaactggccgcgagcaagaacatgcatgcatgatgatgccatggcatgccaagcggcggcatgtatgcgcaaatttctcaacctggcgcaagcaaagcaactgaagcgagcgcgtgcgaagcggcgtgcccccgcgcgcgcgcgaggtggggttggggcggcaagcttcacaccggccgtgccgcttgggctttggctgcttccccctttcgttttctgcgggcgtgtgtgctcgcctcgcccacacgccaccagcccaccaccgcgatcgcgacacacagatatcacgacagaattccacggccctcggccgcagcgtgtgcgcgcgcgtgcgtcctcccggcggttcggtccgtatgctggggcggcaatggctgtgtacatccgatccgatgtagagaccgggtttatcctattttctaaaaatatgctggggcggcagtgtgaccgtgtgagtccggaaagacggaaagtagtaacagtggcctctgatgaaagcgtgaaacgcatctcggcgtcggcaagtaggcgcagagatggatggataatctgtggatcatatgcaaacgcgagatagcctcgagacctcgagcagatagtaaaaatcaagctgtagcaatagcaaatatcatgcgaatactggatgaaaaggactaatcacacgaagaaccgcaccgccgcaccgtactgaatgaaaaggactaatcagtacgtatggctgtgttctacagcgcattttgcttttacaactcccccgtttatcacgagtatacttttcaaactgatattttttatcaaaaaatcttttatatagatttttttaaaaaaataaactattttttaaatttgtagtgagtaatattccctccgttataaaatgttacaaactagaagggtgagtcatattatacccattctacatcaacaaatctggacagtattttagaacaagaaaactaaacagaatcataatattttaggatgaagctaggatatacttaattaattatatgctaatatttttttatacgattaaaaagctaaagctaaaggcacattcgaacaaagcccaaatcagtgaatcactgaacccttcacgcgtccatgttccggacaccttcctgaggaggcggacaaatttatggacgcacgaagcgcatatgttcaggagtgcagacaatgcaggctgatgcatctgttctcgacttctcgtgtggtttggagaagttgatagttagggccctccatgtcgtgcccccctcatcacttcatttagtttgttttcttcctatcattgtgggggtactagtatctcttacccgtctctcatccagcaattttttttctggtggaattaagaggttcactttcagttgaagacaaggcctttccctgaagttctgagaagactggtacggcggcaaatctttacataggactagaggctggggcgccgcctgcacggactaaaacgacaatcagtcggtaaatagatgagggaaatctatgaaaatttgataagcgacatcatagattacagttcaactcttgtggatatcaatagcatcgtaattagtattgcctttttccgtaataaatatcctactacagatggacactttattatcaacgtagagcatctctgttgaaatttcggttcgttacagactcttggttcacatgaatatacaatgtttttattacataataacccaaaattaatagaaaaataatccctggtacacattgctatacactttgggtttttgcaaatagggtaactgaagaataatgggcccaacttttcaagattacattcagcatcccatcatattctgaagaatccaaacatgttggaatgtaagtacatgaaaacatacgttagctaatgaaatcatatattgagaagcacctgcagatatataccataccctaataaaaccttaccgcactaagtgcccgagcacacgaaaaaattgttcataggtcaatcagtgataatggaacaccaaaattccattgatgtttatttatgagctagcagctaattagaagtgggtaaaatttactcagctagtatacctcttacaggcacatgggaaccagcctctagtaggatttgttcagttcacgacaccgcaaactccaagctccttcaacagaagaaggtcttggggaatggaatggcaccgagcagaagatgctgatcgaaccaaaagaaaaatacactatcaaagcacagcaaactaaaactccaaatgaatcaaaacatcaagactgcaggaaaagtagtagctccccaacatcaatactggatccacgtgctgaagaagttggtggaggcgcgaccatcggccaccacgtgcggcgagcggctagaccggccagttgacgacgacggctgcaggttacgacgatgacgatggcggcgaggcacagttcctcgcaggcaaaggagagacgagaggggaagaggagaggagtgttcgcctcgtcgctttctccgcgtccgcctcgaagtccgcgctcggcgacaacggcgaagcgaggggggagaaggaggtggaggcgctcggagacggcgacggcggcggaggcggcggcgacgacggcggaggcgcgagacgatgcggacgacgatggcgacggcgcgaagcagaggtggcggcgcgaggggaaagcggagacggcggcggttagggttttgggctagtgcgtgccgttttgcgaaaaaacccctcagcttccacattttagagcgcagacctaattcacggtttttctcaccttctaatagaatacccggatctacgaagggcctaaacgtaaaaatacaactcagtaggggtgggcaaaattagaccgaaccgaaaagaccgagaccgagaccgaaaaattcgggtagttgttcggtccctaacatcaaaagaccgaatttatttcgggtatttcggttattgggctcggttaaccgaaatacccgaaaggaataagtccattttgcgtccctcaattcttgccctttatcgaattacatccctcaaccacaaaaccgggtatatcacctccccaagtgttaaaaccagtacaaaacaactcccttggtggtttttgatgctgacgtggcatcctagtcattaaaaaaattaaaaaatacgtgaggtcccacacgtaagtggcatttctattcttcctctccaccactctcctctctcctcccccttctctctccctgaacagagcacggccaggggaggcgccggaggtgcgtgaggtgtggggaccgtcggaggatgcggcgggtgcacgccgcgagggagaggatccgctgtcagtagcagtagatgcaggtggtagcggtggcggtggaggagaggaggatgcaggggttaggaccgaagcggagctcgaacaaggacccaacacaccaaggtggacggccagggacggcggatccgaatgccggcactgtgcgccgcccggatcttccagctgacgcgggagctcagccacaagtctgacggcgataccgtccagtggctgctccagcaggcggagccggcaatcgtcgccgccacggggacggggaccataccggtgtcggcgctgacatccgtcgcaccatgccagggctagagctaggactctcataggacggccacatcggcgtgctcgccgcacagtcgctcagccagttctaccaccaggtcggcggcgccggtgccaccggtcaactgccgcacccgcaccaccatcaccaacaccatcagcagcagcaggaggaccgggaggatgagcgcgacgacggcgagtccgatgaggagtccgggcagtagtaggcgcaccgccaattgttcatccatgcatctcacgttgtctctttggagaagaaaaacagaattccaggaaggacatgcagctaatggaggggggatgcttttgttactgttgggttgttcttcatggggttttttatgtctgattttttcctcgtgtggtgtcgaagctcgaaagaggctaccacttgctccggcgacttgttgggatggatcatgatcatcttcagttgttactcctgctgctccatggatggtcgccggtttatccccctccaagtgtttaggtggcagctcaatcttttgcactccacagtcagcacatgacatgctattcgaaaggtagcttgatgagcttatgtattttgctggaggttggcggcgcggatagacaacaggaggatgtgttgccggccgagcagatcgacgccgtgacaggtgaaccctccccgcgtgggcgccgcggccggcgatcctctcccttgtggcatgctcctgcatcctccggcggtccccacacctcccacgcctccggctccgccgtccccggccgtgctctgttcggggagagagaagagggaggagagaggagagtggtggaggagaggaagaatagaaatgccacttacatgtgggccctcacatatttttttaatttttttgatgactgggatgccacgccagcaaaaccactgtcaaaaaccacgagggagttgttttgtactggttttaacacttggaggaggtaatatacccggttttatggttgagggatgaaattcgacaaagggaaagaattgagggaggtaaaatggacttattcctacccaaaataaccgaactagcccaatagactaggaggcccagtaggccagtactaagcccactaaaataaaccctaaatcaccaaccctactcctagtctcccactcggctcggctccctcaccctcacagccgcactccccactcctccctctcgcgccgcgcctccgggctctagcaccgcgccgcctgcctccaccgcgcctgcgccgcctccgtctccaccgcgccggcggccggcgccgcctccgttcgccctggcccactgcgtcgccgccggcgccgcctccgtccgccctcggcccaccgcgtcggcgtcgcctccacctctgcccgccctccgcctccctcgcgccgtctccgccttcaccacgccggcgccgcctccgtcgtccaccgcgccgacaccgtccttcaccgcctagctcgatttgcttttcagtttgtctttctgaatctgcttgatttcctagttgcatgtgcagatcagcagatgcatcatctctctattgatctattgagttgccttttgatttgtcaaccatacatttgttgtttggcttttgtgattttttttgttcagagacttctgctctcgggttagttcggtcatgaccgagaccgaaccgaactaaccgaagaccgaagtgctcggtcttcattttttttgggaccgatcggtcttgagtttttgatgactgaaattttaaaaagaccgaaagaccgaaccgaatttctcggttagaccgaatgcccacccctacagctcagaggatggttggcgagggacgccggacgaattacgaacaaaacagagggcttttttgtaaatttccaccacgcgtactgtagcaaaacgcgtacgtggcacaccccatcgcgcgccccttccgccagcctttatatattccgatatcatgacacagagcgctcagtgacaaccgattttacgtcaaggggatggagcgacggcagatccggtgttggcggcttggtgtagtggcggagctggaaccatattaagggtggtgcactactttactgtatagatggcggcatttactctaaataatgatagttgttcatttgtagataactattgataaaaaaaatcgttgagtagcaagtaaaagtgcttactgaaatataagacgaaaagaaaccgcgaagggaaacatcaaaaattacataaaagacgttcaatctatataaaatacatccccggtctcaaagctgtcaatctcaatatcatcgataagtaatccataatagcctacaataaaagcagaacagaagtcagaaacatcttagttttcaactaaaaatttatatccaacaatgaagatgtaaaaacataaaaataaatgtgtcgcaatattcttacaattttactaagtgatggttgatggactgatggcagcaggacagcaggagtccttgtcccttccagaaatcaattgaaactttcagttcttcaaactttaaaccctagcttatatataaatttggatattgaaagggtgctatcaacaagttacaaatcaaattaataggatttaaaataagactagaactagaagagagggtaaattgaaagtttggaactaactaaaaggaagatgttctcaaaaaaaaaaactaaaaggaagataatacctctctttagtctcttgcttgtgcactgctgagtgctccgctgctagctgcaggctgcccctgtagtctggctgctcgctgccgcagtgccgccgtaatgctgcgggctgccagctagggcgaccagcagcaggctaggacggcgagcaatggtgagtcggcgaccagcggttgagcgacaggagtagacggcgactcggcaaactgtggtgagaggagattgcgttggatcaaagacgaacagacacacagccactcagatgccgtatcgcgggaaaaagaaagacaaaaggcgaaaaacgggagtcgaagagatgtgcggtgccggcgtggctgtgattaacgctcgaggcgtcgctctcgctcccggtggcccagatggggcgctattttcatgggcctcaggtcttccatgacttgctcatgggccaggggtggtgcacgaatttgggtcgaggggttcccatgtggtgaaaatagggggtaagtactaaatctgaaaattaggctgggcgcctgtgaacccccctaagcccattggactccatccctggcttggtgagacagcggagaggacgttgccgaggcatgtgacaacatatcctgaagcggtggtacacggggcggatgacggatccaacacccctgttttttacctgtggccatcatgagatccaccgatgctatccttcgacgtcgttgcctttgtcatcactgtacgcacgcctctacctttcgcagtttcaccattggtggaggcaagatgtccatgccagtcgctagggccattggggagagagacggaggatgagagacctctgtcggtcgcttggccctaggtgacttgctacgaagctacacgatgcaagcagaaagacgatgagaaaaggggaggatgccgatatgatagtttctattatttttctctcctgttcaactaggaatgaatattctaatgaagggtgtatagcaaataaccacattttgagagtgatttttttcaaagattaacttttttttgtgtctagcaactaaattcgcgaaatcacgatatagaagttagcaaaatttgcctagtactacaaatgtactgatctgtcacaccctaatccggcaccactatacaacggcacctgacatgagtgtgtcgtaggaaaaataacatgaaccgcttcctacgagaccacgatatcggtaccagtctgtcgggtcccaaaactaataattcggaaaccgacatattaaaactgtatcaagccctggatcagtagattgatacaggttcaacaatctggttcttcattgcatacatttagtcaaggtttcaaaggagatattattacataataatattagggtatttacaagattgtggctaactgttacaacagaagccatagaatgactcaactctactgttttgctatagacttaaaccatctatctaatctatacttgagaactaagttagaatgagactaacttatatgattgaactcccagcttcagcaagaacatcaaattgactctgaaaaaggggggttgaagcaagggtgagtacaacgtactcaacaagctattatattcaataatgaatgcatgaaatggtaatatctgagtagagctaggtttacttgcagaaagcaaagaatatagaggaagaaagcctagaatgttttaaatacaacaatatttaataaagtttggaattaagtttctaaccaaataccatatgagtcccaatgctcaaatccgtgagcacggctattcgaatagattcatttatactttactgcagtaaatgtacgctttacccgcaatccatgacgtgccaaacacattagccttgtcatggcaaagctttttagttactaacatcagtggtacctgttccatgaactctagtccccatgcgctctgaatgtaacgttatcagcagcgagaggagttctgacgttcccgaggtttttggagagaactggttgagagacccccgtgtaggatcaaggaggccgactagagggggggtgaataggcggttttaaaacttaatggtacaaaagaatgcaagtcttccacatctcattatcgggaaataacctagtagacaacttatgcaaaagagaggttaatcctataaacatcggtttatcatctatcaccaaagtaacaattacacaaattgtttaatccaagatctttcaatcttttctctctttggtgatggataataattcgatataaacaatatagagagatgagatgaaagatgatttcaaatcaagatagaaatcttataataaacaaaatatagaataagctcccctcaagtgtacatacatatggatataaaggaacacatatgcacataatcaatcaagatcaatgagggagctcacactatattttggatccacaagagagaccaagttagaatatgtgaagtttaatacatacctctcatcatttttattttcatatccaaatgagactaatcaaagaaaggctcataaaaacgttagtctcatataattagatttgtcattaatcaccaaaaccaaattaaggcacttgaacttacaatctccccctttttggtgattgatgacaaatccattgataataaccacatttggatatgaaggatataaatcaacattatattgatatgccaatgacatgctgatgcatatgatgcatatgtaatgctatgatgtgggatcctagaatatttcccccttttatagctatgatcataaggagatcacaaatagatcacaaatattctctcccttttggcattaatcaccaaaaaatgaaaaagggctagaaaataggcaattacaaaatcccaaaaaggaataaagactcacaaggccaaatatatatatatatatatatatatatatatatatatatatatatatatatatatatatatatatatatatatatatagaaatagcccatttagaaaaactcccccttactcatagagtcttttctttggatagagaatttggaatatgtttcatatgtagaaggggtgagtttgagcacttgaactttcacttgagatattctcatcaaaggtttttttcaagaatgtcaaaaattgagaagagcttggtcaaggctatttggaagaattttactcaagtgcatgatatcggcaagtaatgacaatgatgagctagtgttgggttcaagatgatcaagggatactaccatttgttgagagaccacttgtgtataggaattcgaatttgggatcaaggaatggtagttggctttggtagcaaggatcaacttgtatttggtggcaaagattggaatttggagtctatccatgaaggcttggttttgagaagtccaaaaaaaaaaacttttgagtttaggtggtttcatgtatcatgggcatttcaaaaaccaaaagagttcaaataaggaacatatccaacatagctcaaggattcatgaagttttcaaaataacaaagatctcattatttgaaacatcttatatttcaccaccatgctcaaataatcaacaagaagtgacatgaactttgaaatccatgtttagctgaaaaggcacatagcaatggcgacgtcttttagcaatagaaacctgtgtaactaagctcggaaaaatatgccataaatcctggagatagttcatgtaaaaatacaaaaatttcattttggggtcctttcccagatctcaaccgaattgaagaaacaaatctcacaagctttcagccaactcaaaatttcagactttttcagatttttggagactgaaaatgaggttgaaaaggcatccaaatgaccagctaaaattctgagtaaatttgtaagtaaacttcaactattgaggatcaaaagccatattgtgatcttcttcaaatttgcaacccatttggagatacaaaaatcacaaatcagcccaaaaacatggttgttctgaaaatttcagcaagctgagcaaaacgagaaaaagtcaaaatctttgcaaatcaaatcgaaatgagttgaaaccttgcagatttgatctttatacttgtgaggaacttttccaaaaagaatttcttaaaaatcatttttctatcaaaagataagacaaaaggagcattgtaggcctttagggtgagtaaatttgagttgagagctcaaatcacattcaaatttgaaatcgatggagtttgacatttgtaaagccttaggaggattatagatacactttcaagccaagattcacaaagaaatttggctctaaaggcttaacacgccataagcaagtttaggccgaaaatggtcaagtcaagatttttgctgaaattcaaatggttgtagagtttgaatggttggtattttggaaaaacattgaactagataaatgtttgaaacgaccaactctaaaagttttgtatggaaagcttttccaaaaaactcaatagattttgatttagagaaataaaatattttcaaccaaaacaagaccctaaaagatcctattgagaccaattttgctattttgtttgacaaatggaaattttgactccaaaagccttgaaaaacatttgaaatacaaattgggatacatttgaaaggattttcacatatatgggccatttaaataagatttttgacttttgtctaaaataggctcttttgaaagggtatggatgcaaccttttggaaaattcatgtttgggagcaaagggaatatgggtttgattcagattgctcccccttgatgcaactctccttttttgcttcatgaattcaaggtttgatactaaaggccaagtttgagaaaaaggctacacaagctctcttttcaaatacattcctccaaaagtgcaaaaagaagcaaatgagatgatatttgagagaaactaatatgcatgaagttcaaatatgattttgagccaaaaagatacaattattcagatttaagaaataaactcaccaaagtgatagaaagtgaccatatatggtctagttaaaatttttggtgagttttgacatcaaatttcttttaatatgttggtcttttggataaggttcaaaaaccaaaaacatttgaaataaccaactctatctaacttgttttgggctccatttcaaattctctttagatatccctgtagagagaaaaatagttttgctcgaaaacaagatcctagaaactagaattttagtcaaaaatgcatttttactttgcaaatactttttcttgcaaactaaagtttggaaaacatattagaggccttttgaaatattttccaagtaatagttttcaagaattatagtttttctcaaaaaattgacttttggtcaaaatgggcgttttgaaaacatttctaccacttggattactttgttcacattctaagggttgtagtgcatatgtaagaaatgcaatactttcccttaatgcgatattcccttcaacccaacaaagatgagcaaataaacacaagatccaataaagatcaaataagattgacaataagcacaagatgataaatatgttgcattaatatgatcaagcctatagcttcatatgccactactcattatgctcaacatgcatttatgatgatgttcataagaagaggaaatttaattttggaactatgaaaatgcaatgcaacatacacaaggctatataaaaaaattacaaaccaaaagcatgttaccgagatggcattggtccttgatgtgaattctccatcctcattattggctccaattcttgaacttggtgagaatcacattttctcgcataggccaaaactccaatgcctctcatgtacctatattctcattttggcacattttggtccccaacaaaattgggtccatcaatgttagttaccaaaatacgaggcacccaaatggtcctccttctaggtgcaagtctaggtaaaccaacatatctagcaaacacattgccttgcctatttttcctaagcacataatcatcaaaaataatattaggcttaggagtattacctatgggacaatttttaccaatatgtccctttttgcggcaattgtagcaagttaggttttgacctctatgacttgtcgttttgtcttgcttcttgccggtttgcctcaatttgaagttgcacttctcatccttcatgtttgcgcacacggaggcaaagtgtcccttctcatgacaaccaaaacatgtaatgtgaggatggttcttactcacatttttctttccatcatttcttaagtatgcatgcttccttgcatatctaggcatgtgtcttgtcttcttagcattctccttgcgatgaaagccaagtccacacttgtcatttgtgctcttttgcttgcttaggatttcgtcaagtgtgttcttccctttgtagcttctatccaagtcttcttttaaatctttgacttgggcttgtaattgcttgttttcctctacaaggttagcaacaatatacatagaggaggaagaacaagaattttcatctatgcttgagctacaaggtacatctaacaagtcatcacaagaggtggacacactagccttagatgtactacatgagctagctacacatggcatatcatcatcaattaaattacatgtgatgcctatgtccacctttggcttactaaatgcatttccaatgagaagagactcataagcttcttttatcttcttataagaatcacaaagttccttataagaatttattagctccacatttgagtctttcaaagagagaagagttttctctaaaatttgattttttcttcttctctttggcaatgtatttactagcctccctaagaatgttaaaaagatcatcatatgaaggttcatcatcatcaccaccatcatcaacaacacaagtattttcaataatactatcgagagaatcattctttacctcattcttacaatttgtcattaagcaatgaggtgatgtggatggtattgggagctcctcatcatcacttgaggaggtggagtcttcacccgacatcgattcttgtgtgcaaccattctcaacaagtgtgggcacttcatatttttctttaagctttacccacatagcatgtgcactcttgagattgcatacttcattaaacatgtcatcactcaaaccacaaaataaagcattagtagcttgagcatcgagatgtaggcatttatcttgcccacttgttggagcatggtcatccaaagcatgagaaaagcccacatctacaatccaccatatttttgggctcatggccgtaaaataagaaatcatgtggattttccattgtgcataatttgtgccatcaaacataggagggtcaccacccgtgtgtactatatctctagaagccatccttttctctcggaatagttaagtccacaaaatgagagaccaagctctgatacaacttgtaggatcaaggaggccgactagagggggggtgaataggcggttttaaaacttaatggcacttaaacaaaactaacctaagttgctaggcaaggtaaggtgcaagggttaactaagcaactaagttaagttttgcaaacctaggtgatatgggctcaaatatgtctctatgaatgtaaatagcacaaatgtaaatgcaacaaataaatgagacaacagacaaggaatttttcaccgaggttcggaaactcgccagtttcctaatccccgttgaggcgagcccaactccaccgctcaaccacgaaaccaccgcacgcccccttcgtcaaggggtgggcaaggcgggagccggcccacggagaggactacccaagcctcgatcactcggggtagttcttccttcactccgaaggtggtgaactccaaaccactcacaaacggcaccgggcctcctccacaatctcctcggagaggtcaccgagcaacacctatacaagccgtctaggaggcggcaacctccaagagtaacaagtctaggatgcttgccgaggatgatcaagtgtcacactagctataacaatgaagcaatgcacttggattggcttaactcactctctaacacctcactagataaacaaagtgcacaagggtgtgagagctcttgcaagggttcaagataatgcaatggagtgccaaaaccttacccttgctgctggggagtgggtatatatacccccaaccaccaaaactagtcgttggaaccgaaatccccaactctgtgccctgccggtcagaccgccgttgtgaggccggtcagaccggactactttgtaacggctagaaagctagccgttacagggcaatcattgagcccactcaacctggtcggtctgaccgcagtgtagtggccggtcagaccgtcaacggctcggtcagaccgccgtcggctcggtctgaccggttgcggctctggcggctttgtatcgccaccaaaaaccaaaccagtgcaacagaccagtgggccggtcagaccggctttaccacgccggtcagaccggctaacaggcctggtcagaccggcctaaggcccacggtcagaccgcaggtcacttttcagctcaaccgaccgttaataaaacggcgatatctcttgactcgggtctcggaatttggcgttcttggactctatggaaagcttattcaaagggctatccaacccatgaacaatccatccaagaaacacaacttttctctgggagaaagggctcacactccaaaggatactccaccggacataaccacatgaggctacccaaacctataggatttgcccacatctctctttgtttaggacttgagaaaactcaccatacttggctagacaagcccaccaaatacacctacatgcatatgaactaatatggcacaagatcatccacaagctcgcttcatagacccctcttgatagtacggcgcctatctagcaaatccggtctacaccaaacaccaagaccgggaaaagactaagaaaacattcttagctccattatacatttgccttgcgcatccaacttggggtcaagcttgagtcgagatcaacacttgtgaccatttgattcaaccatgtttataccaaggtattcacaatacacacacagtttgtgatatcacaatttatctcaaatatttacatgcacctcggtaaatattacaatcgccctgctcggcgtaagtttgcctcctgcgcgaggacttaagaagaaccactatacagaggtaccaccttttctagataacttaatcagctaggtctatgcccatacgagaattgcggtcgtactcgtatgttcttcacatgtacttggcaattttatgtcggttggaacagtactagccacccggaaatcaaccatttctaccgtattgttccaatctaagtttattatattttatgcaatctaactaggcatggctaagcaaaatctagcatatatctggtttgctatatattcaggttatgcattcgaaatcatgtatggctaatgcataagataccggagatatagaatataggattattatgctcaaaggggaggaataataacttgccttgctccaacgcaaataaatccaagataggcaacctgattatccgatccttgaaatatcacaggctgccatccaaaatagactctactaaagaagagaaagaaccaaattcaataaaaatcacaaaataataagaaagcgatgaagggcaagaaaggctgggtttggggtataaatatctcctttataaggtatagggattattggctaatattttatgtggaggttttagagggttggaggctaaggtggagaggggatcaagcaactaatgtcgcttatatttcatgagtgggctttggttgtttggagagtaagagaaataactggttaagtgagtatgtggctaataatggctggtggcaggtttaggtagtataatacctaggatttggttatatttaggccgattggggatagggcaatatatcggctagctctatattttatatataggttctaggtagttagagagtaggtggctgagagtaggatggataggcgatactggtgggtgtggaatttggatgacgggtgggatttatctagtaaggtgtcagctaggatttggttgtgtgctagtcgatgctagtgttgaacagcataacgattagatttggtgtcttctctagccggtgtcgatggacagtataacggctaggaggtgggtgcaggttaattcagtggggcgaaagtgttactccgacaaccgtgagtggcggcggagcagctaagatcacacagagcccgagagctaattgtgtgacgtgctgtggaggtcgtgggaatagtgaagctccgaccgttatacgcgtcgaggtgtaaggtgccaggagcagcacttcgaccttgggtttgggttttgccgggctttacaaccaacggttcgacgtcggggctagtagaccgcgaacgtccccatggaaggcgtaaagtttcaaccggcggctttttaatggctaaagggtaatttgggacggaagaaaatatttaaaaaggcaaatataaattcaaacaatatttgaataaattcaaataaaattataaaataacaaattgggtatcaaaatatatcttttgaatttagatgaatttaggtccaagtttcatcggaatcggatctacggttcaggagatatgggcttctaaagtttggattttgaatcaaatctagaaaatgtgaaatagtactgtaggggcccacctgtcagttttccttttccttttcttctctctttcttcttccttcttcttcctcccgttctcttcctcttttctgttgccgagtgagttgagaggagggagaggaggggcgccggtactctggtggttgagaggctgcgacgtcggcggcaaaacatgttcccgagcgacgcgcacccggggagggtggtttccggtagagagggttagggtcttagggaggagaccggaacggcgacggcaatagcttgctccggcaacaagaggaagtggctgtgatggtttgtttcaaaggggaagggaaaggggaaaggggtgaaatggattcgcctcgtctaggcaaacccgatggcgcaagggcttggccaacaacgctccggtaagggatatcgacggtggccggtggtggctagacataacaggagagagagagctcgaggagctcggctcatatgtggagaaaaggggagggctggccttctatttataggcgtcggacgtcggttttgaaggtcggttgtagaggagaagatggagttggtcttggtggcggcgacgtgagaaggaagacgacggcgccggctgtggcttgtgattggttggagatggcggtttgctccaaaggctgacgtcggcggcgtgaggtggcagatgacgtcggcggcgatgccttagcggcgacggcaggacgttggcggtcggcagagctgcaagcagagccgtgcacggcggtggtggcggcgcgtgatagcggcggcggcgcccaccgaacagggagaagagaggagcggcacggctggagtttggttgggccgactgggccgcgtgccaaagttgggctggcacaacaaggaagggtaaaaggagatgggccaagggagaaagtgaaggactttggcccaaactgaaaataaatgtttttctacattttgaatgggatttggatggttagactttaaatttggaagagatttggataggagaattatttgtggttaaatagggaattaatttggaagagggaaatatattcttcttagcacaagagcaatcattctaatatttataatatatctattcttgtgccgagaagtcttagattataggaactggaatgggagtctagatcaaaatagaaatttgaaatttggaaagggaattaggataggtttataatcaaaggatgggtccacaattaattccaattaaaatcggaattacttggtttaggttctagggcaatagtggggaatttcttggaccataattcataaaaatagaaagggttttcaaactaaatttgaataaaagaattttagttgaaaaaaggttttaaattaaaaccaaatcaagaaatacctcaatttagccaaatatatttttaaatgaaaaacacaaaagaaattaaataccagagaaggattttatgcaagttagttttagaaggtccctctaattatattttcctaggtttataaaattattaagaacataaaaagtggcatgatgcaagattagaaaatggttaattttcggtatgttacacagtcccaggataaagcgttggtatccacagtaacaattataaatcatcgcattctttaaattaaataaaatagagaacttatttacgttaacttaagttgcaactcttgggcaaaccagagaatgcagcagatgacatgaagcagcaacagcaatagcagaagctgaggcggcgaaaaccaacgaactaacacccaacaccacatgcggcgacaaaaggagagagcaaggcggcgagacggcgctcccccacggcacgtgcgcatgcgtgcaagggtgaggtgggctgctgcttggctggaccgagaggagtggcgcatggcccaggcggggagaggaaggagtgggttgggccggccaagaagaaacagcccaaagaggaaggaggggaactagactttctgtagggttttgagggagaaggatttgatgttggaattgaattgggatgtgtttcaagtttgatatgtgaacccaaaaatataaaggattcaacaaaagaagtcaaagtgagaaatgtgacattcttagaattgggaggaatatttggcaagaattacgagggaggatcgaatttcggaatttgactttttgagacttgattcggaacatgaaatgctggggtgttgattttttatatcgacgagagggaataaggagatatttgaattgagatccatagtacgacttcaattggtttttattaatttaggtttttaacgttttgcaaaaagtgggacgttacatgatcagagtagtcaagctcagcccttactacctcgattttgctatatctcactcgaaagatttttttctaatctctcactcgattttctcacttaaatttacagtgcattttcttgtaagttacagtgtaatttatgaaacttacattgtaacttttataagttacagtgtaatttttgaatcttcgcatgtaagttttaaaatttatattggatttggtttttttcttgaagatatggtaatttagtgtccattatggtgtttcttagttgctttttgccttttactgtgtctatcggattttaatccaaagattaaaaaactgtgtgatacgatcataaaaatctttcgaaagatgtacaggtactccctttatgaaattgtaagcatcgacctagcgcattagcccaagctagtgagaatatgaattttaggaataagttcacttcgtgaccctcaaaagtgatcaaaatttaatccgtgatcctaaaccacaaaaccggatatctcgaccccctaactcttaaaaccggtgcaatttgactctctaggcggtttcgctgatgtggcgcttacgtggcagtattgactcggtcttctttccacgtggcgttgatatggcgcttaggtggcgttagaaataaaaaatgtatgtgggactcatttgtcattctcataaaaaatatattgtgggacccactaacatgtagggcccatatgccatcctttctctctctctcttccattctcaagtgttatcttcccttcacaagcggcggcggtcgagggaggccggcacattagggcaagcggcggcggcaggcaggcgacactagggcggcgacggcggcggggccagatcttcctcctccctctctctctctccctccctcatctctttctcccccgttttctcttcacgggagcagtagcgacagacgggggtcgggtttggcaacggcggctgacaggggccggagcggcggcagcagagctcgagggagtaggcgtggccgctcctcgtcgctgtaccatgtggagaaggaatgagagggagagagatggggtcactaacgccggcgccgacaacgacgccgcgggaagggcggaggaggttgtggatggggttggagtaggcgctggccaccgctgctccggcctctgtccgctgccgccgaagatctggccccttctccggccgtcgcccgcccgccctctcgcccaccgccgccgccgccagtggccctatcccatgctcgcggagggaaagagagataggggaggatgaagaaggtagagagaggatgacatgtgggccccacagtgggtcccacaatatatttgtgtgtgagtaacaaatgggtcccacacgaattttttatttctaatgctacctaagcgccacgccaacaccatgtggaaagaagaccgagttaatactgccacgtaggcgtcatgttggtgaaaccgccctccaaaaccgtcgagggagtcaaattgcaccggttttaagagttgggggtcgagataaccggttttgtggtttagagtcacggattagatttcgatcacctttgagggtcacgaagtgaatttattcctgaattttataggtgctcaatgttctttcctttctttatataatcaaaagtacctacactatccaatatccggcgacaagcaaaaggagaacaatgctgattgcatcgactgcagcaccttcttctttgatcatcacggattaaacaatcaaaagctctgaccttgtcgaagatttggagcacaaattaaagctctgccattctattttgcgtatcatgctctgaatgctaaaagcaaaatgtatgcctttggtgatggatcaattaaaaaaaaacgaaagcttagccttttcgaacacctgatggactaatttaaacaatctactagcttctggtggtttctgatgcagaagtaccaggcaacatcattcgcaaatctcaggtcgtacatgcaccacttcaccaataggctgtggccctagtaactttcatggatagtatacttcaagcaatgcccacgagaatttctccctttccacacgttgttcttttgcgtgggcagcagccatgcaggcgtgaggaaagcagagcacatttcatggcctggaatttttcctggtggtgttaggtgcttagttgggtcactttccgttgagcacaatgccattctctgaagttttgagaaggctgctgcagtacagaatgtactgcaaggagtaatcagaggtactacctccgtcccagaatataaccatttttaaagttgaacatggttattaagaaagtagatataagtgattgatgtagggttgtgattggttaagatggaaaaagtgaatggtggagggttgtgattggttgagaagagaatgttggtgaaaaagttatatttttggataaatcttgagagttaaaagttgttatattttgggacggagggagtataatggtatagtacattgtactactacttcaatttggacgatcgtgtactatagtcttcgtgtgattactttattaaattagcgtaccaggtgcctgcaggtattcgtagttgaagttgacaagcattacttgtcagtaaacgtggacctttgcatagtccaaagttaggctgtggccattacaagtgcttgcatattcttggacagtcgagtaacctcactatgattggtatttttttgcaagttttttagtactgaattgcttttgtactgtcgattgtacatttgtactacgaagaacctgaactctggcgttaaccaacctgatattttccacaaatgttcaacagtcaacaaagagatgccaaccaccagaccgacctgaaaccatatcgaccgcgtcagtgaagcatcatatcacgattctcgcatgccctactgccctgcaatgcaaggaagaaagcttcatgattcttccaaattccaatccgtagcagtcagatgcagacggacgcaagggcacgagcaatggagattattcgtcagtaaagctgatatccaacattccaaccacgacgaccaggaaacagagctctgaactttgctttgatgcggacggaattgtttcttactgaagcccaccgcctatagctggagcccggaattgttagggtttcgggacaaagtcgttcttggtactgttcgggttattcatgtgctgactttacgctaacatcttcatcaaggggtcttcctagctctgtgttatttcccttctagtttcatcggggtgttagagatatagttttgtattcctatctcctaccctttttctctgattctctctcgattctgtttctataaatagattgtagagatagagatgtaccgggtctatgtgtacttatgtgcatgattaatctaattatcgcaatgactcctagcgctttcacgccggccatcgtaggggacgccgctcgcctctaaagattggtcgaattgggtgcgtgatttccttactcaggtgctcaccccctcctcacctccgtcgtcgtccccgtaactttctcttctccctcgacggaggagagtgttggttccatcgtcactaccgcgagcctcattcaactcatctactaatcactatgctgttctgtttacaatggtttgagaatcctaaaagcggaaacattctttggttcccgctaataaacccgttctttagtggtggattaacaaaaccagacaaaagattcagtcttttcgaagatctgtaggacagatttaatcagctagtggtttctgctgcagaaacaacaggcgaccatcttcttctgaagaaaggaaaaaaaaacagcaacagtcagcagcgctcttcaatctgtctgtggatggatgctctgaaccgaagcgccagtaacctgaacgcacgtgtttctatcgtttccatccgccaatgttcgcgtgggttgcaggcgcgaaccaaagtggagcacgactaatggccgagatttttattccttctcatcatcgtataattcatccatccaattattcagcgaacctatccggccttggcaacggaatagcctatctgacagagtgacagttacacccacaaaacctctactgacgaaaagctgatgcaaacttcgcgttgaaacgcaccatattgaatttgaattattgatctctcgatgataaacatccgcaaccttttttcactattatgcttcagtcttcagagggatgtaacaaatcagtgcaggccaagctcggaggtgacatgcagtggaaccaaaaagagctaaaagtcttaaaaggtcgtagcgtcaatgagtgtccagttcatcgtgtttgtgtcagcgagttaagtaccctgtttgtggaagtagtgacggtgagattgccacgaaagggaaaaaggcaatgtgccaaccttcacaaaaaaagaacttgtggtgcgagccggagaatctgttggtgataagttgagggaaccgcaacggtgggcaaatgcgatcgaaaaagggatcgtcgctgatgcggacatgatgggctgacgggaactggcacggcacgccgagatgccaatatttctctcgccagatatggcacgacgacgctactgtgctagcacttgtcctcgactgtgtttcagtatcgtagcacttgacaataagcacaactaattgttgtgttttcatctaattttcttctcaactgatatacacagtacagaaccccaacccctatgaacagcatttctgcttttggggatttatccgtcatagctacacccgttcttcctctcgctgcgcctaaatcttaaatctaagtccaaaacgctcgatacacgatctcttttctagtgtttctgcattgacgctatacgtctatacgatctctttttttacgatctatacgtctgcattgacgctgtaaattacagcgatgcattggctagtttcccggtatgaacttcatgcagatgggtggcttgaccttggccagcgcgagcagcgacgaagggaacgtccaaatcccgtcgccgcagatgaggccggacgcgacggccggcacgagcagcgcggccctcttgccgtcgaacctgtgccagaggaacaccacgaggctgccggcgcacatgtcgatggcgaagctggcgccgacgaggaacggcacggccatggccatgggcagcggcatgtaccgcccgtacctgcgcggcaggaagtcccgcgccaggttggcgagcaccgcgaacgcgaagaaccccgcgcacagctgcaggcagtgcctcggcagcgccgagaacccctccacgccgatgatggccatgttccggtagatgagcgcgtacggcgccttccagtacccgttggggtcgccgacgtcgaacgccttgtagaagaggaagaaggtgagcggcgcgacgacgcaccccatcagcgtgcccaccacctgcccgaccagcatcgaccgcggcgaggtcagcgtcaggtggcccgtcttgaagtcgggcataaggtcggcggagatgagcaccagctgcttcaccagcccgcacccgacgagcccggccaccacgccgtcgtccttcccggcccacgccgcgaagatgaagagcgcgatcttgccgtagttgtaccccatgttcatgtcggtgagccccgtgccgtaggcgttgcagaaccccagcgccggcgccagcaggtacgcgatgatcacgtagtaccacttcacctgccggaacatcaccgggatgaggaccacggcgatgacgctgagcagcgtgtacccggtgtacgccatccaggtcgggatgttgtcccggttgaacacctcgttccgctgcatgtcgtcgatcgccatggtgtccgcgtccgccactgcaaatgcgtaatgaactactcctgtaagcttcagcctgaactgaaaatacgcgaggcgatctaaatctttttttacggtgcatttacctctgttgttaagacccctgcgccttgatctttcgcgtacgctcttgagagtgacaacgatcactttgacgaagttgtagaagccatctccaacgagaagtgcaatgcagatgaaggactgcacaggtagcgatgttgagtttttttttttcaaaaaaaaaaaaagctaggaaatgtgtatatattgtgctgcctgaactagtctagtagtactacaaatgtaccattattgggacaggtgaactgatgaacacaccttgtaaccgaacaggcccgacatgctactttcagatgccttagcagagtaccaattccccttctgcttgccgatgagcggccacattattccccaggagaggatcgcgccgaacaagagagagaggttgacaaggtgagaacagatcatcccggcaccaacatacgtgagactgaagtcgaagaaaaatctggtgatggaagaaattactcagcaaaaagttgtttttgttgcggctttaccactgaagcatacaatgatcagtgaaaaagaaacagtaaataaaaattgtatggaaacagtaaaaaaattacgtatgtttccaagctttcagcccaaaggtagggaactggaggaatccgcagacgtcaccgccggtgtagaaccactggaagaagctccacaagaagctgatgccgaaatacctgaggaatccacggacttgctttctggcattgaggggaaaccattgaatcaagtcagtgaatcccaactatttctgcagcgtttttggtcggctcaatcatgatttcatcagcacttggctgaaatctgaaataaagagcttacttcgcattcttatctccttgaggcgtgtgaaacccgtttatgagaacagcagtcgctgtcccacttggatatgttagcttgtagtcgatgaccagcacctgcaaaatatcggtttttatcagattccttcatttttgcatgattgcgataattagcccactttttgttcagaaaaaaaaagactgaaggacacaataaacgtgtagaatagactttatcagtagtgtactgtagcactccaaaccataactgaaagacacaacaggtccttaataagtgagaaaaggagaaaacgatggttaatgtttgttaatcgtggtcaacgattgcaactctgatgctgaacgatcgtacaaccaatgccatttttttcagaacgtatgacagtaaagatcaatctcggaaaattcagggaatctgtcagaaacggtaaacgctgaaaggtacggcatggaaaggggaaaatcaaagaagagcaaagggagtcagtagtgtacctttcggagagggagcaaggtgaggagccccacgaagctggtggagaggaggaaccccgtcatccacccgatcccgggctccttgtagctccccggcacgttccccggcgtgctcgcgccggacagctcgtacgtcttcttgttcagccccagcaagaacgacccgaatccacctgtgctccacgcgaacgcgcgacgcggttagcgcaacgagacgccaagattggccggggtgatgagaggggaggggagacaggagagctaccgccgtagccgatggtgtagcaggcgacggcgcaggtctggatgacggtgttctcctggcgggtgaaggggcgggaggcaatgccgaggcggtcgagcgcgtgcgtccatccccggagcgcgaggaaggcgagcagcgcggcggagacgttgagcgtggggatgagccccgtggtgaggctcagcttcatcacgatcaccgtgtacaccacgccgatcagcagcgccgccaccatcccgcgggcggtcacctgctcccgccacggcgggacgcgctccgcctcgcgcgccgccgccagcgcgggctccgactccatgtcctccgccgcctccggcgtcttctcgatctccagcgcgccaccgccgcccagcgcgtggcggtccatgctgccggccgcacccgacgaggcgccccccctggggactagcagctcgagctccgagacgtcggcggcggcaccggtggccgcggcggctgcaggggagagatgtaatcgtgagcacatttgtttacgcgtaccagggcgacacaatccaacaacccatccatgtgcgcccagcgcccttgcattagacagaagagtacaagcgccgttgaattgaaacgggcaggattagttataaaattggcttctagcaaagccagaggcatttggccatctgccactctgctccacgggggtcagtaatgacagaggccaacaaggcgacgaacaaaagaaccacaaatcacgagcagaaaccagaaaggcagcaaaagcacaatccaacaccaaattgtaacgagcaccgcatgcagaaacctctcacctgtactgtcctccctgcgaaaacagcagcaccgctcggagacgacgatcagacgaacgccaccacaccggggatgggaacgagaggaggcggcaggcgggtcaattaaataggcgtcaactgcggggaacgactgaacgagagaagcagctcggttcactgtactgcaccccctctgcacgacgtatccagtacacgtgtggatgcgggggagaagtacaaaaaagagaagggggggagaattttcagaggtgcagtacaaggggaacggacggcgacgaaaatggcggggtcggtcagtgatgtgcgatttttttttccaagagcaacgaggggttggcgtttggaccctgcacctgcagcaacctcctcttcttcttcttcttcctcccgtgcacttgacttttgcatggttgggtgagggatcgcgacgtgtggaaatacaggaataaactggtgatgggagtgtgccccatggctttgcaattttctttcccctctttccgtggtcggatgctcggattttgtacatgtactgcttgtccagtttcaatctacgcgatcttaatttgtgtgatctagagtcgtagtacaagcattcgcaatatttgaggagttcgtgtacgcaaatgcaaacctcatgtacctagtcgcatgattgctacagatgcaacagattcagtatcgcttgatttcgtgtaaatagtactagtagtagtatcatgcgactgaggtatggaatatatggcattggttgtcatactcatacccgtctccacgaatcggcacacgatttaaagcatgacaaaagagatagtgaagtgatatcattaaatgagctggaatttttctacgttagaagtgaagagaattttatgggtggaaaagagaaagaaaatgtgatattggagttgcagtttgtataaatttattcaccgtattcaataatttagcgagaccagagatttatcgttggcatctggacgtgtgttgctcctcttattcctgaggcacacgagtgtagtgtgcatctttctataataataatagaaaaaagagccttatcagttgtccatattttctaataagccaaaatagcttattagagaataaaaattaatttataggtaaaaattttatatatttgttcatagtgattaaaagccaacgctaaaaagaaattaagttcaaaatattttaaaatcaaattcaaaattttaaaatttggtttttgctttgaattattaggccaaccgatggggctaagagttttggaggtgtttcactgtgttaagctgctgctacacagccgtagtagtgcggctgacaccgtagatatatatctttgctctggtattatagttactgccccgctttcagtcacaattggtactaccgaacaccccctctatgtgttatactcaactaaattttaactgtgcaaatatagttatcgtgcatgtgcactcaaccgcgttccacctcacttggtggttccacgtcactcttaattcaattgatgtcaagttagtcctgatataattataaaggaaaaaattgtactcctggtatccagcttttttctgactaaaatttagggggcatatttaattgcaaattaattcattgtttttggaaagtcaaattcataatagagttggccgcatgaactcatgcctgttcagtgtatggtgttccgaaatttaatactaagaaatagataaggtaaagtagcattcttatgaggctacttgccagaaatgatataatcagaaaatgatatgatcagaagttggacatgaacaatgactctgtatatccaaatcgaaagtcaaatagcataggctagagatcgtcgagcactcgagcccccaatcaatctgtagctattacgaaacccaggtaattaagttaagaaatccggtgcatccatctcatttttcaattaagatttcccattgactgtagtttttttttttgtttggggggtattattcttcctagaatattggtggagtacagccggttgcaacggtttgtagtagaatgaacaatgcgcgacacagtattgtgataaagcctctgcatcagtataaaaaaaaggaactgaagtcgtaccattaaatgcccttcttttgagattataatgttgattataaagagcacgtagcaaacgataagatttttctaaaaaaaaactttcctcacctatatttcttaaaaacattttttaaaagtgcattttttgtaatattaatttattcgtttgtatactcaagtaattaacataaactcagttaacaattcatcatccattagcaaattcaaattgtcctaaattagctgggttttctatcagtattaaagaaattctattggttacactggagtactggactaatatttaactggtacggttaatataaacctagcgcaactctgttggaaagtcaaatgcatattagagatagccagttagccacatgagctcatggtttacaggaatcaagtgtatggcgttccaaatttaataaagaaaacagataaggtaaagtagaattcctctgatgcaactcgccagaaatgatctcatcagaacaggggaaacatacactaacatttctaaatggcaagtcaaacaggcataacatatagagatcaccgtgacccaaatcaatctgtagagtcgtagagtggacgatcgacaaggcctcgttgtgatagagagcatcactgcatcagcatcggcctataaaggcaacgagtgtcatacggagtattagcgttagttgccaaaaacaagcctggagttagctccatgtatggcagtatggacttctgaaaggagctagaaaagttcttaactaaccaaaagcatctgaaactgacgctactttcctcctggtactgctactctgctaagaagattttaaggctacgaaactttcgtagaagcctacataacgaaaaggttgcatgggcacgatgaacaacttggagacacgagacccataactgggccatcaagcccatcatgccgtcaagaatcaggaaaaggcccaaactgtaaccgctcctactacatcagcccaacgtaccaacctcatgggcttaatcggcccattacgcgctggttcggcccggtacagcgcatgctgcaaccgcgtacaggccatcggaacgacacgtcggatcgtcggcgtcggcagcagcggttaaattaacagaggcgggagggcagcaacaagtcaacctgccaccgtgccaccgcctctccgtccccatcaccctcgcaattactccacccgccggccagcccaattgtcgaaatggcaatcacccacatcacatgcagatcctccctaaaccactcgatcatcccgcccccactcctcctcctcctcatccaggtagatcccaacagccgatcagatctcccactccattattcgcctcgcccattgccccgtggccacgggcgaagccggagggaggggagagacgcggttcctcggtcgccatggacgggctcatcaaggggctgatcaacgtggcgatcgacgccgtcgaaggcgccggacgaggtgagcggggcggcgaggacgacgcgccgaggaggcaccgccccgcgcgggaggaggaggagggccgcggcgacgagcggtcgcggtcgacgtgggccgaggtgagcgccacctgttcgcgcgattgcggaagaagataaaggaaatcgtgagggatgtaattggttgggtttgtcggtctaagcttcttagtgttttggggatgtggcaggtggtctccgatcacaagggcggcgaggcggaggagcgcccggaccatcggaattcgaggcgggtgagtgacgattgctgttttgtctgggagaacattaatccagaccggaattcggttttagttaatcttcttctggtagtttgcagttagtgttatggtagtaggggcgtagttaaggcccgtttggcacagctctggctcccaagtccaacttatttggagctggagctgttccaagcggtccaaatcctttgtttttcggagcggagttagcagagctactccacaaatttgtactacgggggtggagctgggtttttctgctccacagctccactctaccccaaaagacccataagtgcttaataatttaattctctggttgaatttaggatgggaggcaagagaggagggaggatggggattgggagagggtggatggccggaagcagcatcagcacaaccaggttttccattttgtgtacacattttctgtaaaaattgtaagtgtgccactctgcttacgtagctgggctccacgtctgtagtatgaggaagagtacaggagggacagtagtagccgacgcccacagcagcatcagcaagcgccagcttacaggaggcagcaacaggttcgattcagttatcttcttcctttttctttttgcaatacagatatgtacatgaatttgagcaattcacatattatatgtttgtcgtgttgtagccttggtggtgctttggtggttgtgtgtggcacattttgagtttgttccttagtcacagaatagtgatatagagtgtacaggtctagtagtatatgcgcgttatgtagaatgactctttatttctttgatcttcttgtttaagcttcttcctgaaaaataaagagttggtctaatggtacagctcgattgaagcttgtatatctcaaccttggctcattagctttcaaaaggaaaacaaaaggagatggaagcttggagtgaatactaaatagagcttgataatctcatttccggatgtgtttttcctatgctcgttgcgcttgactaatgagttgatcaagttaataatgtgctaatatttactgcaaaatacatgcttataatctcataaacgaagttacaattatttaacagttcttcctgctgctatttagtttttttttctagcatcagtttgaagatgggacaggtattttgagtgtatattgtggaggcttacctgtttggtttggggtactcaggatggagatgagagaaatgatggagggtggcagactgttggtgagaaaaagcatcatggaaggccacagcaggtttgcttttggttttctaacaattagatacaataacatctgcaaatgttataacttactgagatttttaggtatctgtttttgagtcaatttgagcccatgtttatactcaaggtcaactgactactataaataccccgacaccccgtatcactgttcttgtttggctgaataaagtcaataaacttattacatattattttctaaaagatatttaacgtctgtcagttgatgctgtctttgaactggttagcatgcaaaaagggcccctaagctattccattttgttcaaccaaaccccttttcttaacttgttgatttgagcccctgagatatctacaatgtgtaatcaagcattctattgcactctctgttatatgacaaaatgagccccaagtgtcaggcacagttgaccaacaatctttcaggttttgagcaataccattgaccaatactttgaagctttatgtatcagcccaagcactttggtttattgtactttttgagaactttagtgtttgcatcgttctaccactgtcagagtcagttacccttttataaatgaactgatcgtcagtttccatttcacaatatgagatcgccgtattaatatattctgagcttccttatcctgtctgaattctgagcaccttcataattactatactatacagtctgaagcatggaatgcatacagaaggccaccatctgaacaacagtactgtgaggatgctggtcagatccaccatggcctaaatgtagaaccaaccagggaggagctcaacagcttatcaagagcttgtagccggctgtgggaactcgatatgaaccgcctaacacctggtaaggactacagaatcgaatgtggcgaagggaagaaggtatatcagaagggtgatatggcatctgaaactttgttcagctggctaggcgatgatgtgcttagaaagcccacctactctcgtttctgcgcgcttcttgacaattacaatccacatcaagggtacaaagaagttgttactcagcaggacaagcacgaggaagtagcatttattgaagagattgccaggacagcgccaatcaagtacttacaccggtatttagtgctcaagggagtcgcgtctcaagactatgaggacttcaagagaatgctgacatcgctatggttcgatttgtatggaagaggtggcagttctagcagctcttctgcatttgagcatgtgttcgttggtgagatcaagggacgacgaggacagggagagaatgaggtctcaggattccataattggattcaggcaagttcttgtaatgttacaacagttcttgtattccttgcataaaaattactctgattggtatttcgtgaaacaattgcagttttacctggaagaagccaatgggaatgtggattaccaaggttacatattcccaaggaggcgtggggaatcggtaagtatctagtcttaaaattgatagacaagatgaacttgattatgagtaatggagctaaaatgtgcaatgctccttttggcagcctgattcagagacacagctattgactattcagtttgagtggcacggtgttctgaaatcggtatccagcactctgattggtgtcagccctgagtttgaggttgcactctacacgctctgcttctttatgggaggggaagataaccgcgttgagattggcccgtacggagtaaacatcaagtgctaccgaatgggaaacagcaaaattgggtcagcatttccaattgcagataactgaattcgttccatgcctgctcctgcgtgtatgtgattccttcagctttcagtttcacgaagttattagtgtgctgttcgatttggtcgtttacacaaaagaaccacattgttcaatttgttgtcacaatgtctctactgaaaattgtattatttggattaaccatgctgtacaagttgtagtcacaaagtcctgtaatttgtttttctcaaaacccgtaacaaaaaaatatcatctcagcacaaaaaaaaaatccttcagaagtcaatcctgcattgtgattgtcaactccgacaagagaatgaacaggtcacgtcgcggcagtggcagcagcagccgccctcatgagcatgagccttctcctcgcgtgagcgctcgcgctcgcgttctccccgagcgcagcaaggtggagcatccgccgcctcgccgccgccgcggccacggccacgtcgtcctccacggccgccgccgccggcgagctcgagctctcctccccggcatcatcatacacttcgccgtccagctcggcgtgccgcgtcgcccgcctcagccgctcgaccacctccgccatcgcggggcggtccttgccgtgcttcgcgaggcagccggcggcgagctcggcgacctccctggccgctctcacggagtacctcccctgcagcctcccgtccatgatccggccgaaccgcgggctcccggcggggtgccgccgcacccactcgaggagcttctgctcgtccttgggccgactcttgtcgatcgaccgccggccggcgaggatctcgtacagcacaacgccgaagctccacacgtcgctcttggtcgtgaggtgccccgtccggacgtagtccggtgccgcgtagccgtacgtccccatcacctgatccaccaaagccaaaacggattcatttctgaagaattcagaagtgatatgatccgtgttgagttgacacattttctgaactgtgatgtttgcacataccgctgtggagacatgtgtctgaccttctgatggcccttcccttgctaatccgaaatctgacagtttgggtctgaactcatcatccagcagcacatttgcagccttgaaatcacggtatatgatctgacaaacaaggaaaatcaggtgaaaatggtgtgttttctgatgaagacgcgcagtttttcggagaagatgtggattacctgaaactccaggccctcgtggaggtacagtaacccctcggcagcgcccagcgcgatctgcagcctgacgccccacgggaggacggggtgggatcggtcgaacaggtggtcgtccagcgtcttattcggcacgaactcgtacaccagcagccgctgcgggcctcgctccgtctgcgccgcgcagtagccgaggaggttgacgaggttggggtgctccacgacgcccagcagctgcacctcggcgagccactccttgtgcccctgcacgagcacgatacaatggagtcgtcacaaatggcggaagcggtcgagatcaaccgggagcgtgtcgtcatgtgtgtgcgtgcctggcggctgtcggggttgagcctcttgacggcgacgggggtgccgtggggcggctcgccggggaggcggaggacgccgcggtagacgcacccgaagccgccccggccgaccatgagcagcgggctgaagtcgcccgtggcgccgcggagctcgcggagagcgagctcgcggggggcgccctgcctcgcctcgtacggctccggggtgctcaccgccgaggagctcgccgacggcctcgtgctcgcccacgacgacgtgcacgtgctcggcgcggcggctggcacggacacgttcgagcacgcatcggtggaaacggcggcagcggcactcggggagggcggagccggtgccggcgccggcgccgccacctccggccgtctcttgctcctgcgcttgtcctggaagaggcacatgcagcccatttcttggaggaagaagcccggctgctaccacaatttcaggtacttcaagaactcagaggttgcagagaaaaagatcacgcattggtgattaaaacagagacattttctatttcttctgttgctcgacaatgacttgtctgtacttctacgtgattaaaatccaaccaggagaaggccaagagcaaagagaacacagtggaaggaagaaccaatcgatcagagaagaaaaatccagcaaagccagatttctgccagatggaagagaaatccaacagtagacagctgccgatcacaagaaactcaatggcagcagatgctcaagaggagacatgcctccaaatggccgaatcgtttgatacaacagtcatggaccatgaactgtgtactgcctaccgtgatccggctgaccggctccgaagaatcaaagtgctcaaccagtcagttctcagtcacctcccctgccaacctctttatccttcttgcttttgctcgaagcaagcagaacgcacacacggtttcctgctaatctgcattctgcaagcatcatgggtgtttgaaatgttcaaacttcaaacattacggcgtccattggatcatcaacactacaggatgcggaaagatatccgcagccacatctctggctttctcccaagtcccaaccaccgcctcctctccctcgaccgctgcctgaaccacgagaggatgactagatgatcccacacggcacactacattgatgttgctaataacatccttttttttcttcctctttgtgctcatctagtcatctctcgttctcttttttcattcttggaaatctgcacccggttgacaagaattattgactgccgaacagtgatgtacttcaacgtattgacccggatacgtcgttgttggcctgctcggtgagctatctatgtcctgactttttgcttcactctgtgtccatcttgacctgcatggctgactatcttgtcgttcggtccaaaaaccggcgccttatgagcggaggacaggataaatgatgtcccaaattatcacagcaaaacagattcctgccgcaggtaagggcatatacaacggtatttattaatggtctctctattgccatgcaaataaatttaatatatcgaagaaagataaacgagtatggttgttatgcatgacagcggcttatagtcgactcttagcatttataagagcaatttttgttgtatggcggtgaaagaaaggaaaaaaaagtaagaaaaagtattttgatacattaatgattagagactatgttgtctctaactgttgtaagatgctagtctctaggtaatgtagagttcatatctgactctacctttgtacacgtcctaagctaatctagtagagtatttcttcagactccaaatactatagtcaataacacgtgcattggcacgggttatatactttactagtactatgtatgttccatgtgttgcacttgcaaggggatatagagtaaaacgaatgaatggttttataaaaaatcatttttttttctattatggttttctagcggatctattctcacgtggaagagaattttttaccattcttgaggtaccacgaggtaccaggtactaagaggtaccaactttgtctatccatccgtttgcaaaggatacgatcggaataacacgtgtggtaacccttcgctctgcatcctcgtcttaatttgctctgggcaccggtgacgtccgcggacggcgcggcctcgcctttcctccagggtgccatcgggcgtccgtccatcgttgcggccttcgatccaaggcgccacctccatccgtccagtgcgccgccgggactgccggccatcgatccagggcgtcgttgcttcacaaagacagcctccccgcttcttctgctagccatctccaccctccccgctgcagggcaccgttgccttcctctttcagccatctccgccccctttgctcctggtcatcgtgttcgccccaactccacacagcaccagtgagtacggatccaaattaagctccacactttgtcagtcatgccatgtccatagcatgcagagtggtttgttattctaagccttgtttagttccaaagttttttttttccaaacttccaacttttcatcacatcaaactttttatacacacaacttttctatcacatcgtaccaattttaaccaaacttccaaacttcagtgtgaactaaacacagccctagtagctcgcatgaagtgagtcttcagtattttagaagtgccaaagtctgtttctggaactctgaaccttctgaaactcacctgaagtggaagtgtggaactctaaattttctttagtgtagtattcaggtagtacacaatgcttattcagatcttgtttgtggaacataggatttgttaggaatttacatcagacatgtattcagaactttttgaggacggctgatcttcaagctccctgttccttctttagatgattattggagtattgttcttgaaaaggctctttcgtaagcccttttgtaagtaattatgattcagcgcatatttgatgcaattggtttgcaaacaaagctctggtttgcaagactactagtttttttttttgcatcaggcctctgaatacgtggatttatactgccttctccagtgagaagctttgggcctgtttggggagctttagattctgagaaacagctgtttggtagccagcttctgagaatctggaaaagctctgaaacccagcttctccagcttctggcttcttagttcatttttcagaatctgtaactacagattctcagaagctgtggactatttggggcagcttctagcagaagcagcttttgggaaaagctgcagctgggacaagctcccccaaataggactaaatttgtctgcttccagagttccagttgccttgccgcatgttgctggaggcctcagcctcgccgtagcctgtagctaccgccgccctggcgcgattggcctggcagctgccggtgcccttgcgacgcccttcctcactctagcggattagggagaagagacgaggagacgacgccatcaggattgaattggcaaggggaggaagcgggagtgccgacgggatgggaccctgaagccgccattcccctcggctcaccttccccgaggtctatacatactaatagggaggagggactagacccctcttcctccctccggcctccctccgctgtcgccgaagaacgggagaagaggaggaagaggggccgaacaaaagaagggattacaatagcttgattaggggaaactagagagctctcccgcctgttgagtctaggcttcaaggatcaaagttccagtattgaattagaagaggccgaggagtaaggtagcttacaaaggaggaagggagggtaatataccattaaacttcgtttttattcattgcaatgcaagtgcagtattttgctagtaccattaatcttgagtattatattgttcgtgttccatattattttctccaaagaaagactcaactgccgagtctccggtcccacatccataatttcatcgacaccgacttcaatttacagggcaaaaacaaaatacagttcacgaaaagaccaaaacgccctctgcctcgcaggagaccggtcaacgcgtgagacaagtcttgatggcaatagcgtaaatacgcccgaacgcccagcgtcatcgcaggatatacgcctcgacccggagattacctaggccaaagggttccgttcctttccgtgttgcctcccaccgcaatctcgtttcggctctccggccctctcctagggtttcgattcctcgccccctcgatcctcgacgacgcgaggtgcgtacgcccatggattctatagcctcgccttccctcctcgattcgatccttggtccatctaaatccgtcgtctttgtttggtgatctgcaggtggttttccttttttttttggttttgtttgtgagagtggggggagatgccgccgaaggctaggaggggcgccgcggcggcggggaggaaggggccagggacgaggggcaggctggtgaaggcgcaggcggccgtggaggaggtgcccgccgaggaggttaaggctgcggaggaggccccgaaggtggaggagcagaagcgccagccgtcaccgccactgcagcagccggccgcggaggagaaggcctcgtccgacgctgcagcgaacggcgcgagccacggtgaaggtattgcttgcttcttcttcttctttcttttttttttttggtatagatcgtttatgttgggttgtactatgtcagttttttggtatattaagatgattgctgcattagtgtatttttatgtggggtgcaatgaacgtccgaagtagcatgtcatggatgtcttgttatattgactgttttccatttaatcctggttagcattgcttatggtcgcatggtttgcagttggaatattagatctatgagatcatttagtactgttccaacggttggtctttgattcagtctgagtacatggcattgcccttcaacaaacagcaacattgatctttcctagttttatgcaagcaaaacatagtgagaaccactcttaataaaacattaagatcatatgtttatggcaaaacataaaagatcgtatgtttatactttatactcatggctgtttttttggctatatttttattggatagcagttgcccatgtagtaaggttgtacttatttcatttttagatgagggaactacaaaagaaacatatgaagaggataaaggtgaacgattggaatttgaagatgaaccagaatatgaagaggaggctgctgtggactacgatgagaaggacttggagcaatatgaagagcaatacgaggatggtgatgaatggtggaatatactgaagatgtgattgaagaggagacggatatggtagacgaggaattggatggtggggacgatggggagggtgaaggatatgaaaatgccgaagaagagcataatgtggatgtggaggatgaagagcatcatgaaatggtgaaagagcatcgcaagcggaaggagtttgaagtttttgttggtgggcttgataaagatgcaacagaaagcgatcttaggaaggtttttggtgaagttggcgagatcactgaagttcgtttgatgatgaaccctgttacaaagaaaaataaaggctttgcctttctgcgatatgcgactgtagaacaagcaaggcgggcggtgtcagagctaaagaatccttcggttggtctaaagatatggatattttatattatggtgtgttattattataagtaataatctcataattcattaaatgctgtaggtgagaggcaaacaatgtggtgttgctcctagtcatgacaacgatactctttttgtgggcaatatctgcaagacatggactaaagaacatgtaagatgctgaaacaggttttcttt

SEQ ID NO: 4542 - DNA, 11364 bp, Oryza sativa
atggacaactttgttcccacattggtcacctctgccatcatctaggggaatattacaaagctaagtcatcatttatttcattctttatatgatattttccttttcctttgcctcactacatcaactgattcaccgttgactagtgagtcgggggctacagatgttatcatattttttcaacaattttcataatatttatcttgattgcttgcgaaataatccgagtaacaataaagtgcctatcgagttatggagttctatcttcctatgcttttcgtttggtttgtcaatggatagttgcctttgggccgattcctagcacctgggggctcggtggatggaccgagtaacgcaaggtgctaagtattattcggaataaatcaaaagcacagagataagataaatttattttctgctcttaacaattgcaaaagtactcgagtagtaaattctgattcgtgaaactttgttccattaatgacgagctcatgtcactcatatgcatgtttgggaagtgcctaggccgactcccgatgcttgggggctatgactagtcggacagagtgtttaaacgtacggagtcatctgctcggggaaatcaaaattgacaagaggagaaatatatatttataaatattttaaaatacttgaatctttctcaagtactgtatttacatcagatactactcatcctatatgtttgttctgcaggatccagatccagatatgcataaaagggattaatggctttaagcttatctcttacgctctaggaatggatcagtcagaacatcaccaccggcttgctttcgcagccgccgactggtgtcaccgcctgcacggctggcctattatgccaccgttgttgggcgtcaacgtcttcaccgaccggccgcctcgtccacctccgactggtgtttccgcctgcacggctggcctattatgccaccgttgttgggcgtctacgccttcaccgaccggccgcctcgtccgccgccgactggtgtttccgcctgcacggctggcctattatgccgccgttgttgggcgtctacgtcttcaccgaccggccgcctcgtccgccgccgactggtgtttccgcttgcacggctggcctattatgccgccgttgttgggcgtctacgtcttcaccgaccggccgcctcgtccgccgctgactggtgtttccgccttgatagctggcttattatgctattactgatggacacctttgttttcaccgtctggtttttgccatcgccgactggtgtttctatcttcacgactatgcgtcttcgccaccggtttgcttccgctgcctccgactcgtgttcacttcatcacggcaatgcaactttttcatcatggtggagcgacttcatctttattatcttcggcaccggcaaactctattgctgctacttcgcaagttttgctacttcaccaaccacgacgtctttgtgaacctcgatatcttggcatgcgatgccgtgttattttactacaacaagtggctctccaatattcaggatttcttcttagacatcttcaacacatatcttcaatcaagcaatgactattcgacgacaagaagctacagttcttgactctatgttcagttgtttcccaactaatcaaagagtcgggggctacacaaatacaaggcttaaaatttgacaaattttatgtcaagctgaagaaatcaattaatcaaccaacgagtcaactccaggagtcattatcttcatctttgcttcggagcagacattctacttcaacaacttcaaatatttcggtttagacgagttggacaacagtatcaactctcctccaagtgaagcatctacaacagctataacattaatttgatggattattgtcactgacatcatcaccagcacctctgcttcatcggccctgacatctccgctgttgctaatggatgactatgtcttcgccgacttattatttcaccttcacggttgacctactacgcaaacgctgataagcgtctttgtcattattatcggctgctacaccgctattgactggatcgccgacatcgtcatcttcatcaacatcctgtcaagcctcttaagcatagcctacactgctgccgttgatgggcaacttcgtcatcatagccggctatctctgttgctgttaatcatcattaccgtcggatgcgtttgccgccgccgactattttcttcatcttcatgattggtggatttcgccatcactgttgatgcgcctctacatcttcatcacttttgattggtatcactatcttcactaccaccaatatttttgccacctctggtgggcaatattatttctatattggtcgtcttgtctctatgccaactacgtcagctaccatcaatggacaattgtgactacgtgcttaggggcttactagctcaaacacaagtatcataccttcaagttggattttgttttgatattattttctatgctcgaagactggaccaatcattactccccgtaagggttatcaaccgtatatttgcaccagtcaggattcaatttttgtatctattttggagtatcccataagggataatcactcagatcagaagctattcatatgagctacacttggtctatattacccggaagatttattactcgggagtatgttacatgcgtcatcctttaaagggtgtcgaaggcatattttttggcctaggcctaatatgtctgcagcccatattttcaggtgtggcctgtcacgttcttttagggacttaggcactttttgcttaggccaaagtgcgcgtgatcaagtgcccaataccttaaaatccttttataccgcagttgttcaactttttaggagttggtacaatgcatcttaaaaggtgtcaaacagtaaagctttatatagctatcccgctgacttttttatataagtcaaggtgctgtttgggtttttaagcaattgattggatacaacatcattgctttttaccacgtaagtgtgcatttttattaaccaatattatagcttaggctgattatatatatcttggtcatttttcaggcggttggtaaatcctttatgagtttatttactcggatgttataccacatatgccatatatttccaggtgtggtgaaactatgtatcttttagggacttaagcacatctgttaaagcagtgtgcgcatggtgtatgcccaatactttggaaatttctttattcacaacatcaagctcttctttatagctgttttgctatgtgaattttcaaatatgttgtcaactttaggttgcacgcatcatattctgcaaagcagtcagtatatcacctggatcatattattcggggattcacaccgtatatgctatgtattggtatcaagtcacttggttgactataattatcaaaaaccactcagttggttggattatttattccctgacttatgcttggtttattcaattaaccccatggtcgggggctacacctattaggtgcatctagtcgatgcacctaagtttatatttaattatttttcagccctccacagtcttcagatttggtaaaagtagttgggagaccatggcaaagatgattgaagcactcggctttggagtaatctggtttgagagaagattatcttttcgactgtgaaggtcttaggggctactgtggagattatgggtaccctatacccacacggcatggttatccgactagtcttaggggatagcttatatctatggaatatgtaacagatcatgacttgggtattacgtttccttttatattatggagcggcctaaagtcctgatttgataatattgtagaatatatttaggaaaccgataccgtattggttaagatttctatcttgtaatcctgccccccatcctatataaggtgggcaggaggccctctagggggcatgagacacaactagatcgtcagatctatactacacccggcggattcaaatccccaaacaggagtagggtattacctctcatcgagagggcctgaacctgtctaaatcctttgtctccgcatccatccacttctaggtctcgtgcactaccccttttattattgctgaattcatgtttggacacaatccatacaagctaaaagttaatctaacgtgcctcaccctgacaacacctacatacattagcatttgttttgcaaaagaaaacacaaaaaataacaccagactctgagagtgctcaaggatgcatttttctagtaagttgcctaaaaacgatttgcaacataattattactccctccgttttataataaatgacgccattgacttttgaatacatgtttgatcattcgtcttattcaaaaattttacgcaaatatataagagataaatcatacttaaagtaatttaagtgataaaataacttaaaaaaataaattataattacataatttttctgaatgagatgaatggttaaatatgtgacaaaaagtcaacgacgttatcaattaaaacacaaaatctaaaccgagaagcctctcggtttaatcagctccaataaataaagaaactcatttgttctttccattggtattgggactcgggctcacaactatagtgacaatacaaatcaatcggtttttatctctattattataaaaattgaagatgtttttgctggtactttcatagatcattcgtgtttgagtcggttttaagcttcattcgcatttagaaatatatacccgcttttgactccgtttctaagttggtccgcttttgaaaatacaaaaacagtcatatagaaatctctttaaaaaaactcacatactcctaactgcagctcataattttctaagaaaatatatattcaagtgaattcccacagtgaatttcacttttaactaatatgtataaaaataacaaaattaaaatatgttttccagtcaacttaaaagaataaactgatttttttaatttttaattattcgtattttatttgttttcattggtttctataatgattccaagaaatccgatgatatcgcttgtgcggttattttggtctctgattaggccatacatgacgttttggattcgtattaagattttacgcttcgttacatgtagatgtaaatgtatgtttgcattcgatcacccagcgaatcaaagtaggattaactgtataataactaaaaatttaataaaaaataatattaataatggttagagttatatcatattataaaaataatttaggaatatcttcgcttgtagaaaaatatctttatgtattcatttatcatccatcatcagtccgaatgcggatcataaggatttctttttatcttggggtggattttgatatatgagaatctgaacaaattttaaatgaggaaagactggtcaaaaaagtaatttgaaaggtaaaaaagttggattcactttcaaatttctgaattgagtttgagaaaatttttggaaaatgtcaaagtacagatctaatgtttatcaaaattttagtttatcctgttgcaacgcacggacactttttccgagttatacaaaacgtaaagaactaattatggaattggaagggaggggataaggctaagctaatccttggggactttgcggtgaggatcgaatacaagctaggccagcacgcgtacacgcgcgccgccgaccgcggacgatggccacgcatcaccatggcgctaatccaccaccacctcgccgttccagtggctcccgctcctcctcctcggggtctcggtccggccaccgccgcccggcggctgacccttcaccgccgccgccgtaggagtggcgccgccgccggcaggatgacagtcacagcttcgtcgatggtggagccggcaagtggggaggagacggcggcgcgttcggcggcggacgtggtgagggcgttctacgacggcgtgaaccggcgggacctggcggcggtggagccgctcatcgcggaggggtgcgtctacgaggacctcgtcttccccaaccccttcgtcggccgcgccgagatactcggcttcttcgccggattcatgggctccgtcagctccgacctccgcttcgtcatcgacgacatctccgccggcgacgactcccgcgccgtcggcgtcacctggcacctcggtacacacatatctctacgtctagcgaattgagccattgataagatttgaggggatgaatggattcatctctccagtttttcttgctttcaaattcaatgcaaatggttattaaatatctttttaaaaaatatatacatattttacagtatagagagatatgccatctaacacttcaccaaaatttaatttcaaattcgagaaacacaatagtgagaaacaaaagaacagtaccactatcactagtgttcatctgttgaatttatttattttcataccttaatatatgagttaagttttgacctaagattttgtgaaattgtatatataatccatctgttttttatatatggtgtcattgactttttaatatacatttgaccatttatattacttaaaaaatttatgtaattatagtttattttgttgtgatttgatttatcattaatgttgatttaagcatgacttaaatttacatattaaaaatcatttaagcatgatttaatttgtcatgtcgcttagtgttcaaacgattatcaaaaaggtcaacaacgtcgtatattaaaaaccggaaatagtacattatatgaatgttgttaatttttttttttagaaatttttatgactatttacatggtgtttagataaatgagaggatcctcgaaggtttcaaatagttttcacattgataatggctagaattaagatgatcgatggaggcaatgtgaatttgcgattgtgtgcagattggaaggggcggccattcccattcagcaggggatgcagcttctaccgcctccagctggacgagaagcagcagcagctgcagatcgtgtatgggcgagactgcgtggagccagcagtgaagccaggggaatccgcgctgctcatcatcagggccgtcacttggatcttcgaacgctttccacgccttgcaaacatgctgtaactaactggcctttaattttgtatggtaactagtatttattttctcgttatgtgcactgtactttagcttataaaagaaattgaaagattgaagaatttggtgaacaattggctcaactgtaaatctaacaaacagcctcatcttttcgcttatgctacttattagcgaaaatttaaattttcaaccttaaattttaaactgattttagggttttttcatcgaagtttattttttagcctttgcttttagattgctaagaacacgtatataaaagttttatttacaaattacttttgtttgcaaaataccgtttcgaataagcgaaacaatagaactaaaagttgagcactttgagctagctgaaaattttcgagctcaaatagtcattatgatgcgtgttcaaggaacacaacctaaatgattatacagcttcatttcgggctgttcagctaattagcttgtattgctcacatgttctttgagctagttctaattagccacggctttgcgcaaatggggaattctcggttaaatcggcttattcgctgctttgcgctggaaggacgaagtgtgtgattggaaagatcatctggaagtcccgggcccctgcgagatgtaaattcttcatgtataccgcgatgcggggcgcctgtttgacggctgataacttgcagcggcggggttggcacctagccccggtttgtcacctttgctcccaagatagagagacatgcgcacacatcttcctcagctgtcgttacacgcagcaggtgtgtgcgactgtgcgtggccgccttggtctgtcctccactacaccgtcggctgatctttcctcctggtggcgctccgcgcggaaatcaatttctaaacaagaccgtaagactttcgatgctggagttatcttggtgacctgaaggaacgcaatgctagaattttcgacaacaaggccattccggcggcgcacttatgtgcagcaatggaagatgaatggaccacttggggtgcagcagggctgctgtgtccactgcaagccggaagcaacctgatggcgagagagcaacattaagccggtggtggtagctcgctgctctgtagtacagacgtgctttagtgtctggcaggcagcatcctctgtagcctgaatctgcagcttgcacctttgtaatttgtttcttgtgacttttttcccctatcttaataaacttcgactggcttccgccagcccggcgaattagccactgcactaaatatcgacttcaatttgctttgcaacgccattggaggaaacaaaaagatctctggaaagctcagtgtccttagaagacacaagcaccattactctcatctaatttagcaacatatccttacaaatacaagcaaaatgtcagaggagcaatgttattcaattgggaattcgtcagctccaaagcatcaatcgaaatgcagtggacaagagaacacactctctgttaatacatttgtacaatacactctgttagcacaacaaataacagaacatcaatgggcgagaagacgagaacacaccgcagcttcaacaaatcacaaaatgtccccaactgtctggtcttaaaaaaaatgtagaagagaaagatcaagaactccagaacattatttttttcattagcttcagttttctctatcatgtatacgtaatttagttctatccctctgcaacaagcatacatcaggttgtatacgttgatccttctttctcccttccacatacgtaaatacacactatatttttgtatttcttgaatatttgttcaatatcttaaatatcagagcttgcttcatcttgatattttcagaaaaccccaaaattgtccgtcatcatttatatcttaatatcagtaagtaggaaaactagtaatctgggtcatagcagaacatacgataaaaccagtaagttaaggatttacagtggcaggcaacaaattaagcagaacatagaccaatatcgcaaacgaagcaatgctatacgccacaatcaaattgaataatactactagataatatacatatatatctaagagtactccctttcagcatagaaaccaaccactagttaagtcatattcagcaagtgcgacacatacagatatagagggataacagaccaattcaccttcactgtgatagctccaggctcaacaactatttgttgactggcaaatccatggcggtttgctttgaaggaacagtagtgaccaacatcatttttagagcctttttcacataccttgaacttcaaatgcatccaggtatccgacgctactacgaccacataccttcttaagccacaaggctcgccaaccatgccatcaaagagttgaatttcttgtcgtaccttatcaataagaacaaacacactcagagataaattgaaaccccctaggcacttttgatatggaaacttctattgttgcctccactgcctggtaaaggtacgctaaagtgatgtcaactgcgccacaattgccactaacgcgacttgtcattggtctcattgctggtgttgttatctggctgtactctaatgctccatcaatcagttctagatcatcctcttctcgatctcctttttttatcctcatgtcaaactcagaacaacagaacaagacatcgaaatgcctcgcttagggccaatcatttcaatgcaagaaccctgtgaaattattataaattatcatttagtatattttcatattaaatttccaatattttaaactaatagcttggtttttataagaatgcaagggatatcaaataaatgatggcgtaaactacaggctctaaaaattgacaacttggtgttttgctatgacacataagttggttacacatgaaattcgaagtgttaattttagtatgttttgtgtgttattgtgtcatagttctcacattagatttattatgtcatggttcttacattagatcacgttggcaaccaggtctgggtatggggggcttcggtcagggaaagctacaccagtcttcaacatcatcactctactaggcgtggaaactagacctagggggatgtacaccagaggcaatggcggcgacaaaattggggatgggcagaagtggcctaggcaggcgtagggtagtggcaccggggccagtgcagaagtaactaacatcaatgcagagtggtgacgcagagcccatgaggaggaggccgaggaaggctccaggcagtggtaacgaaccaggtacagaggtggcaaaggcaggtggagctgcccagggcgaggccttcctcgcatgtggtagtcagcaatcacctgtggccacatgcatggagtgaggagggctgatagccgtgtgaagagaggaaggccctttttctcttttccatgggcattttgtcaaagaaatgcttaacccctattgatatgatactgtgagtgctacttaattaacgttaacggtggagaggcatattgatctcgctggtggaaccagtggcatcacaacaattaggaaaaaagtggtgccaaaatgataagtaggaaaaacccctgtggcatataccttacacccaacatattaaatcagtcttgtgaaattcatcgtgcacagttaattggtcatagatttgtgcacagcatacaaaactcaaaaggtgcgatggcatgtgtcattaataaacatatgctaaggacatttcaggtgctcctaggataaactaaataaaagtcatcccagaaatacattttttatggaaaaatgtttagtaatatagagtatggtgacatctgccacttcacaaaatttgaaatgtaaacagaacttgtataaggagaaacaagaattgttacttggaaattttttagccttcatcatgcaaagttttgaatttttgtgcaccacactctatgttgctgtgatttgtttgataactttccatgataaatatttacatttttaaggggatgggagcacctgaaagatgctcattcacatagacaaacattcttgtataagatcctccaagggacatgtatttgaagaacccatccacataagatcttcagatgcattgggagagaagaaataaaaggatatttttataactcaaacatttttatcctcagatgcattagagaaaagaaaagaaacataattttattgtacagactcactgttgtactcttaaatgattatgggttgacgaaactctcatgcttgttttgtctagaaaacctactgtttacttaatacatcagtcaacag

SEQ ID NO: 4543 - DNA, 3959 bp, Oryza sativa
  unsure (1)..(3959): unsure at all n locations
tatagcttcttgtcgtcgagtagtcattgcttgattgaagatatgtgttgaagatgtccaagtagaaatcctgaatattggagagcctcttgttgtagtaaaataacatggcatcgcataccgagatgtcgaggctcacaaagacgtcatggttggtgaagtagcaaaacttgcgaagtagcagcaatagagtttgccagtgccgaagataataaagatgaagtcgctctaccgtgatgacaaagttgcattgccgtgatgaagtgaacacgagtcggcggcaacagaagcaaactggtagtgaagacgcgcagttgtgaagataaaagcaccagtcggcgacggcataaccagtcggcgacggaagacgatgatgttcatcagtagtggtagctgtctaaaccagacgtagaggtgagggcactagtcagcagcagacgtagacagcttgcgttgaagatgatgatgcctattagcggtgacggtgatgtagccagctgtgaagaagatagcatcagttggcgtcataacaggccagccgtgcaggcagtgacaccagtcggcggcggacgaggcggccggtcggtgaagacgtagacgcccaacaacggcggcataataggccagccgtgcaggcggaaacaccagtcggcggcggacgaggcggccggtcggtgaagacgtagacgcccaacaacggcggcataataggccagccgtgtaggcggaaacaccagtcggcggcggacgagacggccggtcggtgaagacgtagacgcccaacaacggtggtgtgaccaaacaaccgtataggcgaagacaccagtcggcgacgatgacggcaagccggtggtgatgttctgactgatccattcctggagcgtaagagataagcttaaagccatgaatcccttttgtgcatatctggatctggatcctgcagaacaaacatataggatgagtagtatctgatataaatataatactcgagaaaaaatcaagtattttaaaatatttataaatatgtatttctcctcttgtcaattttgatttccccgagcagatgactctgtacgtttaaacactctgtccgactagtcatagcccccaagcatcgggagtcggcctaggcatttcccaaacatgcatatgagtgacatgagttcgtcattaatggaataaagtttcacggatcagaatttactactcaggtacttttgcaattattaagagcagaaaataaatttatctcatctctatgcttttgatttattccgaataatacttagcaccttgcgttactcggtccatccaacgagcccccgggtgataggaatcggcccaaaggcaaccatccattggcaaaccaaacggaaagcataggaagatagaactccataactcgataggtacttttgtactcagattatgtcgcaagcaatcaagataaatattataaaaaatatgatataacatctgtagaccccgactcactactcaatggaagaccaattggtgtagtgaggcagaggaaaaggaaaaatatcatataaagaataaaataaatgatgacttagctttgtaatattccccttggtgatggcagaggtggccaatgtgggaacaaagtcgtccaacaataacaatgaagacaccagtcggcggcgacgaaggcggtcgacggtgaaagcgaagatgcccactaatggcggcataataggccagccgtgtaggcggagataccaatcggcggcggcgaagacaagccggctgcgaagtcgtagacgcccagcaacggcagcataataggccaggctatgtaggcggagacaccagtcggcggcggcaaaggcgagccgtcggtgaaagcgtggacgcccatgaacggtggtgtgaccaaccaaccgtataggcgaggacaccagttggcggcgacggaggcaggccggtggtgaagtcgtatacgcccaacagcggcggcttaatagaccagccgtgcaggcgaaaacaccagtcggcggcgacgaaggccagctggtcggtgaagacgtgaacgcccatgaacggtggtgtgaccaaccaaccgtataggcgaggacaccagtcggcggcgacggaagcaggccggtggtgaagttgtagacacccaacagcggcggcataataggccagccgtgcaggcgaaaacaccactcggcaagagtagtgccgcggcgttacatgcaaacagcagaaaataccaagagagattaatctgacatttagagatcaatctaataaacaacaataagttgaaaaggaaaaaacccggtgaagtcggagattaaaaggaaaaaactcgccgagattgatctcttcgactgactccgagacggagaaaattggtcgtcggtgttgcaccgtgtcgctagggctaatcaagcaatcggcactgagatggtgaggcctcccggcggcagtagaagcagccagaagaatcggccagccggccaacgacgattatatgtaagtaaaaacccaaatcgatttgattagtaatacaaagcatatatacaatgtatgctgtataaatttgggtatgcatgcatgcttctgtagatggatggtgatggcgcagtcgtgacatcgtggccggaaaattaattgagtgcacatgcaaacgaataaatatcgatccatccaagcccaggatatgtttgatttgtccggcacaaatgcatgtttgcatcggccaggtcattattggcgatgacccagatcgcgtgattcgaaaccggccaggaggacgcgagcgccaagccccagcagggacgagatgtatgtgcggtttggtcgagatcatggcgatgtacagtacggtggccaatcccgtcgatcgtcctggcagcggatagctttccccgacgtgcggcggatagccaaatcgtcgagacatgaaaacaagaaaaataccagggcatcaatctgtgattagatttcaatctaaagacgatagattagaacgacaaacccgatatcttcctgtagattgatttgatcagaagatggcgtcgacggcagaggatctcacgctacataggcgaagacgaagccggcgactcctgaaaattgattccatcgtactttgacggaaaactcgacgcacccctacctggcgtgccaactgtcgaaacacgaattcggcaataataaaacggggtagcgcacgaaacctaaaagtggattgatgtggagacaaaggatttagacaggttcaggccctctcaatgagaggtaataccctactcctgtttggggatttggatccgccgggtgtattatatatctgacgatcatatgtgctcctgcccctagagggcctcctgcccaccttatataggatgggggacaggattacaagatagaaaccttaaccaatacggtatcggtttcttaaatatattctacaatattatcaaatcaggcttttaggccgctccataatataaaaggaaacgtaatacgaaaaaaaaaggttttnccaatgatctgttacatattccatagatataagctatcccctaagactagtcggataaccatgccgtgtgggtatagggtacccataatctccacagtagcccctaagaccttcacagtcgaaaagataatcttctctcaaaccagattactccaaagccgagtgcttcaatcatctttgccatggtctcccaactacttttaccaaatctgaagactggtttgggggaagggggggctgaaaaataattaaatataaacttaggtgcatcgactagatgcacctaataggtgtagcccccgaccatggggttaattgaataaaccaagcataagtcagggaataaataatccaaccaactgagtggtttttgataattatagtcaaccaagtgacttgataccaatacatagcatatacggtgtgaatccccgaataa

SEQ ID NO: 4544 - DNA, 7509 bp, Oryza sativa
cgaattgcgatctcccttattgattaagcgtctaatagttcgaggcgattcacagctggtcgtcaaccaagttatgaaagagtggtcctgccttgacgacaacatgatggcatatcgacaagaggtacgcaaattggaagacaagttcgatggactcgagctcagtcacgttcttcgacacaataatgaagccgccgacagacttgccaactttggatccaagcgcgaggtggcgccctccgatgttttcgtcgaacacctttatacgccgacagtacctcacaaagatactactcaagttgcgggcactcatgacgtagctatggttgaagccgactggcgagagcccctcatacgattcttgacttctcaagaactcccccaagacaaagatgaagccgagcggatttcaagacgaagcaaactttatgttatgcatgaagctgagttgtacaagaaaagcccttcagggattctgcaacgctgcgtatctttagaggaagggagacaattgctgaaagacatatattctgggatatgcggaaaccatgctgccgcacgcaccattgtcggcaaagcttaccggcagggttttttttggcctactgcagtgtccgacgccgacaaaattgtgcgcacgtgcgaaggttgccagttttttgccagacaaattcatctaccagctcaagagttgcagaccatcccactgtcttggccgtttgcggtttgggggctcgacatggttggcccgtttaaaaaggcagtcggcggttacacgcacctctttgtggccattgacaaattctccaagtggattgaagctaaaccggttgtcacaatcacagcagataacgctcgagacttcttcatcaacattgtgcatagatttggagtgcccaatcggatcatcactgataatggcagacaattcactggcggagtttttaaagacttttgtgaagactttggaattaagatttgctatgcctcagtggcacatcccatgagcaatggacaggtggagcgagccaatgtcatgatacttcaagggattaaagcgcgagtttttgaccggctaaaaccctatgccggcaaatgggtggaacagctaccatcagtactttggtctttgcgtactacacccagtcgggccacaggccagtcaccttttttccttgtctatggggcagaagcaatgttgccgagtgaagtcgaattcgagtctttgcgctttcgtaatttccgcgaagaacgctacgaggaggaccgacttcgagtctttaagcttatcactgtacttccctatcttgactgtcaacatcaagttttcttcttgaagttgtcagtcgggggctatcatcataataacggagtgtgattttttatcaattcaatttgcttccttggtctatcattgccttgtttgatttttctacttagtctgcgaggactgaaagtttttaatagcttctttgggttttaggctcaacaaagcttgataaaagcttttaagaaatcaaagacttggctagaattatcaagcacagtataaatacaccagtattgtacaagttatgcctccgtttgctacatttatgctcagtcagaatcagtcctttcatcatcagagttattactactcggctgaaggtcggtgttgcggaattgatctacgacgtcacttgcaatcttgtcagccgcattttgagcattgctgataagatcaagagcagcctctacgcttgtcccgtctgcaaagccatcaatggcgtcaatttcaatcctcgggtacaaggatttggtcatcgccaatgccgtgctagctctcatacttccagctttcttgatattcttgaaatatacatccggagcaactctctgcttgtcgaagatttcggttgcgccgagtacactcggaccactgttattgaggaacatagcttggacgagtggtatagcgacattagcgacttcatctcttgctccttcaagcctcttgattttaccaaccaggacgtcaaattgagcttgagatttgattttgcggtctacaaaatacatttatgataaaaatctactgcattaaaaagagagaagttcagattgtcagctggcagtaccttcaacctccttcaaggccgagtccctttgcgcagccagttctaccttgtctctttccagggcttcaatttgtttctccatttgagccatcctggcggcttgcgctgtttgaaatccaaatggttgaggatacagttacgacagcgtaaattaatggggcagatctagagattaccttttgatgaaccactcagctcgaagtttgaatcctggagctgagcaattcggtcccttaattccttctctgtctttttggcgagctccttggcctcgtgtagctgatccctaactgcttcaagagttcccaaatgaggaaccagcttttctaaagttgcggtcttggcctcattgcgaagatggattctctgcatgatggttcatggtttagttttgctgaagagaaaacaaagtcatcaaaggcagtcacccggaagatttacattcacaatgcgagtggcttctccaagtgccttcttcagctggcacacttcctcatcttctttttgacgatttatgacgatgccggcagcttgtgagttctcgtcccaccatttgagcaagataggaggacgagagtcatcagccgcctttatgcgaggaatttcttcttcgtcatcgcctggtggtcctgatgtatttccaagatattagacgaataagctgaagttatttaaatcggcatcacttgagaagatgagttacttgaggatgttcctagctgagcgtggggtgatccttgttctttatctggagacccaatcatcgagtcgttaccagcctctggtccttgagaagttgtcgtctgcgcttcaacttcgggagtttcttgatctggacctacatccgaatggtttctagtcgggggctcttgggttgttgtagttttagttgctgccgactggtttccagtcgaaggctggtcactcggattggccttatcacctgaagtatgggcgccagtcggctggctttcggcagttggctcagaatccttggatgaacttggttctgtcacagtcggatcaggatcttttccagttggatctatgtcggatggtttcctgcaaagtgttctttcaatattcagtactatttccatgagagaagcatgtcgaagtgaaatggtaccgagaggtttatacctggaagatgttctgatctttggccttggacgactagccagttttttcctgggagtggtatgctttgggagtttattgggcgagcctttgtccccagatttgttgccgtcgtcgccttcgtcgtcattaagcaccagctttctcttgcgagaacctgtctgcccagtcggattggaggtttgaggttgcggatctgatctgattgtcggccctccacctccctgaacggtgtgctgacgaggagaccggcgctgagtgattggggggtcagacttcatcaatacatattcctgaatgagatgcctccacggttagttaactcaacatgaagacaagattatgttttggtcatgggttgaagatttcggatacgtacctgcggaggcggattgaatgcgttatatggcacaactggcagctgatgtgagtagctgacgacaatagcatttgagaagattttatacattctctccttcatgattttaaaatccagagaatctggttcttcacgattaggatcatgcttgccgtcaaactcgaatgccgtacgggatctttctttaattggtgccaatcggcatttgatgaagtgccgagtaatctgctctccttgtaagccttgttctttgagttttagcatgcgatccatcagctccaaggcttgggcttcttcatccccaatcggaagagagttccaggtatcttggtacaccggaggaagacaagagtactcgagaagagcaggctcaggattctgaatataaaaccagtttgcatgccaccctttgtttgaggtcttgaagggcatagagaagtacttctggctcagagtccccctcagctaaaatccggcccctccgactacacatggcttactcttgtttggttggggcttgagaaagaagattcggcgaaacagagcgaagtggggcttaattcccaagaaggcttcacaaacatggatgaaattggcgatgtgaactatggaatttgggtttaggtgatgcaagctgattccatagaaacttaatatcccgcggaaaaattttgaggtcggaagagcgaagccgccatagaagaaatgggagaagaccacagcctcgtgtgtatcgggggtcggaaaagcctcaccgcacgctggccgccacccgatgatttccttggcagggagaacgccgtgcgccaccatctccttcaggttctcctccgtcacgtcggatggcgcccattggccttcaaagctttccttctcttccgccattgattttttccgaatgcgctgatttgattcgagggatggctagggagaggtgaaggattgaggcggtggatcacgggaaggattttgatgaactttttgaaggtggattcgagtggaatggtgaaccctagtttgccggcgcagctctgtactgtagcagggagtggggaaaatggcgagagttccggcggggaagatgaagtgtcgcttggatctcgggatttcttgttaagggtgtcggaggtgcgaatgggcttaggctgaacagtacttcagcccagtacttttaacagcgtggcccattgtgctccttagggacttaggcattttttgctttggcaatttatgcgcacaatagtgttgcccaatgctgataaaatcctttttacgcggtcatataattctttggaattattgcaatgcaaattaaaaggtgcccgacagaaaggtgttatgctgtttttgtaagcttttttaggctacgaaagctgtctgggttaacttggaatgacttgtttttaccatagtcatttccttggtatgttatatgcctgttttcattatggtaaatagtcatagcctaggctattagacttattcattaccataattttttataatatttggtgggtaatctttagagctttttattcggatgcctgtcaagtgtgttcattcgtgaaccttttagagtgttaaccactcggattccttttaattatggctaaaaagcagtcggctgagaatgcctctttaggcgccgtgtatgcttttgtcgtatgatgcacgattgtgctattattttattcttaactatatgtttagtttgttaactaatcacatagttgggggctacacctaattaggtgcatctattcgatgcaccatattctttatcttttcgccctttacagtcttcgtcttcgctactcggcaggccttggcatgaaaagtttgaagcactcggattattatccttgagaaggctatgatggttgactgcaaaggtctcgggggctactgtggagattatggatatcctatatctacacggcgatgatatttggactgaatataggataccgaatatagatagaatatcttatttgtatcttgggtttgtttctcaacttgcacatcaaggaaataccttgagacttagtcggttacgactgtattttatctgtatctgcatattccgttagggatatagattatcttttgtaacacggactccttcccatatataagggggtccgggtgcctctaggggcatatatgcgttgttgattttctccaaatcatacaatcaataagatactcggcggattcatccccggacaggagtagggtattacttcttgaataagaaggcctgaacctgtataaatccttggtctccaaacccattcacttctccagcttgatagccacccccttttattattgccgaaatctagtttcgacactttgatgtgacgggatgatgttgatgcccaacaaatagccatggcgcgctatcttcttttttccaatttctttatgtatgttgtgtttctctagtttgagttagctgctctgatgtcaaaatggagggatatggcaccattctgataaccgagacagagctagaggaagttaaactctgtaatgcttccatttctctactggaaatgggggaggttgtgacattgtgtcctccctttcttaaagaagaaaaacaaaaacaaaaaaacaatcagccgctagtggggttgctggcattgaagcccagctgcaagccacaatggatgagctgcacacgcaggaggaacaacgacgcggaggacaaagacgagggggctgttcggatatgcattttcaaccatactattttttcataaagttgtcaaaaaaaagtcaaactttggtaaatacataagaaattaggctaaaattttggtaatattgccgacttgttaaaattttggcaatgtcaaaatttggtaaggtttgttttagctacaatctgaacaacctcgagatgtgcgtggaaaattggtgcactgagccctgtggaggatgttagctagacacgtacttttttgaaatgataaatgagagaatctattgtatacccctgaaaatttaactaatcctttttattcctctaaatcttgtttacttccttgtatacccctaaaatttgattttgttccgtctcacacccctcccgtcagttgaccgtctaatttttatagaaatgaccattttacccattgaatgagcatataaatttatgaattacattatagaaaatataaaagcttgtcacatgaaatgaaattattaatagttatgattgctacggtacattatttatgaaaaaaattaagataatgaaataaaaaattatattttttttattttttgaaagtcataaaaatgaggagcattcatagaaagataggactaccaatgctcatggttttttttaataatgctcccgataaaaaaatctattatcctattagatttcaaaaaaaaattattacattttttattttcaaaatttatgacaaaattttctgaactaattatttagtctcattagtcacatgaaatgcacatagtactcaaacaaaattttcaattgtttttcaagtttatattcaaagctaaatcatcaagggcattaaagacatttgccaccaaacttaacggtgaaatgaaggaaaatgtaacgacaggggcatggaagggatgaagttgaaatttcaggggtatagaagggaaccggtaaatttcaaaggtataaaagggattgagtgagttttcaaagggtacccagggaatttactcacgaaaaatatgtgtgatactaacaagagcttcaccatcaattattgatatagaagaaattactgagataacttgtggtgagaagcacttgaggctagaccaatggcttgctcttagtagctccctaccaaatgagctatccaa

SEQ ID NO: 4545 - DNA, 10256 bp, Oryza sativa
tgaccgtctaatttttatagaaatgaccattttacccattgaatgagcatataaatttatgaattacattatagaaaatataaaagcttgtcacatgaaatgaaattattaatagttatgattgctacggtacattatttatgaaaaaaattaagataatgaaataaaaaattatattttttttattttttgaaagtcataaaaatgaggagcattcatagaaagataggactaccaatgctcatggttttttttaataatgctcccgataaaaaaatctattatcctattagatttcaaaaaaaaattattacattttttattttcaaaatttatgacaaaattttctgaactaattatttagtctcattagtcacatgaaatgcacatagtactcaaacaaaattttcaattgtttttcaagtttatattcaaagctaaatcatcaagggcattaaagacatttgccaccaaacttaacggtgaaatgaaggaaaatgtaacgacaggggcatggaagggatgaagttgaaatttcaggggtatagaagggaaccggtaaatttcaaaggtataaaagggattgagtgagttttcaaagggtacccagggaatttactcacgaaaaatatgtgtgatactaacaagagcttcaccatcaattattgatatagaagaaattactgagataacttgtggtgagaagcacttgaggctagaccaatggcttgctcttagtagctccctaccaaatgagctatccaacgttctcgttagacatgtatatttttttttgaaacgaaaaatgtgacactaattaataagatttttagtactccctccgtattttaatgtatgatgtcgttgactttttaaccaatgtttgaccattcgtcttattcaaattttttatgcgaatataaaaatacttatatcatgcttaaagaacatttgatgataaatcaagtaacaataaaataaatgataattatataaattttttgaataaggcgaaaggtcaaacgtttatcaaaaaatcaacggcgtcatacattaaaatatgaaaggagtatcaattattgatattgagaaaatgctgacataacttgtgatgagaccgacttaggcctggtttagctctcaactttttcttcaaacttctaaattttccatcacatcaaaacttttatacgcacacaaactttcaacttttccatcacatcgttctaatttcaatcaaacttctaattttggtatgaactaaacatacccttagaataggcagatggcttgctcttgcctcttggttgctccttaccagctaagctgtccactgttcctgttagacaagtacggtgagccatggacaaagatttgccgggacatggacgaggaggatatgatggcgtcacaaaattagtgttcagtaaaaaaaatggaggaggtttctcggtggtatgaaattgtaatgaagaaagaattatttggtggaacaaaactataacacttctaggaatagggcattcatttataacaattagttgtagaataaacatatgtatggcattttgcgttttcgaaatttattaccccttttcgtttgcagaagtcaaggttgctccaacagctctcgtccataactgtgtcgaggcttctatttgggtccatgtgtacagcaccgtaggaagacgtgaagaccacacgacctgcacccacgtctgctgcagcgttgatcacattcttggttccctcaacggcaacaggtacaaattgctgcattttagttgtcgattcatattattaattagttggttgactaatttccatgctaacaaaatttatttaaccggtgcttcaacagaaaaatatgtatatgtaccatgtattgtgtgtcatctgtatttgagcagtttatatgcatttaggaggtaaaggggaagataaaataaaaacttatctccaagcatgtattataaagaaacccaatcataagcataattaaatcaatacaagcaccttttcaggtttatagttagcattagattttttttttaatgaaagatgtacgttctactccactctttatatatttaccattctaggaaacaagcattcatcaaatcttgaaatttaagctttccatgtgatatatactttgaaatttaagctttctatgcgaatgaatgcttgtttcaagatatttggttttcgatatattgcgaaattgaagcttaatatacaccgtttgattttcagcttaatatatgcgaatgattttttgcatatttgccatgaaaaaatgctgtcatatagtcatattttttatatttcatatgatttcataaatattactccatccatttgaaaatatatggttttttttttgcgtgtttttcaaaatatatctagacatccctctatcttaattagatatatcttgaaaaacacataaaatttttatattttggaatagagtgattataaaagatgacgctgaaaaggaaatttactactacaaaacatcaaatagttgttgcccctatatgtgccgatagtgctaaaatcggcacctcctataggcattttttcacctccgcgggttaaaatcgtaaaaaaccggcacctttaagtatttataggtgttggttctaaataaaaaccggcacctattatattttgtgtcggtttttttaaaaaacgacacctatatattgtccactcactggatcattggatactggtgatgcaacatgaaagaccccatcacatccatcaaatgcaactcggagactgttgtagtccatgacattagcgtagcacagagatagcctctctgctgctccttcaagtgtttgcaaatgggggtacttctgagcagcttcacaacaacaaaatgcaaattatcaggcatatatagatacacggtagcaattaattaattaattgtcaaaccatatataatcaactagcataacttggcaatgatcttgttgaaattaaaatagtttcaaacaatatatatttaacacaggttgtacttagagcgtagatgtaaagtttgtgatgatatagctacacaagagtctcacaggggtctcttgcagttcctctcacaacatagccacggtgaaggagctccttcactacccaagaaccaacaaatcctcctgctcctgtaacacaaaccctatggccaacttcagccttggccatcacttgggataactcaagatatcagctagctagatagctgtggtactatgaatgctactattgatctgtctggcttgttgtgtgaagcttttgtgtgtggcacatgatccatttatagctgtatggtgtatgagtagagacagacaaaacttagtactaggaaattaagaaaaaaaaagaaattgggagaaacattaagctggggccgtccgtcccctgttcagatgatttgcacaatttataccactttttttatggacatgtgttgctcgtttcattaaattatagtatcaacactagattcctggttttatgagacaatagcttgcgcgattgttacaacgtagctactactatatactccctccatattttaatattgtatgacgccgttgactttttaaccaacgtttgaccactcgtcttattcaaaatttttatgcaaatataaaaatacttatgtcatgcttaaagaatatttgatgataaatcaagtcacaataaaataaattataattacataaattttttaaataagacgaaaggtcaaatgtttgttaaaaagtcaatggcgtcatacattaaaatacggagggagtatattattattttttccggatgagttatacataactgtcaacatgtaatggagcttgagagagacactgcatgcactgcatgtacacatcacagatctacctcaccacgccttcaaccttactggccaatgatcatcacctagagatgaagtaaatatatttgtttcacactaatgggaatgaatcccaagtcctacatcaaagatgttgatggtatttattattctatttggtagatatgattgacattttatctatcgtgacttcatggcgcatggcgcgtatgttgttgtgagaattcgaagagaacaacacagacgataaattttataacatgtgattgtttcataataaattgctcataacatgtataagttacaccccatccattccaaaataagttcatttacttagactcgttccataaatttagaagttttaacatttcaatgtcatttacatacatatccaccaatattatttcgaggactactttggtattttctttactaaagtttttttctgatgcgagtgtccgagtactttggaatagagggagtacttttgttttggcctatactctttaatttatagggttaatgggatcatgccatcataaattgttgagtttcaaaaaatatctttacggtttatctattttgtaacgatgccatcataattttacaactataggagatatgcaactgcatatataccgcttcaccgtgtttatcaatttatttgtgttatgtaaatagatgcacaacggagaaacgaattttacatggaaaacccttacgggaaaaaaccacggacgccgaccgaccatgatcagtgtagaggagttggatacaaatgcaagagatatattaggctgtcgcaccctccccatgcggcttacaaggaatatataaatatatatataggagaaaaataggagtccttatgggcaaagactcgaagtcctaataggaaactaatcctataatgcaaagtcctattagaaaactaacccaaatatatagtaggcctaaaattcggatcacatatttaaccatctccactttaagacgaatttcccttgtagcataaaaatcttcaatctccaaagaggacgatcaggacgatgtcgaccacgagtggcggcggcggggagcggcggctgcgcgaccacggcgacgacgacgggattttttcaattttattttttttccgtacgggtggtataatttgactgcatgggataatcgattatcccgtgcagttgggccgcccgcacgtgaaaatattgattttcacagacccttgggtgcagacgggtgctacctccgcatgaaaaaatggattttgaccacacggaaaaatgaattatgtactagtggaatattctaaattaaaaatgtgcattttcttattggtcggtgtgagcgtttgtccttcatatcactgtaaggtgtcaaaaatcataattgatagtattgtttgaacttatttgaaactagtaatcatgcaatgcacgttttccacaaaatatatcactggaatacataattacaccaaaaaatttagaaactacatcttcctagcacaacctatttacccaaaatttataaaacatatcatcatgtaatgtaagttgtaacaataaaaataaccattattatgagtaaatagttatttttagcttaatcagaaatgcacaaaaaggcatcaaagcaagatattgacttgttattctcttagcagtcatcaacataaccactcaggcatactaccagtagtccagtatgcagaccacaatcaaatgagtaaaatctcggcatttgttggaccttgaaatggggagacaaaaagattatattgacttcaaatttatttatgtggttatatgtcaataatgtgtcctaacaaattcaggcttgaattaagagcatgatatcatggcttctgttgtatagaaacagacataacaaataggacggttttccgtgaagaagaggaggatgatgtgaccatggctaccacggatgcaaccattgctcacatcatggatgaacaagaagatatcgagatcaaatcctacaagtgctggaatccgattcggccacctgctacactgctgacttcaaacggctaccaaatctgcatacgacctccgtttttggcccacgagtacttgattgaaaactctcggagtcctctttccaacggatccggcctcatcaccagactccatcttgtttggccgcaaacacaaaaataaggtgttgcgtcacctgtcatgggcctttggtcttgtaacttcgtttgggaccccggcccaagtggggcccatgtggggtgcgcccaaccaggtggagcacgaccctagagtccacttggttatcctcacacctttataaatagttaggtacccctttagagtttattgggttttgatagattaaagtttagccattgctacttgcttgcatcgcgcgtgtcgactagaccgtccgtctgcttgttcttcagaaccccaacttaacatttgtattaaattcctatttacaatatcatattgctttttcttgttcttgtttgtttctttgatttgcttgcagaaatagggttgatctgcaccagcaagatcaacaacccacggagagctttcgttgctcggtgagtttctatcaacctataaccagaaaattgcaatacaaaaaaatattgtatcctgtacctagccatatttgtgccattgcattgtccatttcagtttttgctttgttgagtattctgttgcatcgtcgagtcgtagtcgctagccttagcgtctagttcgtttagagtttcgagttctggtcacgttttataccacagtcgtcgtcgccgccgtgtcatggttgtcatcggcacctacgaaaacggaatcgtctttccgccagggttccatttttgtagttttcataaggttatgtcggttcattttgttgttgagttgcatctagtgtttgcaaatactacgtctgtttttttgccgtgcatgtgtgtgctagcaagaaagaaggttgagagatttttgtagattggattcggtttccatacgtcacgaaggaggaaggggaaagtttttgtttgattggtattggtttccagatttccacctattctgtttccatctaggctgaaccatcccacctactgtacccaccaccaccgtgactagagagtacgactccctctcctctctcggtttcaaacctactccatgacatccctgacacagcttgctgaaaaattttggagtatcggattggaaatctgtttgcaaaaacggaacctatgggacaagagcattccattttttatagttataattttgggttttcacttttgtatatcagtccctgtaatttttatatttacgtttgagtccctgtaatcttgaattaaggtccttgagttgatttttgctgaaaaaaaataaaaaaaaagaaaaaaaggcagaaaggtgctaaaaagaaagaaaacaaaagccgcaccgaaaagaaaaagaaaagaaagtaaaaaaagatagaaaaaagaaagaaaagagaaaaatcagttctatctttgagtttgctttcacatatcagagtgtgcctaagttgtttctagtgctatcctgtggtatcgtttgtgtctaggctcgcgtttctagtacgttataccctaggaccagcatggtacttgactttgaacaattattcaactttgcattctctgatttgagtatttgctattcctttactacatatttaagcctacccagagctccacagatttaattgcagtcatacagcaagtgtttgccaaggcatcgatacatccaacctccattggggtgcttggttgaggcggtgtacatcaccattccgcttgctttggtaagaacttgtaagagcttggtgaaaagcttgagtgtgtgtaatacttcagctgccactacctagtagttgataggagcgtgcatattcttgtgtatgtttcttgtttgctactaacaatgacatggatatgcaagatcattggagataacatagcttgacatcgacatcttcgtcgagacataacgagtgatcaacatgatgctaatgaggtacgcgatgatgttctaactaagatcaatagagaatttcaaaagcatgtcttgtctgagaacaaaaaggttatgtgtgcctctagtgttttaattaaacatgcttcaaatgattggaaaacatctttataggcataacaaaataccacaatcttggaaagacctgaaatgatattttagagatgtttatgttcccatgtattatgctgatattctgctcatcaaactgcaatgtttaaaacaagatacctgtcgaaacatgaattcggcaataataaaacggggtagcgtacgaaacctaaaagtggatggatgtggagacaaaggatttagacaggttcaggccctctcaatgagaggtaataccctactcctgtttggggatttggatccgccgggtgtattatagatctgacgatcatatgtgctcctgccccctagagggtctcctgcccaccttatataggatgggggataggattacaagatagaaaccttaaccaatacggtatcggtttcctaaatctactttacaatcttatcaaaccaggactttaggccgttccataatatacagggaaacgtaatacccaagtaatgatccgttacatattctatagatataagttatcccctatagctagtcggataaccatgccgcgtgggtatggggtacccataatctccacagtagcccctgagaccttcacagtcgaaaagataatcttctctcgaactagattactccaaagccgagtgcttcaatcatcttcgccatggtctcccgagtacttttatcaaatctgaagactgtggagggctgaaaaataaagtcaggtgcatcgactagatgcacctaataggtgtagcccccgactatgtggttagctgaacaaactaagcatatagtcaaggaataaataatccaaccaaccgagtggttttgataattgtaatcgaccaagtgacttgatatcaatatataacatatgcggtgtgaatccccgaataacatgatccaagtgatataccgactgctttgtaaaaattgatgcgagcaacctaaagttgactacatcattgaaaaacagctataaagaagcttgaatgctgcgaataaagaaatttccgaagtattgggcatacgccacgcgcacactactttaacagatgtgcttaagtccctaaaagacacatggtttcaccacaattggaaatatatggcatatgtggtgtaaaatccgagtaaataaactcataaaggatttaccagccgcctagaaaatgaccacaatgaataatcagcctaagccataatattggtcaataaaaatgcacacttacggggcaaaaagcaatgatattgtatccaatcaattgcttgataaactcaaatagcgtcatgactatataaaaaagtcagcggagcagctatataaagctttactgtttgacaccttttaagatgcattgtaccaactcctaaaaagttgagtaactgcggtataaaagggttttaaggtattgggcacttgatcacgcgcactttggcttaagcaaaaagtgcttgagtccctaaaagaacgtgacaggccacacctgaaaatatgggctgcagacatattaggcctaggccaaaaaatatgccttcgacaccctttaaaggatgacgcatgtaacatgctcccgagtaatagatcttccgggtgatatagaccaagtgtagctcatatgaatagcttctgatctgattgattatccctaatgggatactccaaaatagatataaaaattgaatcccgactggcacaactattcggttgataacccttacggggaataataaatagtccagtctttaagtatagaaaatagacccatgatcatgaattcatgttgcatgtatccggaacaactccaaattgaaggtatgatacttgtgtttgatctagtaagcccctgagcatatagcttgtccttctgtcatagtcacaattgttcattgatggtagcaatcaaaagtaatgaagtcgcatagccatggaggcgaagaaaccagtcggcagcagacaagttagccaacagtgaagatgaaggcgtctagcaacatcgacaaaattgagcagccatggtggcgaaataatcagtcggtgacagatgaggcagccggtgaagaagatgaagatgcccattagtggcgacataataagccatccgtgaaggcgaggataccagtcggtggtgacgaaagcaagccgacggtgaagatatagacacgtatcaaaggcaatgacgaaatccatcaatcatgaagatgaagaaaa

SEQ ID NO: 4546 - DNA, 35347 bp, Oryza sativa
cgttggggaagtttctttcttccaggatggttcttactagggtctatcctagtcggttgcatgaaagatcttttgggtagaagatgcttccgcgaacctatctattcagccaatcggccatgtgtatctaagttataagttgtatgatcctaactaaaacttagaacttagaactccctatgttgagatatcatgtgcttggatgaaagtgtttagtgtgttccttttgttagggacatattaaacatgagtatgagttaaagatatttgagatgttgtggatctttagccatttttgtcaagtctcctgattgtgtaacacatctggtcgccaccttcgagtggtttgacgggcacatctcaggctgaagttgactggcaggctaaaggcccggcaatgtctcacatatttttctctcggagcgtcgaatgtcttaatatgtttgatggaagaattgtgattagctattcatccttcaaatatactaaggggttcggagtgcttccgacatagggtaactcccaaaatatggagtttttttttccacatcgccgcgtaaccatcttcgctctctataggctggctgccaggcccctttccaaacactactttaagatctttcaccatagcaaacactgttttaccgcggcgatgttttggcttcgtacggtggtccacgtatgttcaaagtgcttgcctttcttccataccgggtggttcgctgcaaggaatcgacgatgacccatgtacacaaccttcctacagtgcttaagatacgtactttctgtttcatccatatagtgagtgcaagccttgtaccccttgttggacttcccggataggttgctaagtgcaggccaatcattgatggttacgaacagcagcgctcgtaggttaaactcctcctgtttgtcctcgtcccacacggggacaccttccttcttccacaacagtttaagatcttcgaccagtgatcttaggtacacatcgatgttgttaccaggttgcttggggccttgaataataatcggcatcattatatacttcctcttcatgcatagccaaggggggaggttgtagatacacatcgtaacgggccaagtgctatggccactgctcatctctctaaaaggattcatgtcatccgtacttaaaccaaactgtatgttacgtgcgtcctttccaaagtctttaaattttctgtcgatgtttcgccactgcgaaccatcggcggggtgcctcagcatcccgtcctgttgacgctcttcagcgtgccaacgcatcattctagcattccccttgttcctgaacaaacgccttagccgtggtattatagggaaataccacatcacctcgcaggaattctcttcttcgttagttgcccgtcaacttctcctgtatcatctcgtctaatcttgtattgttgtgctttacaaacagggcatgcttctaggttctcgtactcctcaccgcgatataggatacaatcattcggacatgcgtgaatgttctaaacttctagtactagagggcagactatcttcttagcctcgtacgttgtctcggacaatttgtttccctccggaagaacgttcttgacgagtttcaataaatcaccaattgccttgtcactaacaccattttttgccttccattgcaagaactccagagtggtatccaactttttgtgcccctgctcgcaacctgggtacaacgacgttctgtggtcctctaacatcttgttcaatttatgggcccccttttcactttcgcagtcctccttggcgtcctgcaacatctgaccaagatcatccgcaacgttgttaccatcagcatccctttcctcctcgcccgtttgatttccttcaaatctagcgtactgagcaaagtccggaatattgtcgtcttccacttcatcttcttccattttaaccctttgctctccgtgggatgtctaacagttatagcttggcatgaactccgatttaaacaagtggaaatgaatagtcctggatgcagaatactcctgattcttacacttattgcatggacaacaaataaaacccttatgcctgttagcttcggccactctcaaaaaataatgcacgccatcaataaactctttggaccgccggtcagcgtacatccattgccgatctatctacatgaaatgaaaaaaaatcgtacacaaataattattcgtacaaaaatgacagtcatacaataatgataaaataattacaaactctttcaagagtcatacaataatgacatatcattattcatacaaaaattataaaatattccaccaaataattcttatttactatttctaaagttttaaactaatattaatatgttgtacttcttttaattttcattttagtttgttttctattatttaagattaactttcactatattttccttctcaactattttataaaaccttctttagcaaataaactaaatttatatatattctttcttccccatatacattttctctctcatcaacttacaacaaaattttggagacaaaaaagtgtgcaaaacatagctccaaatgtaatatgacaaaaaaaaacattggaggatgaagttgctaaccttttaggcacctccgatttgtatataatcaccaaaataaattcactataaattttggcatgacctcccctcttttttgaagaaattttgaagcttgctcgggctggaggaggaagaagacatatataaagggatgggactttagtcccagttagtgttaacaaccggggctaaagatcgccgggatctttactcccggttggtaacaccaaccgggactaaagttacaatctttagtcctggttggtgttaaaaaccgggactaaagataccgggggggcctgacaagccctgacagcatttgaaccgagactaaagatgatctttagtcccggttggtgttaccaaccgggactaaagatcaaatatgcccgttaccctttttaaccgggactaaagatcatctttagtcccggtttttgttgcaaccgggattattatggaattcggccgaccgacgaatgatggtttctccaccagatacatacattgtttttagtttttaggtctaaaatataaaggtttcaattgattagataataagaaatatcacaagagctgatacatttacaattaggagctgaaacacaacaagtatttagagcaaccttcattatgggtggtgtgacctatgtgtggcttgagcccacatagcacattaaggccactctaaagagtagcatctattgctcatgccctaagcaaccttcaatattcatatgcatattataaagtgaagaaaacatcaaaggtcacacactacctggacctaaccaataggtcaaaaaaacgccaacaaacccgtgcaatgctcagctcttgtccgtttcctgatcacatatttttctgaaaacaatgcatgacacaaaatgctcagagacaagaggaatagaggagatcaaaccatacatataacaccaaatgcaaggtataaaagcaaagcaattgaggggaaaaaaataaaaaaaattccagattccattgattgatcgacagcacaagcttgtatacagcttgtaagcccaatcagggagcatatcgtttctcactgtctgaagcaagttccactatctcttaccatcgtacacaaaagctttctgcaagtgtccctaaagacagcgacaaacatgtactgcatatgggcctccaaagtgcacaaccacacagcaaatggcttcagaaaaagctgggtgaaaaaaaaggattaggtacattaattgttgatttaacctgtgcatttgcacaggaatatttcttgtgtgccctggacctctggcccgttcccggtgcaaaagaaaaatatttttttccaaggaatttattctttttgtgtctctatgtgtcaagaaatgaccatgcatgtatctgcgcatcggctttaggctacaatggaagataatttcacaatggaagataatagaggaatggaccatagaagataatttctccatgcacatgttggtaaaaatgcttatacatgtttagcgaggaaaatttctaaaagaactactacttctgttgcataagcattttgtacacaataagtattgatcagatccatcagtctgcgtggaaattcaccactttcatctttgacaaattttgcagcctttatactttggctcatcaccttcaagttttacgtatgtattcctgcattgaaatctaaagttagtcacctatcacaagtttttgttattttctcaaggtcaaaactaatctgatcggcagcttatattacccatcatcaatgcatcatgaccaacattggtctaagtccaaccctagaacccaaaaaatcccttttcaacctaggacaagatatcggcaacgaccattggagcctcctttcctgctacacatcaagtgtaagcagaagtgtgggaataagagagtggaggtagaggaaagggctggctacctagctagcatagaggggacaacatcaaacaagaggaatctgcaatgccatatcgttgtcgctgttgtttggcctacgcctcttggtgtcgccgacaacgcgatcggggagctagacgagagccccctggggatgtggaaggtgacatggaatatccctgcccatttggttctgcagaagtagtggtagtggtgttggtggtggagctgatcagctgatggggtgggggcagtgatgtctcccaccatagctgtgaaaggtgagcactagtaccactgcagatgaatctgcagcttgcatgatctgctggcttgaattaagcttcttctcttcccttgcatggggcagttcctggtatagggaatcaatcatagccactctttctttttggccatggttccatggtgataggatgccctgtccatgcatgcttgcttgatccttggaactgcatactagctggttgcaggaggcacatttgcaacttttgtgagaggtggtggtgtatgatcatgatcactttcctagtttcctatgagaggggagcttctttggcaagttaacatccttgacacttggaagagaacttgccttctgtggatggttgtttcattagctggaagtgtgtctatgtacctgtatatgacataaatacctaactttgatcaggcacattgtcaccagcacacatggtctacattagagttacctattaaggtggtgggttgggcctgagtcacttgaaatgctctgcagaagatattcttcctccctccatcccaaaatttaagacacaactaacactaacgcaaaaaccaaaaaagaattattatcaccacctcatttgtcacctcaacaaatacaatgtatgcacccaatgtgatttaagatcttgaggatggaggatttaaaaataaaataaactcaagggagagagtggtgctagttaattacatgtatgtatgcatgctcgccttgaattatgaaacattgaaaaaaaaaatagtaacgccatatattttggaatggaagaagtgtaaatttaggctaatgtggtacattgtttttttctccaattgtttcatatgaaactactacaaaatttatatcaagagccttagatttatgctcaacaagatgaaatcccaagcattgttgtgggagttttttaatgataataggagaaataacatataagatagctagatgacataactttttatattttatataattctcatcttttatctactattaaaccaaaaaaatataaacaattaagatggtgtggtctataacaatctaaattatatatagattaatcacttaaaagcaaaattaagataatgtggctcaattaatgagagaaggaaaagaaatgagataatatagattaatcatctaaagagaaaacttaggtgatatgacatcataagagaagaaaaaggaggaagataatttgaaccgtagatcaatcactccaaaggttagaaataattgaggtgatgtggcttaatgagaaaggagagaaatgtcattaattacactaagtgggatttgggtggcgttgctatgtgttatgcttatttagaaattcaaagttgtaattgttattttttaaaaaattaaattaatgttaaataaaatattttatctaattatgatgtctatctctatcccatatttttcagaatacatgtggttctcgtaggaatctgcactaacaatcataattttcacaagcggttttaatttataaggcactctcggtagtatcgcaagaagatccatgtgaaaattaatcactattgacatggcatacttgtcggtattaaatacacaatcatgtgctaagagtgggtatccttctatttttctctaggatgaaaacgtgttatttgaggatgttgatgccaagatggatggatctgaattgtgatccagaaaagtgtcactgccccattccccaaatttcttaactacaaataatctgctagcaaagacctcgtatactgacaaattatgtgtcgggaaaagctttattgagagataggatctgttaggatgacttcatacttacaaagatctttgcagactcataaatcgacgtcgtggatggtaccacatgcctacctaattaagagttctctaacatataaaatcaagagcaattttacggtcctggagtagataccataaggtaccactttttctattgtaaatttggtacctaggtaatacgaggtatcatgctaaattttatactaaatttttggtacctcatagtacctcctcaataaccgtaaaattgcttataaactcaagtgctaaatgcagtccaacctctaaattaacccttctagctacttgaagaccgggatcgagactatgagtataggtggggcaaccgcgaaaaagtaaatgaataataaggtcatccctttttgcattgattgtgaaatttccatgtagtaaaaaaaatgtgattgatacaaattaaaccagtcaacctcagtcgatgttgaagttgaaacttgaactctcaccactactactagcccacatggttgagtcatcactccgtgactggacgtgcacccagcagaacatagtaagatctcattggcctgcatctgaacgtgcatctcacattagatgaaagagaaccattttcaaatcaaggatgtaattgtcaacaaatagaacgtttctgcatgatgaatatcaatgcacatcatggttactagtgacattaagaagatgtatagttgccttgccggcaaggtatatgcattgatcatttcagttttcgcaattcttgtctcggatgcagcaagttcacacgaactattagcaagaatatatgcttgttcctgtggattattttgccaatcctctcctgtccaaatttgatggacccgaatatatagacgcaatttgcatccatgttcactagcttctctttatatggcctaaaagtaaatgctacttgtcgcaagttttttagtgttcaaatataataattatattgtaactaaactgtaactacatcgtaacttcacaaaataaagatagcgcaatccctttaggtttcacaaaataatgaccaaaatcatagtttttttttgcgaatggtatatgaaattcacaattaactgtagtacgtagcccactagcccatttagggccttgtcgtaacaaagatcttttttatggaaacacactatgaacacctccgaaaaactggaccggtatatcttgagactgacgaaattatcatgggcgtcttgctgacaatgggtacgtcgcctaccactgaaagaataattaaccataaatacgagcacccgtgttaaatataggatttgaactcgggtggactggttccaccacaagaaacctaactagttgagctacgctcactttgcaaaagaagatttggtgcaatacctaagctttatctagagttctcaatcattcatatatatggttagacaatctctggtgtatatcgtcccggaacaaccaaaccgatgataaacatgcaagatgcacatcgcctagtgtttttttcttaagaaacaggcgcccacaacgcatacacactcatctctatgaaagcacacacgcacacctaaacccttatgagtacctctgaaggactgggccggcatatcttgagattgacgaagtcaccatgcgtgcctcgttgtcgacagatacgtcgtctattactgaaagaatagttagccgtaaatgcgagcacatgtattaaatttaggatttaaattcgggtgggctagtttctccacaaagaacctaaacagttgagctacactcacttcgtgatgcattgcctggttttggttggaactgatcagagggaatataaaatattgcctaaaattattaagggaacccagtggtggcatatatgcaaggataaggacatcacctgtgtgtcaaaaggacaagagaatggagttaaaaaaaagataacgaaggatagactattgcaattttttctcttcattattggccccaattaatttggatggtaaataaaaggtcgataattacgtgagaagttcgatggtaaattatgatcgatgaacaactgagatgacacgtggtttgaccataagcccaaagttattacaggttgctggctgggctaccttgatttatgataaaatttgctacatagcatataaaatttatgtaattggttgaaggacacgcaaaatcgtgtcactgctaagggacaccataaaattgatgtaattggttgctggacactggaggtatcattttaggcaaattttgctacatgacacttcttatgtgtggttttagccctaggacactgcccaaactcatttttggaggaaaacacttcataaacatggtaatttaccagtggacaccgtgccgattaaaataataatttccggttggataggagagggaaatcgcgtgaaatatcaaaagttcccttgggcccacttgtcagcactccatctatcttccacacttttctttctcccttcttcttcttcctcccgccgagcagggtgaccgggtcatcctgcgtgacgcgatccttgcggcgcgccgggtggtgaaggcgaggacgggacggtcgtcggcgaggtggcggatgccgcagcgagggagacggggtgcttggcgagggcggatgccgcggcgagggagacggggtgcgtggcgagggcgaagggagatggggtacacggcgagggcgcagggagatggggtgcacggcgaggtgggagcttgcgtccacggcgtccacggagaagaaccagatggtgttcaccgactgctcaaccacctccgccgctgccgactgccctccgcacgcagcagcccgcggcgagggcggagggagacggggtgcgcggacatggggggtggccacggaggagggggaggacggagccactccaggacgcggcggcaggcaaggtgggagcttgcgtcgccatggggtgcgcgctgctctcgctagctgcccgctaccgcggctcctgccacgcgctcgctcgccgccactagctaccgcctacgctgcgctcgctcgcacgctgctagctgccgcctgccgcgcgctcactcgccactgttgccactccacttggccgacgctgccactccgccggacgccgtcctcgctatctccgccgcgaccgacgccgtcccgtgcgcctctgagatagatgaggagagagaatatagagagagatgagaagagagaaaggagatagagctgacatgtgggcccaagggcattattgacatttcacgtgatttctctcccctccccaactggaaagtattattttaatcggtgcggtgtctactaacaaattaccacgtttatgtagtgtttgcccccaaaagtgagtttggacagtgtcctaggactaaaaccacacataacaagtgtcctgtagcaaaatttcccatcattttattatatttgatgcaaatggagagagagagagaaatcgtgcaaagtacaaatgtaccctgcacgctgttcttcttcatgcttcagctcgatacagagcaacaaaaggagtgggtttgggggtcggggtaggggacaaaatggcagcatcagcgaggccgatgatcacgtggccggctggttggagtcgttggggtcggggagaggaagaagctactccggtggcggatttggtggtggaggaggtgcagattcacccccaaccgccgatcgtttcactgaattaggtcggggaagggggggttgctccccatcccatccacattgtttcacccataaatcccccgtgaatcacggctattgtgcgaattaattggttgttgtttggccgccggcgaaccaaccggccgagctcctccacggctcctcctctcccccgacggcttataaacagcgcccaggaccacctctccccctttacctcgctgctcggatgccatgccctccccaccgccgtcgtgcgctctgtcccaagcaccgccgccgctaggcgtcaactgggacctccccgagcaccggcaagaccaccgccgtctttgtcgtccccgtccacgcctccgttgtgcctggtgagcatcggagctccatctccaccccatcctgagcctgccacgctttcctcctcgtcaccactcgccgttgccgcctccctatctcggtgcgctcccgcgcttgcgccagcctccctgcgcagcgcgccgctgcgtcgtggccaggtggagaaagagcaggtaggagcaaacttgtctattttaaatttctctctccacgcttttttcaaatattataaaataatgcttccggtgtcttatatccaattacaccatttttgtggtgtcccttagcagagccacgattttacggtatccttcaaccaattacacaaattttggatgtcctcgggtaaattttgccttgatttattggctataataagtgtgccataatcgtggttttgagatccagatatttgtttgtttagaaggcgcaatatgtgatctcgaccaatgttaggttggagagtccaaaagaaatggttacttggaaacattgatagtgaacattcaggacttgtattttgttttgatgcctttgtaacctagtttaaatgtcaagaaagcgcataaacttttcttttcttctgaacaatatattgagtgccttttgttgtgtacaatgaaaacggattgttctagagtgttgccgtggagaaagggatgagatgatgtggtatgcatgatttgatgagttaggaggtagtgcatccctatctgtccaagcaaaatgctcagcaagcagccaaatgatgtgtttgtgacctcttcaaaagtttgtggatgcagtggcacaggaaaagtggaggctacgatcgagtgctctagtttctagttagcacggtccatcataataaactaatttggcgcacataatggaatgtttcacgtcgtgattgtcgtgtgtgatatatatatagcggcccgtgataggaaaatgtgtatatttgattagcaaatttatttccgtggtgaactaaattatcttacattatgattctattgaaaaagatgcttttctgtatgttacagtacagtgcataaattttacaccatactcctatatatgtattaaaggcattttggtaaagcttcaactcctatcttcttaattctaccttgggttttaaaaatgtacgacgctggtgacttttcaacctcttttttaagataactttttttagaacattaagaaaactgttagaacattattacagcagggcatgcaaagcagtagtcactagcctcaacagagagaaatatagtggtactaattaaagaaacttccctaaaatctaagagaaaattatcattaatttttaagataatcataacatgaataagtatctatgttactccatactgatatgtagcaatattcgttaaccagtacactatgaaataagctgcttatcccttctatacaagaaacgttgttcccatactgtgacatgtcacaaacactaagtaaacaaacaatttaatatttttcatattttcactaatttttaaatatatgaatagttatatggcatgtctaaaagtcaataatatcatgcatttagaaatagagggagtataacaaagagtttgaaggctagaataaactgatttaaggctctaatttaataaataaaatgtgaacaaaatctcatgtctagcaaaccctatttttccagcagctgcagctcacataatttttttggagctagctagagatgcccagcttgaagaggttggaggagtcttatcaataggtcataatgtagacgtacaaagctagctagaatttgaagctggcatgaaaacatattagaaaaaatagctatagtgttttcctgtaacacctatcttaaataatgtgtgtttgcatagttctttatgtgttacttgattgtgttacaagataatgttctgtagcagtgtggtgcctaaagtggacctggcccctggcagtgataacatgcatatattaatttctcaacagtttagcttttcaaggttgaaaacctctgagtgcaggtatgcagcgcacaactttattaccatgatttaaaacatcgatacaatgccatcaagtactaaagattgtgccatcaatgacttgaaaactaatgccataaaaataagctagttgttatattttctatctatttcataaaagaaaagcctcttacctctaaaaatcccaacatttgtatgcaatgggggcgggccttttctagagtttgagcaaaacctattatgattggccactggtatgctcgctagtgccggtgagtctgtccatatttcggtgtcggtcaattaagtttagttttacaacttcaatcattttgttttcgatctcgatcagtttggttcagttttttggtgtccatcaatttagtttagttttacggcctcaatcattttgttttcgatctcgattagtttggttcagtttttctgtgtcggtcatttttacccatctctatgcccgggcacctgtccatggcggtccacccattgtttgtaggggcacacatgcacatgtgcatatatggatggttctgcgttcttaaatccaagttctcaaccttcgcacgcttctcaatttgctaaacggtgtgtgttttgtaaaaattttctatagaaatttgctttaaaaaatcatattaatccatttcttaaagttttcttaagctaataattaattaatcacatactaatctattgctccgttttccgtgtcggtggtgagggttcccaacccttacctaaaaacacagcttaagttgtgtttggggtcgaacatacactctcaaaaaatcatgtaatttttaattgaattttggctagttagtttttatccaatgggttacatagtcaagccatttgaaaatttatatagatacagagttgtacatatgcatgttttcttaatgcataatatatagatggaccaccaaaattaaccgtttaatttacaagatatagcaacataaagtgttattttattatgagatacatcctatattaaccaattaatttctacattaaagtaaatcagccaaccattctgaccaacactaccctcaacacaccacctttttcctgcagttttcttacaaactcatcatgctgctttatttttcagctatagggaggtgaggtccttcctaagttcctagctagtgacggcaataatacacaatcctccgccgagttgtgggggcaacaagatcctgctgcctctctctctctcatggtcatggtctgtgcagctacattgccaccattccttaacactacagagctcatgatttgagccaataagcaataagtagagaatcttttgttgtataggacatctgggagctggagaggcatttgagggagggaggaggatatctcttgattgtcatcttcccccctctttcttcccttcttataaccttcctcaactatggaggcctaaccctcctctcattcttcttcaacaacaacaacctctttctttccactctctctctctctctctctctctctctctctctctctctctctctctctatctatctatcttgacaaaggaagagtttccaagaaccctgaatcgatcatctggagaaagattgctaaactctcagatagctgcatgtatgagagcttccttatcaaggtgatttctctctctctctctccctcttgaggctctgattactgactctgatcatcatttgcatggatccatgcatgatgatttcttcagaaattcattaaactgtataagcatatatgctgagcatcaagctttatattgcagttcattctttcgatgccttgtgtcacaagggaatttctcagttcttccatcctaatttctagtgaatcatatatgttttttttaaaaaaaaattgttgtggtttgttttatttttattggagcctttattgtgcatgggcacaatccaaggcacatgctgctttcttttggtcattttgagatatataaaaaaaatgatcaaggggatttgtacttcacacccatactgcaaaaagtgcaatcatgtttacttatatcactcacatctagtaactacctcctttcttgtgtttgtgtttttttgcatatatttcctttttcattcatggaaaacgtttttctctttgtacttctttgctcatcaacaattagctataaatacattgaataccagttgtactaattttgcaaggcaccagctgcaaacattaaatccctgtgttgcatggtccttttccatcatgcaattctcttccagggcaccaacccccactcttcattgaatctggcacatgctgtgcatttcatgctagctgcacttgatgcttcagtccacatcccacttagctagtgagtttcattcagaattatgggaaaccgaataagcgcgtcgcagtctgaaaactcgcaactactattcacatatggatttttgttttaaaagaaacagagccagagaagaattttgtccatcaatatcatcaattatatatcaaactcaatatatataggtgctgatcatggcaagcctgcatttgaacactgaggccagcctacataaatggacagagggatgaggccaagttggcaacatcttgtgcagaaaaaggagaacagcaaaaggagaggaagagcaagtaacaaagtcatgcctatatgatggggccttgtgctgctgctgctgcttgaggtgagcactgttccatctgaaagcagcacagagcattagtgcaatcaccactgtttgtttgttatcctaccttaccttttattttttggaggcacacacacacacctctctctctatgattctctccctctctctgaaaactgaagagtatgtttatgctacaagctggagtttggtgcatgatgaggatacaagggacatgagttgcatggaggccccatatgtcttccttaatgccttgatgctttgggcattcaagaaaaatgctaggcacacaagcacaaaactagcagaaaaatccacttcttttggattattcctacactagaaaagtttaaaaagttatcttggatttacttatttattctccgctcttccttggaaaattttgattaccttatcctggatttcttcattgcttccttaaaaaagatgcctctaatgaggcaagatccaactctactacattttctttgtcactaatgtggccagcaccctgtctttgtattggatgatgagtgtgtgtgtggtttgggcacaagtcacaccaacacacaccatcaacaaaaaggacctagctatgctaagctagagtgatcctaatcaaatcaacaggacccctaaaattccacccaagtgcttgtgctatgtgtgaccctaactgtgaagtcatgcttgcatataacaccaaggaaatgcatacaaaaaacacaccaataatatgtacacttttttcttatcagggatactctctgaaggtgaaaggccatagagagaaagagagagagagagagagagctagtatggggctcacagaaagttagtagctatgaacagtgaacacacacactcacaaaattgaaggtgtggtcctgaaagctcctctcttcccttggaggtttatatatatatatatattagcaaggctgattgtgccttttctctaaagagaagagaagggccacatcttattagtccccctcacatttgccattagcttaagcttcagctttttagctggcagatcttaaggcttcagaatttctctttaattcatcaaggtatggatccacttgagcatcatacattgcatttgttttgcctggatggagcttttcttgagttttaaatgttttaccaatctatcattgtttcgatggcatgcttttgcccctggttttgatgtttcttagaatcaagctcctgcaatttcatcagcactttctggtttttttgtcaaatacttgcttgttctgttcgagcaatggttctgaagaataaccagccaacagcttgctagcttggtgactgggattattgctggaaatactagataaaagatcaaaacagtttatctagttctgttctgggattattgatcgaccaagttattggaaatttatgccatgttatgaaattcttgatgaaatacccaacttggtgattttgctctgttttgctggaaattagacagaaccagcaaggtttttgtcagtttcagtttcagtaaagaaaaatgtcactgtttatgttcacctcagatgtagttcattgaacctgcagcaatattcagttatattgtttcttaagatagtgatgagttcagtcaattaaccagagcatcctttgcaggatatcaagaagttcttcaccatgaagtacatgaagcttgggacaaagcctgacacattctacaccgaagaagctgtcaggtaaatgtcgtgcattcgtattttcgtttgtcgtttcaatgaatatttgtaactattttgactttgttgcactacaggtctgtactgtcagacgtacctgctgatctcatcatacatgtcaacaacacaaagtatcagctacataaggtgctggttttgttcattgatgcaaaattatctttattaccacttttgaaccatttcctatattcctcgcagtgctgatgaaatttcctatccttaacttttaatgatataagatatacatattgatcacagacttttcttctagaaaacagtatttgaattcaatagtcaatcaaaaataccttggccacctaatccaatctgaggagcatctcccctgaaaagattttgttccatactgaaagccaaagttgattgaaaagatactcttggccatcaactccatttgcacccttatcaaggtattcaaatctgatagccacaccacctttgcgaatcactgatttattaagcattgggcatacatatgaaacatagaatatgataggaggcgctgaatcagatccatctttctctgatagtttaacatgtcacatgttccccaatgctacattacattgtttaagcaatgtcacaggcctaatgatgatgtgaagttgtgaactaaggcaactttaccaagtcgcggctcgcaatgattagcacacatcaaagcctaatgatggcctcaaaccaactctatctttgtttagtcatcctttctgaaatgacgaaccgacattggtttaggttcataggcctgaagatctgctttgccaagattgtcatggtataagcatcaaatgaggcattaaaaattacttgctatgcccttttctgatccacgcctcaaaagcttcttctgaacttcacaaaatcccggttaggaaagttgcgggaatagaatgcaaagttctctttaagttcagtcccgtgaatgccactgatggaaatagtttaatggaaaagatctaaagtgaacaagtggtaaaattgaagttcttttaaataaaactgaagattaagctgttatttaagatttttgcagtttggactatgctcctccttcagatcctctcatgattcatgattttgaaaagattataggacaaatgtacaaaactggcttcctgatttatttttccatgaccaagcttctgattcaattatgtgcattttgacattaaagaaaacaaaactgggagaaactattttgcatggacacaagtgttacagcatttatgctttcataaaaaggatgttgcttttaggttggaaaatgaagacaatctgtgattaagttgctcggaatgcagagtaaatctgaattgttgtactttcttttctcaaaattacttgcagctaaaattctgttcccactctgaaaatgctgatacagaaggcactggttgccatccgtattatcaagtatgcaagcaattttttagagaagagaacaatcaaaagttaaagtgctcttgctaatttcatttcctatttgcatcaatttctggttaaaacctagaacaattccctgtaagcaatttcagtaccataacagaagttcagacttcagagtaaactgaagttaaaagcaaataatcatagtttaaggacataaatctggtagcaattagactatcaaagcctttatcatagcaaaactgcatctgtattgcctacagttcagactgaatattgttttgctgccaattcaaaatatacacatgtcccaaaaaatatcacaaacttacaacaaaggttttagcacataactagaggattccatttgaaggaaatgaagaacagaaatacaaacaaataggccagaaaattaaaatttggtgagtatttatcttttctgttttccaatgtccaacctgttgattgatttcaggtgtttttaccctgtagttccccctcctcctcaagtgcggcctcctgcagcgcctctgctccgatgacgacggcgtcgacggcgtcgatgcggcgccggtgccggtggcgctgcacgacatccccggcggcgaggaggcgttcgagctgtgcgccaagttctgctacggcatctccatcaacatcggcgcgggaaacttcgtggcggcggcgctggcggcgagattcctccggatgacggaggcggtggccaaggggaacctcgtcgccaagctcgactccttcttcgactcgtgcatcctccagggctggaaggaccccatcgccgccctcacggccgcgtggcggatctccggctggtccgagagccgcatcgtccagccctgcgtcgacgccatcgtcgagaagatcctcacgcccccctccaaggtagatgctttgtccttcgcgccaaattttgattttgaaagccatttgaagttttttttttcccgtttctttcttgattttggcgcggaaacggttgatgaccgcagattatagatgaatacaagtgaaatttacacaaattttgccaaaaattaaaattcatttggctttttaaacaccatgaaattttaaaataaaacgttgtcatacattttaaaacctaaaaccatgtaaccatcaagccggttttgtgcattgtagagaaagtagtgatgtggcaatggcgacaaattcactacaccaaccactttctagtaatatgtttctatattgtaccaatcacgctcatataaataaggatatagtataattatgattaggaaataaaacattagattcgatagttatgtacgctgcgcgctaaggtagaagtaaataaggatatagtataagtatgattaggaaataaaacattagattcgatagttatgtacgctgcgcgctaaggtagaagtaaataaggatatagtataagtatgattaggaaataaaacattagattcgatagttatgtacgctgcgcgctaagatagaagacaggaggaggatgattccacttttatatagtaataacagagaaaagtataaataacagtttattagatcgtttttaaatacaaatcgagcctgacctaattcgtagcagccgaacccagttttatttcttttgagatatgaaccgaatttagctcgtatttgacgaaatttctgtgaaaaattcataaatgagcgtaaatatttgtgcaggttacgtggtcgtacacctacacgaggcctgggtacgcaaagaaggcccaccagtcagtgcccaaggactggtggacggaggacgtgtcggagctggacatcgacgtcttccgctccctcctctccaccgtctgcgccgcccgcctcctcccgccgccgttcatcggcgaggccctccacgtctacgcctgcaagcacctgcctgacccgctcaaccacgccgccgccgccgccaccgccaacggccagagctctgagctggagacggcggcggcgaagcagcgtcgcgtgctggagaccatcgtcaccatgatccccggcgacgccggcgcggtcaccggccgcttcctgctccggctgctccgcgtggcgagctacgtcggcgcgtcgccgtcgacgcgcgcgcagctggtccggcaggccggggcgcagctcgacgaggcgagggcggtggacctgctcgtcccgatgccgtcgtcgtcggacccgccggcgtacgacgtcggcgccgcggaggccgtgctcgagcacttcctggcgctgttccagcggccggcgccgcccgacgagcggcggcggatgagcgccgccatggagaaggtggccaggacgttcgacgagtacctccgcgccgtcgcgctccacgccgacttccccgtcggcaagttcgtcgacctcgccgagtgcttgccggacatcgcccgcaacgaccacgacggcctctaccacgccattgacacctatctcaaggtcacagaatcaatcacaccgtcaaaataccagctaaattaattgatcattcgagctgataagatcaacaatggcgtatgcaggagcacccggagctgagcaaggcggacaagaagcggctatgccggatgatcgactgccggaagctgtcgccggacgtgcgggcgcaggcgatctccaacgaccggatgccgctgcgcaccatcgtgcagctgctcttcgtcgagcaggagagggccatgggcggcggcggcgcaagcggcagcaacagcgccgtcgcgcccgacgccatcgcaatgctcgccgcaagaaaggagaaggaggacgagccgccggcgccggccgctgaccacaagtcggacgtgcaccggccacgcggcgaccacggcgaacgcgcccgggcggacggcgcggcgatgacgaggtcgctctcggcgtccaccaccaagacggccggcgctgccgcgccgaggacggcggagagtagggggagcaggatgaggaacaagtaaatcaatggtggtcgcccatgaatggatgacattcttgtttcttctgatcccttgcttgaaatttgttgatacttgtgattcttgatttttttttcttttggtattctttttctattttcttcttcattttgatttcagtgcatcccatttttggtgggagatgtgagggccatattgttgaaagagggaagagaatgaggggtagattttgtaattaaatggatgggggataataagaggctataatcatacgacctagcatagctcaccaatcaagaaaaatgtccatcttcatcattcattccacatatgtatctactgttaccttcatccaaatattcccttgtgctctttggacttagaggataatatatctcttaatatgttttcaaaaaaaattaaagattgtgatataattattcagcaaatgaacttaagattatcatatttatattcatagtagataatgtttatagtgaaaaatcaaagattcaatacattggttcgtcccagattcaatacttcaaagagtggattttaaacttttgaggggacgtaagctcattatttatatgccactcaaaaaattatgaatatatcacttcacaaaaatgcaagttcattctaaccaacaaacacgaaaatgcttcgtatctggcgtctggtccgacgccaaatatcggacgactcgtccttatccaaaagttactctgtaactacctcctcctcctccccccccccaccacacacacacacacactcctatctctcttctctttttttttccccttgcggcagaggcaaggtgctagacgaggctggcgacgggctggtcagcatcctgctcgtggcggcgctattcatcctgctcgtcgcggacggtgcggcggcgttgttcctgctctaccggccgcaggcgccagccatcgccatgatggccgtgcagctcccctccttcgcctcatgcaacggcaccgtctctgactttgccgtcacctcctccgctgcttcctcctcccctgtgcagaccatcactgtccccgcctccggtccgtccccagcggcagtgctgcagccggcccgtccctggcggcggtgggcgcggtggcgctgcagcaagaacagccgcagcagcagcagcagcaggtggcggcaccgccggtgatggaggtggactcgccggtgaccggagatgaagaagatggaggtgggtttgtttagttggagtttaggatattgcatcctactgttttagcttgttacactctgttgcattaaggtgtttcattttgttttgatttgatgtagcaatctattgtatgtgtttgttgcactctattttattcgtgtgtttcatccttgttttatcggatgttgcacatgatgtacgatgttttagcttgttgcactctgttgtattaaggtgtttcattttgttttgatttgatgttacattgcaatatattgtatatgtttgttgcactctattgtattcgtgtgtttcatccttgttttatcggatgttgcacatgatgtacgatgtgttttcttggatgttgcagaattgagtcttgatgatgcaagtagtgttttttcactgtttcatctgattgaaacatttttttaccaattggtgaatcatttctcatcgagtaatgaagcatctgtaacattttctagtgaaacattatttaatgagtgatgaaatatctgaaacatttttttatatatgatgaaacattgtccgatgtatagcaattgcaagttagaatttaacttctacaagtgaaaaaaataactatagctatttcattgcaacatgtagaagttaaatataaccttttatgtttttgagtgattaatcacatattaatctatcttattgatttttttaattttttaaataagatttttttaattttttaataactatttaaataacatgcaaacaacgagggaacgttctcttcagagcagtttccacatattgaactagagttcagaaaaaaaaaaggtgtatatgagaagtgagcagggagctcagtcaaagaaagtacaacaaaatgtagcacttgaaaatgccatatatatttcacacttttcccccctaaggaagtaaggaacccattgtcattcatgaaaaaaccactatatcatgtcggcattcaacaatgtacagttactggttccgtcttttcataacaatgggcttaaaattcccccaaatcaaccccacctatgatacaacatatccagatcatctgagtgactcatcaaatctccttcacaacagtgaaaagaaaaatataccctcatttccctcgcaaaactggccttagtgtcaagagcaatgctttgcagtttccaaccataaaccccaaaacacgatctgctattataaactaatgtatccaacttcatatctaaaatacacttctcatttgttagtccctatgaatgcttccgatgttttctagaaataacatcacctcttaccgtacttcttgtttcaataattctggaagcaaagcagatgaaaccgatgattgccaatgcatagagcgccctataaggagccagagccattgagctaacaaatgaataatatccagctacaaggtagagaaagcttagtccaacatctcgccctctccttccaggtagcttgaaagatatacagctcacatttggtggtgatccgaaaagtccatgcagaatagtgccaacacaaagtactgaatccacaaaccatggaaaattttgacccattccgattctctgcagaaaaataatatgatgcgatttaaatcgacattcaataagctgcacagcataatttgctgagctgcgcatcctatgaatgatttaatagaatgtaggaagaaccaaaggacagatcaacaaaaaatatactagttcagagataaacagttggcagggtttgatgccgcgatgttagagtacattgatttcattgggatatcctgtagcagctataatctgaaaaactatacactactcaatttatagcccataaatccaatcaaagcctgatcttaactacaggtgaaaagttgcacttagttaacgagcaatacaaatcgacatcatatttctaaccacacaatcttatttttaggacatttatgccatatcaaggccttccagttcctgacaaaatgaaatgattctaaatgcattgcatttctattccacaaaagtcaaaaacacattattctaaaatattcttaaatagatgagacaaatttcaccctccgtagtttattaaattttgtttgcatggctgaagtgccatgggagcagtgtagttgcttttctatagtaatgagtcaaaatatcactggctcatcaataatgttagtcctggaaatggtagaccaatactgtctactgtctatcttgccaaaacacatggacacaataagaccgtttcaatctagatagcctactcatgcatataggcaaactgatttgagaaagactggataatagctctagctctagctccatcgagatgaccgacaaaattagtatgaggaagcatattttacatatctcactccacattggcagggcaaaagttaataaaaactacgagtaactagaaattttccaaatgatattcaggtgtgtaagaacaaacctgtagccaagcaacaagagaaggtgcaaacattagagtggcaagaaggtgcaagatcatgatcccatgccgacagtcaaatacttccaattggcagtcagtaaaacttttaacagatgttgggctatcatccatcggcagaagttgctcgaggccatcttgtttattttcgggcagaataatattatcacccatggatttatacaaatcctttttctgagtgatactgcgaaatgaagctgctaagaaactgacacaagatcaaaacattagtgtagtagttgaatgattgcaattatgtacaaaatagatgtacatgagcatccatttgtatattagagatactaccgagaaatgcaagaaattcctcctagaaaatgttcttgtaaacatgcaatttcaaaaggcacagggaaaacatatctatagaggattttagtaacaataacatgtgaaatatcagtaaaattaaattgtacctgcaaagggtggagtgtgcatggaaggcatgtgagagaagtaatacaccaagaccaattgctggatgaactaagcagacaagtggtattgtagcaaatgctacaattatacttggattgtttttaattatctgcacaatcttttccaagggcacatcagcatagtctgaatatgatacaagaaaactaaaccatgtatgaaggtcttgatataatctttactttcagaagcaatttacctttagcgactgaaatggtaatgagagagtgaggaagtggcgaacaatcattgattgagtaccatcctcccatgattgccagctgtagatcatacaaaataacaacagaaaaataatatttggtcagtttaaccacagattagtttcacaactatatacactttttttaatttgacactagagtatcacttatgaagaattaataaagcaaaacatggattccacaaaaatgtttctaaagttcgtttcatgaaaaccatcttttttaaagattacaaccatggaaaagaaaggataaattggttctaaataagcatgcgttccctcaatttcactacgaactacatgcaaaagtctagtttttgtccctcgattactgccttagtctaattttcgtccctcgactacaataccggacaactcatgtccctcatctctcaaaaccagttatttccatcccttgcctccttagaaccctggttttgtccacgtggaaatattactaagcattactgaggtggaatcatgctgaatcagccaggcccattaagctctgcaccaagcccccccccccctctctctctcccttctctatcatgctgtccctcccctgttctagttctccaaactccccattttcaatcccgcatctagtgagctcccaccatccatggcaagctcctcgagctcaaggtcccctcgtttgaaggctgcgggcttctagtgtccctcacctgcgggcttttgcttgctagttaatgattccatacagagagggatttggtgctctttggattgattatgatttcccttttcacccttgaaatttaagcctggtcattgcaataaaaatgctggcatctgcattgcttgtgttctgctgtttcttgctaatttgttgattgtgttcctcccgagcaaaaaagaaaaagaaaaaaaataaaataaagaaaataaactgaagaactaagcttttgttctgcctccacgtccctgacttggtcgtgggcgtcagccacacattatttgggtaagatatgggcatcgtagtggggatttgatgcttgagctagggatttggagatctgaccagtggttgctaggttggggcaggagcaagagcgggagggagagagaactagaaaaagagtaagagagtggtcagtactgattgagcatgatttaatcccaatcatttgagtagcatgtccatgtggccaaaaccaggttcaaatgagatgaaggatggatatggaccggttttgagagatgagggacataagtcgtccggttccgtagttgagaagaaaattagaccatggcaatggttgagggaccaaaactagaccatttcctaactacattctcaatttcctcaactagtcaagtcacaaacaatttgaaatggcacttcacaagaaacaaagaagacaaacatagtgaaatagggaattttaaacaggcaatgatgatagacccatcagaagactaaatcctacttgaaatcatgcacatttcccaattggaccatacaatgcccctaattataaggcacactacaattcatttactttaacagaattaaagggcatgtactgaaaatattgcaatatttgcacacatgatttcagcaatggacttaatagtgtcaaaatacgcatcccacgacaatagacttttaggaaattattgtggaatggagaagtagaacctactcctttgcccaacaatcctaggaaattaaaatgttcatctttgtgttgttcataaatgttcttgtagttaattgaaaaggaaaatagtacaccaataagacaataatactaacagcaatactaatttaggacacatgaatcagcacactccacaacagtagtgtcaaaaggatgatgcggaggactgctatattgttacccgacaacaatcatcaaaataaaggtaatgtatttaagttagaagcaaggaactccaatgatcatcaaatgaaccatctccatcacaaagataaatagaattttaagattcctaggtatttcacagtaccagtcaaatcgtcagtgactgcatcctacacaaaaaaacattactcaataaaaaagggtacttagtgtactaaccgcctcttgatgaagacatgaagaatagcagcgacataaagaatcaattttgaacttagtatcaataaaattgtgaagccattagcaactatgtagcacatcatggtaactagcaggaaggttccaagtggaggattttgctctctggtgaaaacaagaaaggcaagaaaaagaagaactggtatgaagcaaaggaacatgaatgctctaggcagcctcagattagactctatagctgacaaaacagacggcacagaagaatcatgttcccatgctgatgattgccgcatcaggccgaaaaacattacagcaatcatgaaaccaagaatctgcaaaatgtaaaaaatgaaacagttcgataagttatctggccaagcaattcatgtaaataagcaggcatccgggtgaccatgacatcctctgaatatgaatcaaattcagcaatagggacagtgccataattatgcatatatgcgcaaaaagattacctgtgatgagtacagcaaaaagaatctgcttgctgcagcactaagtgaaacacgaagactcacttcatatgagcaatgtggatcagcctacaataataggaagccacctaatgtagtaagtacacaagttgagaaagtattctttagttaacagcagatagaaataatttgatggatagctcagtgacacttgaaaaatggataatgtgcaaatggacaccctaaactttttgaattccgaattttggagagaagattttgtatgtcagtagtatgctcacggctggtggacttagtggcattgccaaaaatacaggcctagtagctggcaacactcaatggttcagacgtgcagcactgcaagcatgaaacatgaaggctggtagcttagcaactaggggactagacagtagagattgataaccagagtgagactgctcagcaactcaagcagaacaacttgttagcacatgtgggagcaggagcagcatatgcttctgggaggtggcaatggcaggtggtacatccatgcatggcaggtaataaagtcacaataagctgagattaaagcagtatgcaaaaatcttacaaaaaaatttaagctggcataataaatggctgatcccttgcatgctaaaaactttaaggtgttccatgatttatgttttgcagtctccctaatcactactgagctttacattcatgtcaaaaactcaatatcgcagctgataaacttaccaggacaagcacagtagatctttcagtcccttgatgtgaatcccaaagggcaggtgaagaatcaaccactagagtctcagagtaaatatttggaataatgtgcagacctgatacagggtcccaagccaaagcaacaggtgggaagcaccgcagtttacaaagttctacaatgcataccaacataccaaaaattataatctattaacagcgctgcatggttcctcaaactgtacgaattactagtagtctggtacaagaagtatgcaaattgatgtatggtaaagaccatatatcaggagtagaatgtacactgttattagttgttactaccaccaccatattaccatcaaaaggaaaacagtacaggcagtgttgctatcaagaatttcggtatatgcagagttaaagagaagaaacagctcactatttttctcagcttccaattggtcgccagtagcttttactccacatccagcagttctcaaagataatataactggtagaagaccaaggctcacagaaaacgacaagtttaaagccagtgggtggtcctccttcaaaaatatttcctaagataaaaaaaaattaagtttcaacacatccatatcatacagttacaaacatcattatccatattttggtaagcaagaattaattacttcaggaatatagctggagccaataattcgggcagcagaaagtgcactcgtcccttcctctggattaaagaactgtcctactgccatagatgccgctggaggtggtctacctgaaattgtctggatacagaagatcagaataacatcgacttttaacaattcagcagggaaggtaaacatttagaatatatttctattgataaaagtttatatccatgaaacaggacaaaatacttaacatccacaagatggatatcaatagagtttgcaaccgaatcgcagaaatgggcattaatgcattgatgtgacagtgttccaatgtactggtcacgtgcacagacagacagactagtcatgacaattatatatcaaagttagagaagacaatgaatccataactttccaaataatcatctttgattttattttttttatggcagtatggcttgtcatcgcagccagcaaaccttcaatgcgaatgtgaacaagtatgtggccaattcccatgcaaacacaaaatcctatatcctctttcaacattaaaggcctttttttcatattaaattgcacatttcttcttggtacttccatagccaacagatgaaagggacaacgtagatgactgaacaaaaaataaccaaaataatactacttttcactactcccaacattacataaatatgcccctctaatttcaaaatttgttaataacttcatattcgcctattctgttacaacagatggatcgacaacatgcaatacacatacatgttatcacacagaagaactttcacccttctaacatacatgaatatcgatagttttgacaaaacaattgtaattttttaaaatttattctaataagattgaattctatttgcgtgtgtagagaagtagaaagggatatgttacacaggaaacatggaaaaagatgtcttataggtgaaagctgcatatccagttagaaagatgttacatagggaacctttcaaaaatcatattgtgctaaactaaatgatgccaccaaaaagtacacagggagtcaatgattgatatgcaccatgaaaattaatcctaataatgaacagaaaatattatggtatttccaaaagcttatctaagtcacgcgcaagatgttcgccaacaaagcaacaaaccaatttgtcatatctaggatgaacatgaaacaggagttcctgaaattgttatcatttaaagtggactattgtataaataaggcctgactgcaactgatctcaccagatacatttctgagaaattaactgatgctgggcagggggggttttagtatcacaatagtacagcaatagccttatctttgttcacacttttatgtagccctgaactttttattattattattatcaaaagcaactagttttattataatagattatgatggaaggaattcaagatactgtcacctaaaggttgatgcgcatgaagaagcacaagaacacaataggggtttgtgcaaaaaattacaagaaaacaggaatggtacaagggaataccggtcgaggtgccactgagatagtcatgaagcggaaaccactcatttcttctggactaagcagaagaaatgcagtaggaggtggttgctcggtttgactcccaggttcaacctgttcaaaagcatagcatgtaattatcacaaccatgatggcaatgtgcaagatagcaatgaagcagagcaaatcaactgtagtaatggagttaagttatgctatgactcgtgttatactagcatcgtcaaaagctaaagaacaagaaaattaaaaaaaatcctcatgcaacagtttctggattaaatctacataaacatacaagtggcactgcgagcaccgataagacgaagggaaggaggaactgtaaagtgtgaacaacacaagagaattactgccatttgctatcatattgtcctaacataatttagggaaataagacagaaattgcagttaatagtttaagaagacaaaggtgttgggccatttattttaagcagaagaaacagagaaactagtgaacatgaatcagagagtaagaatgccagcaagcaggaaaacaagtggttcagaattataaatacctgttttggtgcaggtcctgcaggtatttggaccatctttgatgtaacttccactatctttttgctggcaggtactccattttgttcagatgaatgatccttttctggccacaaatgaatcctcaccccagaacatggagaaagattacttacaaaaacaaagtgccctttgccatttgatcccttgaacaagaaaaaataaagcagtcaggcagctgctccatctatacttctaataggatcaatataaacagaactatatataggcttccctaattaactcacaacaacatgcagcaaaataaaccactggttacaccagtaagccagtttcacctaccagttttttaatatctaaccatcttctcttgccatccattgctaaaacagtaactgaatttaactgaatatgcaggtccttttcaaggccatcacttgtccattgaagagatggagggcaagaaagtgaatccttttgctgcaagtctatgataaacatactatgttacattgagataacaagaaacacatgagtttttgacgccattaaatttgataatgccctacaactacctacatgggctaatgttatattaggttgaatcatgtacaaagattaaagaaacatactattctaatcatctatagttgttgaaggatatagaaactattagaaatgagtcaatcaatattggaccttggctatttaccatgcattactatgtactaagaagatctcttagattatggttctaatccagtgcttccattgattttttgaagaaaaaaatcgtttcatttagcctgtctgtactgctattatctgaggggtatgcaattgcttatttgttaagttgtgaagagaaaattagtttactaaattgtaaagagaacttggagaattgctaatttaatatgccatgttaataaatttgaattatctcaaaagcagagcagaattttgcaggtagaaaaattatttcacgagaaatgaaatatatgctttttcaatatattgaaaaggtggcaaggatattttttaaaaaaaaatcatattctattacttggaaacaaataattttaccaatgtttcccatacacaggtaagcttaccaactacaaaaaaggtgacacatctaacataatatatcattttctaagcaatcaatttgccattgtgcaaaggatgcaagaaacaaagaatgaaagaacgagccgtaccactagcttccttgttaccacttgcaatcagatttggaggcttaacacctgaaacaggagccacccaactcaaagactgcggaactgcactttggagcatttttgcaaatacaaaaagtcttttttgtgaactcaaaaatggctgtccattcaaaggatctaccatactaagaagtgtgtgtgcaacctgaacaaagttaaaatcaacataagtaaactgttgaaacatactgcacaacacaaagaataatttggcatgaatacacagttttgacctgtacaactaactgattgcaccagaggatagactgatgttccatggataaccaaacattcttcatgcttgagctccctaccataaaaccatgagtagaaggtacaattccatccagcaaagctaactttgacctaacctgaataagaatgaatggaaacttgaggttcaattggcctttaaggaacgaccatacctaatgttttgaagtaatcgctcaatattggaagtcaaggatccaaggatccaaaaactcgggcaacaatcattgagatattgaatcaaccatcataaatcaaatgaaattccattatctttaagtgctgtaggaaattccaaaatagaaaaatgaatggaacttcatctggaatacaatcattttaaaatggaatgaaataactttatacctccagagtggtagctaattgcaatactttaagagatacatgtcatctgttcttttagagatgtagcagctacatgacaaattacaggggactgaataaattttataatcttgatccagtatatgacacatggtctactttttttctaatggtctagtattttttttcctttccctctagctccgattggaatttccatcccagtgtgtggatggcatattggcaaacaaacagtcatagatgcaaattttcagagcatgcacatgaccagatctgcataggatttgtcatgtgaaatgaaaatttattatcaacagaaaagatacctgataatcatggatgcctccagctacagagacaacaacaacatttgagagttttgcactgctggtgcgtgataaccctgtcttgtatccatttctccattcttcattgacatgcaaaaaaaactgacccagagatggctgcagagcaatgggagggtacctggacaggcaatcattctacaaggtgaacaacatgcgaaacatctaatcaattgcaagaaaagagatgcagctacccaagtacccaacacatgcgcgcgtgcacccacccacccacacatgcacccacctgcgcacgcacgacaagcacacacacaaaccacgcacgcacgcgtgtacacacacacacacacagaggagagataggcagagagagagatagtactgatgtggactggagagtgtcagtatggtttccacagccgatttccttaagcctggatggacaagagctgctcgagccacaaaaccacccatggaatgtccaactaaaattacactggatggcaagttgtcagaggattgagcacgaccctttgatcgtgctaaatgagattctttgtattgatcaaggatctacaaagcataaccaagatacagattaacccgattcaaacaaatcatgatcaggtgtattcagtgaacctatatgaatacattaagcatttgtatgtatgggaagttgggaactaaacaggcttttgataatagcagcttttatatccaactgagcagaaaactttctttcttggtgggatgatagcaggagttcaaataaacacagttatgaacgaagggtcaattacagcctatgctaagttgttaccctgtgaatggcgtaaacaacatattcagtatgctcctcaagtatgcgtccatccattgcagagtgttctccttcaaggtcaacagcaaaccaatccaacatacggccatatcttgatgggattgaaaaaccctccagttcatttactgaaaatgcagtagatgcttcccgataaaaggtaggctcaagtggaccattttggtatgctcgaaaggattcagcagccagagatcggacctagatgcacaattacgatatgagaagcaatcatcatgtcatcagtaacactagtactcattcacaacaaa

SEQ ID NO: 4547 - DNA, 12280 bp, Oryza sativa
gccaatcacttggactgttttccgtgagggattcaggtctgctcacatccctgctggtctcatgaaatcaaaaagaaagaatttcttaacttgaagcaaggaaacatgcccttcatggagttcatggaacgcttcaattatctgggtagatatgccgcttctgacttgaacactgaaacaaagaaggttgagctatgcagagatcgtcttgcacctgaactcaagcatgctcttgctgctcatgaaatcaccagcatgaagacactggttgcccttcgtgttgaatcaagtgaaaaggaagtggttgaagaccgtaagcgtaagtgggctgcaaagaaatttgctggcagcagcagttccactcggcctcgtcttgctccatctcctgcggttcgtcctatggcacctcagccacctcggcagatgtatgtgcctccacgtccgcaaactcagttagttcgtcaagttcctcgcgcagttcaagctgcgggagatgcatctcgtaatgccaatgtcacctgctacaattgcggcaagaaggggcattattctcctagctgtccttatccgaagactggaacatccggaccgtactcgcagggagcaccgcagcagcctcgtggtcctcctcaagttcagcctggacagcgtggagctcctgctgttcccaagccagctccaacttttggaaggggccggctcaaccatgtcactgcagaagaagcaaccgacgcacctggtgtcgtacttggtacatttcttgtgcactccattcccttaacagttctttttgattccggtgcaactcattcattcatgtcaaccttgaaagcaaaacaacttgacttgaaaacagaatttcttagcgatgctatgcgcatccaatctcctggatccaccatggtcaccaaacttctatgcaaaggtgtagaacttataatagacggggtaaagtttaaagctaacctcatattattagacaccttgggcctagatgtcattcttgggatggattggttaactaaacatgagggaaccattgattgtgctcatagaactgtaactcttcgtagcaccgatggtcaatttgttaggtttacctttgaacaaacctccacttcaaatcaaccctctatacaatctctctctataccggagttaaaatcagtacccatcgtgaatgaatattccgatgtgtttcctgacgaattaccagggatgcctccagatcgtgacattgaatttgtgatagatttaatccctgggacagcacctatagccaaaaggccatatcgaatgacttctgaaaatttgatggaattaaagaagaaactcaatgagcaattggctaaaggtttcattcgtcctagttcatctccttggggctgtccagtgttgtttgtaccaaagaaagatggaaccatgcgaatgtgcgtggattatcgacctctgaatgaagtcaccatcaaaaataaatatcctcttcctaggatcgatgatttatttgatcagttaaccggagctcgtgtcttctcaaaaattgatcttagattgggatattttcagcttaaaatcagaccggaggacattcctaaaaccgcattcacaactcgctacggtttatttgaatacaccgtagtctcttttggattaaccaatgctcctgcttctttcatgaatatgatgaataaaatcttcatggaatatcttgataaatttgtggtggtattcattgatgatatactcatctactccaagagtgaagaggaacatgcgcaacatttacgtatggtactcgataaactccgtgagcatcaactttatgccaaattctcaaaatgtgaattttggttaaaagaagttgaatttcttggtcatgtactttctgaaggtggtattgctgtgaatccaagaaatgtacagaacgtacttaattggaagcaaccacaaaatgttcctgaaattagaagttttcttggactagctggttactaccgtcgtttcattgaaaatttctccaaaattgctagacccttgactcaacttcttaaaaaagaaaataaattcatatggtctgaggcatgtgaaacaagttttcatgaacttaaaagaaggctcacaacagccccagtgctagtgatgcctgatgttcttaaaccttttcatgtttactgcgatgcctcacatcatggtctcggttgtgtactgatgcaagaaggaaaagtagtggcttatgcttctcgtcagttacgaccacacgagatcaattatccaactcatgacttacagctagcagctgtggtgcatgctctaaagatttggcgccattatttggtcagtaatcggtgcgaaatctttaccgatcataagagtttgaaatatttctttacccaaccagatctgaacctaaggcaaagaagatggttagaactcattaaagattatgatctcggtattcattatcatcccggtaaagcaaatgtagtagctgatactttaagccggaagctacatcaccttgccgttattgagacaataaatcagccatcgttgtcctctgaatttcagaaattgaatttgggattggtagaggatggttatgttgctgcactagcattacaacctactctctattctcaaattaaagctgctcagtccattgatgaggaagtagctgaaattatgaaagaaatcaattcaaagccacaatctatatacactcttaattctgatggtatggttatgcttggcaaacgaatctttgttcccaataatcaacaccttcgagaaaccattcttgatgaagcacatcaaacacctttgtctatccatccgggttgcactaagatgtaccaggatattcgcactcaatattggtggcctagcctgaggcgtgacatagcagcatatgttgcaatttgcgacgtgtgccaacgtgtcaaagctgaacatcaacgacccgctgggctactccaacctttgcaagtacctgaatggaaatttgatgaagttggaatggattttattaccggtcttcctaaaacacccaatggacatgattctatatgggttattatggatcgactgactaaagtggctcacttcattccggtgcatgtgacttatggtggagccaagctagcagagttatatttgactcatattgtaaggcttcatggcgtaccaaaagtcatagtatccgatcgaggaacacaatttacatccagattttggaaaaatttacatgaacttctcggaaccaaattgttcctcagcaccgcctttcatccacaaacaggaggtcaagtggaaagaacaaaccaaatacttgaagacatgctccgagcttgtgtgcttgaacataacactaactgggagaaatgtctatcttttgctgaattctcctacaacaatagctttcaatcaagtatccaaatgtcaccatttgaagctctttatgggagaaaatgtaggactcctctttattggtccgaagtaggagaaagacaattctttggacctgctatcattaatgaagctgaaaagaatgtcactcttattcgggaccgattaaaagaagctcaaactcgtcaaaagagctactctgatcgtcgtcgacgagagctaagttttgatgttggtgaccatgtctatcttaaagtatcacccatgagaggtactcaacgattccaaattcatggcaagcttgctccacgatatattgggccataccaaataatatctaagcgtggacaagtagcctatcaattggaattgccatttcagttgtctaatatacatgatgtattccatgtttctcaacttaagaaatgtcttcgaactccgattgagcacacctcacttgaagacattaatctaaagccaaatctctcctatcaagaatacccaattcgtattctcgaagaaagtgaacggcgtacccgcaaaagctccatcaagatacttcgagtacaatggagcaatcatactgcggatgaagccacatgggaacgagaggaccgacttaaggccgaattccctagtttcttctagaatgacgaatctcggggtcgagattcttttgtaaggggggtaggctgtcacataccatgactttgggtgtttggaaaacatggaaatggtggaagaagtaaaataaataaaacttttgtttaaaacttatatgcttgcttgtttgtgcattttgtggtgtatgcatatgctttataggatcatgttcatatttaactaaaaccaatggatcaaagaaaaattcttggaacaactcaaaaatctgggaagaatttgtggtaacttcttgctgaccttagaaactaaatgcggattttaatttagcttatcaactcattagatcaaccaaacaactctctaaacacttaagcacaggattttgacagattctctggagcactctttgacactctgccaaaattggatcttgaactcctaggctgtaaaactcgatccaaactgtagttcaatcattgctttacaactttgcctttggtcactagctctaactctgcctggaactaattttaaactgaacccaaagatggaattccacctctgttccagacttggccaaaacctagatctcctctccttctctctcactagtcgctgccatgtgggccagggctgcatggcgggaccccattgtcagcctcacattcctctccacacgggcccactgcctgaactcgcatgccacgcgtgtgagcacgcgtcgagcacgggagagggcgagctcctcctgtccatctccgccggcgaccatacttaacccgaccggccgaccaactttctctccctctcgcccttgtctcgtttcgcggaagaaccgaggtaccccgcctcggattcgccgggaacggaggcgccatctccggcgccggcgagataagtcctcgactccgtcgcaatccggtgagcccatttccgttcaatatgcgttctgtaatcccctctcaatgccgtctctaacaccaccaagaacacctcatttggtgcagccaatctccgggaacgtgaccgcgtcaaatcggaacaccgtcgcgctctggacgccgctgcttcgcctttgctcgtcgcccggcttccatagttcgttacaggctgagccacttcgtcacgagcttcatcaacacctgtagatcaagaatcccgaaggaatcgacgcgaggtggaccacagtgggagatcctcttcttcttctccaatcccagccgccgacgccattcctttctttctccttctctggtgagcttcggcgcaatattttccgcctagagctaccttgtgctgatctaaacagaggcatgcttcctctctttgcagtagaagcctggggatacgccgtcgacgacgaccgtagcagccgcgccgtcgccgaaccagtacaccgtcgccaagacttcgctgagctgcgtttgcttcttggtgagcctcctagtagtccctagagtccttaccatacgcatgcacgattagatcgagcctcaaaactcacatgcatgtgcaagccgagcttagccgccgcttctaacaccctgacagccgctatagagcaccaaggcttgcaagaaaaacaccaataggttcgtacggttgttctctacactttttgttttgggagcttgagctgaatcgccgctgttcgccgctggtgatactgtgaagttcgtggctgtgctgctgctctgttctgtccagagcaagggcatggcttttgaaatttaaagactcccagggatgtattagcagcccgagcaatcacttacatatggggtcgtgcactaatctgtaaataacatagaactcaagtcccattttgaataaaatcctggaacacgtgctaggggctgcgggatctatttcctgagaacccaggagcttttgcgcaaaatgttagtctctgtctggtggacctgagaaaggaaaatgatgtatgaaaatttgagaaaatacaaaaactaatttcctatcaactgaaaaatgtcagaactttagaaagtggtagaaaattcatcctgactctaaaaattgcaaactaaattatgttggaatcatattttcatgctttgcatcataaaaatgtttgacttaacagaatcataaagatttatgtctcaataattcgaaatgcatttaggaccataattaacatgtaaacactttaaaaaaaaatctgtaactttgaatgtaaactgttagattgaagtttctttcactgaaaatcaaactaacacagagcacaccaactccataaaaaaaagcattcattttagagcatgttggatttttatgtatgtttaaattttaaatttttgcatatgtatgtttagacgattcgcagccgagtctcgaggaggcctactttgtagctgagcaaggagtggaagagcaaggcaagccacctcccttctttgatcacattgaacctatgatttggatgtttttgaaaagtttgcaaaatatgcatgtctattgtacactaatccattaaaatcttgtaaaatttgttagatcaactccttaacttgcattatcacctgaactccacaaaagaccttaaccattattccaaaaccttaggaacaatccattgtgtcacattaagaatgatgtttgagatagcaagtctataaaaatgctcagccatgcttagtgatgagtttacttaccatttgggctcaattacatatattaaatgatttattttatgatctggattaaaatgataaaatgtgatatttgttaaataaaatgttggaaaatgtggattttaggtttgggccgcatgtggtacacatattgtgtttagttgtgtactgatagggggagagtgtgcccaaaccgacctaaggacttcactcagcgtcaattcatttcgtatacagtacaaccacatgtgctagtatgggatagcccaagcttagtaaattatttatgatttagccttacattctggtaggccggtgtgtatgagttagtcgataattctgaggaattagtcgttgattcagaggaacttcctatttaccccgacgtggtagtttaggtgactaagtctgtccaatacaacggtattgtgccacgtgggtgggttcccgttgcgtccgccaccacggcgttaagtttaaggcgtgggcccgccacttaacggttctaggtcatatatcgagtatggcttaggatggagtaacacgtatcgtgctggtgtaaggctaaatcatgaatcttggaagggctttgttgtgagtaataaatcgggtacttatgtatcgcgtgccatgcttttgcatgattattatttcgcatcatgtgggtaaagtgtacgtactctgcagagttaaaactaatcgattagccgtgctcacggtcaagagcggcgtgtgaatatgtcatgagtttagacatgtgttttattcttctaaagctgaatttgaacttcaaaatgtgatgtgatttgtggtttatatccttgctgccatggaaggcaataaggagctatgttatatgtgtttatcatctaatttggtgcccaattgctaagtgtatgcttgctgaaatttatttgaaaataaatctgaaatttgaaatgctctttgcaaactaaatttgctttatgctaaaattatcccatgttagctttactttgaatttgccatgcatgtagagtactaggcttgcttggtgcttgccagtacaatttattgtactgactcttgcttgtattgttgtattgttgcatgtttagaattggttgcaggtgagatcactcctgtggaggatgatttcgttggggaagtttctttcttccaggatggttcttactagggtctatcctagtcggttgcatgaaagatcttttgggtagaagatgcttccgcgaacctatctattcagccaatcggccatgtgtatctaagttataagttgtatgatcctaactaaaacttagaacttagaactccctatgttgagatatcatgtgcttggatgaaagtgtttagtgtgttccttttgttagggacatattaaacatgagtatgagttaaagatatttgagatgttgtggatctttagccatttttgtcaagtctcctgattgtgtaacacatctggtcgccaccttcgagtggtttgacgggcacatctcaggctgaagttgactggcaggctaaaggcccggcaatgtctcacatatttttctctcggagcgtcgaatgtcttaatatgtttgatggaagaattgtgattagctattcatccttcaaatatactaaggggttcggagtgcttccgacagctttggtatcagagccaagaccgactgtaggaacccttttaagactgagcggtagtaaggcttcaaaagaaaatattttgagggtaatgtcctcactaaaatatatttgcaaaatctaatctattcttacttcttagccctgtttggataaattcctttcctatgaatcttgttttgattttaaaaccccatcttactctataggaccggaagatgcataaatagagaagtagtaactcatagagaagaataaggaatgaatgaaacaaattcgattcaagtcagtacttgaatgatttgaaaacttctcagtaaatagatgactaaatttttcccttctaaatttgaatttaaaattttaaaattttatcgatggcctagaaagtggtagtacggggtaggatggaattgatttgttttaaccatagtttgcttgtcatataaaggccaccagatgtttgtaaagcctctacattaagttcttagcatgtcccaaaattggtacgaattttacatgctcgcattttttttaaaaaaaaatatataattttttttaaactgcgcagattctagaactggtagcagtcgtccttctcattttttactcagagcagtatgctggacagaacctgacataataaccaaaacaccatttccaagttcctaaagagtttcaattgaaattctaattggtctatacttccaatatcttgtagatgtcttctatgtggcaaccatcgggctattctggaggttttgaggaagaatcactgcctcacatcctgtggcttatgctgcaacatctaggttatgatcatccaccggagtatcatttcttttctcatgagcggagttcatctctcgagcatatatggctgagctgtgtatacagggactttggacccatgaaccacccctttactttcaagcttgtggttgggatgcaccctcagcaatgcaggaagctgcattacaagcgattgtgtattaccgacattataggccagggttggacgggttctttcatttctttccagctcgcacaaaccaatcctccgctaattactatccaggtcttgagggaaacatgagagagattgacactccaggactattcttagctggcctggttcgtgctatggatagatatctcgcaaaaactataactgagttgcgtagattgcaagctagggtggtcatgcttgatagacgaatagaaccactcgggcatcaaggacattttgataatgccatcatttatgggaatcatgaactccagcctcttacagagactttgcctcctcccatgggtatttatcataatataaacactagagcccgcatgagagttggttttcatcgaaatcgtcgaaccatgccagaccctgcacttgctggagatccggtgctgctggggccattctatgagttcgagcggaatgggagacaataccgtttgactatggccactccgtcaaccacagtgcctcaacctcccatcggattctccgaagttccatagaatggtgtactggaaaaaaagaatatgtatggggtgtaactttcatttcttttctttaagatgtatgagatgacaccctaatatgtaatctttttaacggtcaaaattttgtaacaccaaggcatgaacttggtttcttatgaccattatccactcctatgtatctgtgatcacttagatcctttaaaactaatgtactggaatgaacttatgctccttttggaatggattgcttgctgtccagaaatttgtttcatgcaaatatatgatggatgacttgtaaattcggctataagaaatcattcctgtatgctacctatttagggtaatgtatatgccaattctatgctcaagcagctcatgtacttttgtactttgagtgcaggatgacacatactcgctctatggctgctcttactgatgatgccaatggtgagggagcgagtcagcctcgcactggcccatattcttctggacgtgccgggggtagtcgccgtgctgccactgcagaacagcatgatgatgaaccatctcttgctcaactcctggctaatcagaaccgactttttgaaaggatggtagcgaactctgaaaacatgggggctgccatggcacagcaggccaatcaagcaccctccaagctagcagatgttcaacgaacacatccacctcatttctcctctgcggctgatccactcgcagcagatgattggcttcgtgatattgaaatcaagctgaacctttgccggtgtgatcctgtagagaaggctacctttgctgcttactacctgcaaggtgcagcagctgcttggtgggagacatacaagactctcattcctcctgacgagccaatcacttggactgttttccgtgagggattcaggtctgctcacatccctgctggtctcatggaaatcaaaaagaaagaatttcttaacttgaagcaaggaaacatgcccttcatggagttcatggaacgcttcaattatctgggtagatatgccgcttctgacttgaacactgaaacaaagaaggttgagctatgcagagatcgtcttgcacctgaactcaagcatgctcttgctgctcatgaaatcaccagcatgaagacactggttgcccttcgtgttgaatcaagtgaaaaggaagtggttgaagaccgtaagcgtaagtgggctgcaaagaaatttgctggcagcagcagttccactcggcctcgtcttgctccatctcctgcggttcgtcctatggcacctcagccacctcggcagatgtatgtgcctccacgtccgcaaactcagttagttcgtcaagttcctcgcgcagttcaagctgcgggagatgcatctcgtaatgccaatgtcacctgctacaattgcggcaagaaggggcattattctcctagctgtccttatccgaagactggaacatccggaccgtactcgcagggagcaccgcagcagcctcgtggtcctcctcaagttcagcctggacagcgtggagctcctgctgttcccaagccagctccaacttttggaaggggccggctcaaccatgtcactgcagaagaagcaaccgacgcacctggtgtcgtacttggtacatttcttgtgcactccattcccttaacagttctttttgattccggtgcaactcattcattcatgtcaaccttgaaagcaaaacaacttgacttgaaaacagaatttcttagcgatgctatgcgcatccaatctcctggatccaccatggtcaccaaacttctatgcaaaggtgtagaacttataatagacggggtaaagtttaaagctaacctcatattattagacaccttgggcctagatgtcattcttgggatggattggttaactaaacatgagggaaccattgattgtgctcatagaactgtaactcttcgtagcaccgatggtcaatttgttaggtttacctttgaacaaacctccacttcaaatcaaccctctatacaatctctctctataccggagttaaaatcagtacccatcgtgaatgaatattccgatgtgtttcctgacgaattaccagggatgcctccagatcgtgacattgaatttgtgatagatttaatccctgggacagcacctatagccaaaaggccatatcgaatgacttctgaaaatttgatggaattaaagaagaaactcaatgagcaattggctaaaggtttcattcgtcctagttcatctccttggggctgtccagtgttgtttgtaccaaagaaagatggaaccatgcgaatgtgcgtggattatcgacctctgaatgaagtcaccatcaaaaataaatatcctcttcctaggatcgatgatttatttgatcagttaaccggagctcgtgtcttctcaaaaattgatcttagattgggatattttcagcttaaaatc

SEQ ID NO: 4548 - DNA, 54871 bp, Oryza sativa
  unsure (1)..(54871): unsure at all n locations
gtagatccctagctcattccacggttatattatgcccatgatgcttgttccttacctccttgtgtccatgtcacatatagaagatatgagattttgccagaatatatgggatttttagtcatcattttcttgctatcttacctactcactctctgcaatgtgaacaaaagatttgattatatctctaaagtaagctgcttgtatgccaagctgaaaaccagagacttgaccagaccagcataagtcagtcaactgtagtaagtccttttctagtgatgttgaaacaaaactgtagtaagtcagtcaactaatagacaaacttgctcatgtcagtagctattattttgacaaaaggttcaacataattgatctcaagtcaggtggccaagtgcaatatctctactattataaaaattgaagatgtttttgccggtattttggtacgtcatccgtgtatgagtcggtttttaagtttgtttgcttttggaaatacatatccgtatttgagtcggtttctaagatactccgtagttcacttttggtaatacataaggaatcatataagaaatttgtttaaaaaaactcgcatgctaacttgaggcgatcggactcctaactgcaactcataattttctaaaaatatatatatccaagcgaacttccacagtgaatttcatcttaactaaaccatataacaataatatgattaaaatagacttcacccgttgcaacgcacgggtattttttctagtaaagtactaaattgaaaacccgaaacggcaagaccagtgtttgctggtcggtcgcaaacttcgagtgtagactgtgagctttgaaccaattactcctgaaacatactagtatatagcaagtttccattatatgaacaaatgtgaatctcctaataaaaagtgagtcaggtgaacactgggctgcaatactgcagcatagagacaccaaaagtgaatgaaatcacacaagcagcagcatcagcagcagtcaggaatcacactattatttttctggaaggagcagcacaaggaaatcgctccatgttcatggcagtggcacatagagaccatcgcaccttgtgtaaatcaggagtctgaaacaacccccaccctcaaatctgaagcacctaatataccttcgagatggcggcggacgatagagtcgacgagatagactcacgagggtatcggggaatcggcaggttggtcgccggtccgcggccgagcgaccggcggagcgtgagaaggtccttctcttccctatctcggctttgccgtcggcgcgtgctgatgggatgcggcggagtaacgggacagggcgattgggattgggccgatccaccttggcccaaaatggattcaatttatgagggattaagttcactataggtccctcagtttgtcgccgaaaccgaatacaacgcatcccttaacttacaaaaccatgcaaacgaggtacctcgacagtattgacctcgattttggctgacgtgacctacatggatcctttcactagattttcgtcccatatagcattgacgtgacgcttacgtggcaattagatccgaaaaataataataataaatggtggagcccatatggctccacatgtcatcctcaaaactcccctcttctttctatccccttgcaggcaaagtggcatcgcaagggcaagtagcggctaaagcaggcaggcggatcaagccacgaagcagagcagaagggcggagtgggcggagacgaccgctccctactaagcgggcggcgatggccggagcaagctagcggtgcgaagcaaggcgggtggagcgggcggtggtcaaagcggcagcaatcgctcctactctctctctcccttaccctttttggcatgcgggtggcgaagggttcagagcggccgaccggcagagcaaggcgtgcggcgagcggagcggcggtggccgaagcaggctggcggtgcgaagcagggtgggtggagcaggcggtggtcagggcagcagcaatcgctcctactcctctctctctctcttccttccccttttcggcatgcgggtggcgaagggcgcagagcgaccgaccagtagagcggggcgtgcaacggccggtctcttcccctttttggcatgtgggcgacgagcgcagaggagagtttgtttgacatcccttatcgtcaatactagaaatctttacccctaaattatacaaaaccgtgcaacggtcaaccgtgcaacggtcctaaggtagtatgagcagctggtttcactggcgtggaatcctagtcagcaaaataaaaaataaaaaacatgcggacccgcatataagtgtgaagaaatagagaatatagggcccacgtgtcagcacctacttcctcttctcctttattccccaaccacgcgagggcgacggatcgatggcacctgtggaagcggtggcctcaaatccgcgaggggcgcgccggtggagaggatgcagcggcggcataggtgggcagcggaggtggcgtaggcggcctcaaatccgcgagtagtttcctccatcaaatcatcgatctattcaactagattgaactctatctgacgactaatgaagactaacgaaactttactcactttggtcgtcaaaagaaaagggaagcagaaagcccaacaaacgtatcaatcgcttcaacttgttttacacggcttcatggtcaatgaaaaatattgtgcgacagcaatgcacattgcatgactatggattagcttggagcttactgtgccagattaacttaaattatgtgcatggaaaacagacgacaccccccaagccactaaaacagaacactggagtactggactgaagcagcatctctctttgattgctgactatccccaaagattgtacacacatgggaaattatattgtagctagactcgttgaaattccgtagagcacagccaatcatttgtacatttcgtctcttcattgtgaacctgcgggttgtaaattagggtaaataattaatggaagaaacggataacttaacaaggatataaaaatatgcagaagttgaatgttagattgcataaacccttcaaacttcttccataatcatttttttctggacgcccataatttcagtcaaccaaatgatcataaaggcataaatgaatgaaaatttcaaaacaaaatcggtttcaatgttgcttattgagtagttcaaagaaagtgtgggaaaagctaggaggtatcaaaggtttgcagggacagtttgaattagatggaaaaactagtctaggccagtactaggtttgcccgagaagtatttgtggaagtgaagatggacagcagctcaatccataattcagtgaattcaaatatatcacattagaaaaatatttccctagaaaagcttatgcagtcaccagggaccaatggcaactggcccatgggccagagttgcaggtgactaaaagcacaggtacaactggagcagtgttctttgggatgatagttcagaacatggggcacagcctcactaaatcagggttggatcatttcaggcccaattatgaagctatatatttaccaataaatcctgaacaggataataaaagttagaacctgaagcatgaagcagcataataaaagtaaaggaaaagggcgggaataatgagcaagacatctagcccactaggcacaacacccagccatccctcccatctccttcccttaattatcccagtgtcccagcccacatgagcagccagcttccctcgcttgtaatctatcccccattgcacgccctcttagcactcaccctcctactgacaatgcctcacctcttgttctcagtgaggttcatgggaacagaggcagctgcttttgtaagcagcactgtcagcagcttcgacaaaaagggatggaggcaacagcagagctgtcaccaattagatgcaacatcgacattgatatgttgtgcacctactcctttatcaagaaaggaaatctagcaacttaatttagaataatacgatgagtgctaaaatacataagctaatgagcatattttggttcacatgattgataccagcaagtaacaaatctcgcagtaactgagagttcatattatcctgatacacaagtaaagtagtatataacaattgagatttgcatgtatttatccatgtagtataagtaagcaattcaaatgtttatacaaccgtaattttcatatataataaaaaggcatggtacaatctaatcaaacaagattttcctcaaaaaaaatctaatcaaacaagataaatcaataacctgatcacaatgccatttcagcttgcaaggctgcaagctcatcctcctcagctgatgctttctgtggagcagggcgagttggtatcctggtgcctgggacctgcactggatgcacaggtggagctgcaacaggctcgagaagctgagattccaattctgctccctccagttcttccagttctgcctctagttcgtcctgtcagttttatggtacgtattaagtgcaccgcaaacaaaaaaccatgaagatattacacattgtaaatgtccacagtgagttacctcatcaaaatcagcagatgctccaagaggggctgacaaagcatcttgtatttgtttcatgttttcagtctgttcattaatttcatccatagtcttatcaacgtcatcaatatttctgcaggaaaacagtaaatagtcatttttgagacataattttcttgaaagaatcaggggataaaccactaaacccaaaataagaaatgattcagaaaatactcacgtcgccttttgcattgctttcatagctgcagctccagtcctcaaagcatcaacggtttctgtcgtagcttttgcagcttctaacatgatcatctgtatttttcaatattattataatataaacatttataacatgtagtaatcagatgtgaaaattttaagttggaagtaacctgatcatgaattctcaactggaagttccctagctgctcaatttgttgttcataaagcttttttctcttcaaggattggatagccgctggtgaacaagaacaatttcattaacttaaatattagcacagctatgtatcacttcagtccagattaaaacggttatacatcaatccagttcagatcaaaagaaagcaaaaaatatataatacaacttgcactatggagataagccacacctcttttattctttgcttttgagaactccttagccctctccagttctgcggctgcctttttctctaagactttctccttcttctccagcatgtcaagggtctaaatacacataaagtaagatttcagttccaatatatttgcaagtgacttgggacatgtgcattattgagtaacaaagtaataattgaattattcaggcagaccaaataagactcagacaatgcgcatagcacaagagaatcaaggctaagatcatagaatggagaggaataagaaagctttacctcatttaacttatcaagcgtggccaacgcactagcattggcctgctccttgggcttaccaaagagcctgttgaacatggctgcgcctgtaatattaaatccaaactctgcaggacgaaagcatagaagataccatcatttacaggcaatcggatgagcgaaacaaatcaaaatcaacgctaaaccgaagaagcaactaggagctaactcacacccctgatacaactaatgccccccaactgtaatatgcccacactatcacaaagtttactgatgcaattaacatttgcaacaagcagccgagaaatttaatagcacaatccgatcgtaatctcccaagatggtgggctaaatagcaaagatattaaatcagctagactgtcaacaaaaaaaacacacccacacatcgccttctactaacaaacgcaaagtcgcagttcatgagggaagtacaatcggctaaagcctgcaacagtgttcatcgaaccatgttccggccggaccaccggcgatccgagcagagcccgcgccgccgcggcggtcaaaacctagggcgaaggatcggcgcgcgcatcgaatcgcggagttaggtatcggcgggacagcccgggcggcggcggcgggtagatcgggcgctacggatctatagcgggagggggaggagggcggcgcgctcacctgattcgtcggcgggcgggcgtgcggcggcggaggaggcgcgggtttgtggtggtggtgggagcgacgagcgaggcgaggcagcgcggcggcggattggttttgggggttggggttggggattccgtcggttgaggtcgctcgtttttgattgggggccaggccaggccaggtcaggcaggtgaggaagagggaaaaggcacggaaacaggttgggactcgactcggaggcgacgccgcgtaacagcctacgtccccgcgtgtgcacgggaggaagatgaccacgcgaagcaaacggcctcggctaagatactactctctctcagttgtgccactctccgggataaacaaatcttgaaattgcagtatgtttcgctggttgactcgctttaaatttcacattcccttaagaaaagtttaatagtacagtcaactactagcttcaaatcatctgtagttaatttaatagttaatattatataatagttatttatcaacatatactatactattaatatataatatcacctgtcatacatattgtgttttgcagtctatactatagttggctataaatctagataagtgtatatctaatattcgtaggcaaaatgcttcgcgggtttctacagccgttgatgaaaagaaaaattacaaaaaatgattactcaattataaacctctttgttagcattccacataggccaggcagacacgaacaagactgcatccaatgtccaaacatggcacaacaaaaagggaaaaaaggaataaaacaatctgatcaaagtatcaaacaggtcaaattaatcaatatgctcctagactgaatagggatgctatgtacaaccgtgtcaaacatggatttcctattcgccaacccaactagacaaacagataatcaaatatcagtcggggattgtagccattgtacgctccagcgaagcacagcaatgtcaaaactaacccctaaaagaatatacagattagaggagctgctgccggagctgttggttctcccttcttagctgctgcacttcctttgtaaggccttccaacttctctaagaccaggttcaacacgcccgacatttccatctgttgcaagaaggtattaaaccttgggtaaatatggagtcctcgaatcatggattaaactacacaaagaaaatgtcatagcagatgcaaatgcacaaacacatcagaacagatggaagctaccagccataatcgtctgtttctaagtatacttgaacattttttaccaatttttttcctaaaccaccccaattaacaagattcatccaatcccactaatttgcctccttttatcctggctcatgcttgtgatatcactgtcgtctgtgaagcattctctctccgctttttgttcaaaataccaccaacttgataaatgctaaagcatgagctggtgaagtgtaagtatttgggaacagagggaataactattatacttttctttcgaaaagctgtctgcagattgcataacggctcatgatgccagtgctcctcttgacacatctagagttctccaggcaccaaacgtgttaagtagactttagcatggccctggaacaggttatctaggtggttgccattgacaaactaggttgctgacagactagaactcaatccagtgtaatctagtgcatggaagcggagaaagaatgtacactataagcatggttgcttataagatttgtcttacctcttgcatgtgaaactgtcttagaagttcgatgtgcagatttctcacgtcctcatggatggacttctgaacagaccctagggattcttcaagcatccgctgcacatactgaagtgagaaggatgaagctccctgttgatcagctgacaaacctgatgttggcaattgtggtggcaccaccccctattaaaatagcaccagtaaactatgttattcagacatttatcagtttatgtcacacgagaatactagcaaaagggtggttcttacattgtttgctacaaggttggcagatgaagaggcagctgctgcttcttgtcttgatagaagactgctgagcagttcatcttttgtttctgccccagtcttctttgattttggtgaaccaaaggctgatgctaatccttcactgaaaacagacgatgtgctcactctatcagtatatgttgagggtctccattgagaactagattgtgctgctccaggctggtcggagtttactggtggcatagtcttggccattaagcctgaggacagtgaactctggaggctagaagttgatatgtccagggaagggcgtgcattgctcaagacacccttgttttgtaggttcattaaaatattacttgttagagaacctttcagtgagttaccagttgttggagctgaatcttgtaagcctgcaaatgcaaagctgccagtctgaaaggctgaagccccaaagcgcgagacttgttggcggtgagttaacctatcggataatgcatttccagttgctgtctcaggtgaagtgatagatagttcactcttccatgatggcatggatgtagtggttgctgatgaggcatcatcctgtagaatagagatatgaagaacaaaattaagaaggctttacatctttgcatgactcggttatgtcaagtcaaacagtgatatataggaccagaataaatcaagtaacctgtcttgaattggaaattgacttccagtctgagattggatgtggctcattattgtcttcaataaacgggaattttctagttgtcgacaatttcttctctccaagtttatcatccttttttgtttcatcactcccatggtcatcccacaggctgccactggacggtgtgaaaggttgaacatctacaagtggagagaatacatccatatcatcctttagactgaagttactacgaggagcctgtagctttgataatggtccaccagacaatggccgtgtcctgtatggagtttcctccacagtggacgaggtagaggtagaaagaaatccacttgggtttgcagccaaagaagaccgaagatttgggatgacacctccagaatgaaaagctgaagttgctgaaggcaagggatctggcatgagaacagattcttcactactcccacccagaagagcaacctcagaagaactattctcgttaacaatgacaggctttgacctttgccaacataaacctgtcacagcctgattaaacattgtggattcaaaatctcatcaatgaaagtgcagatacaataatatctgtgaagaaattttacatcaggttcatatcagtttattgaactgtttgtccttcaagagattagttgtcacttatcatgttaataacatggccatagtacagaataaaaagaaaaaatggtctgcataaactgaaaatcaacaaataattcatgcagacattatcctaatgcaatttgctcaacgtcaacaattcctatgagcatatgcatactctagaatataaacttagtctgcaaaatacatgcaaatagaagagtgttttctctatttttcaggaaggggtggaaaactggaaatatagtaaaagatggaattgtgaaccaagtagaaggcctaataataactaaattgctcattataagtatgtgaaatttcactacaacaaaaaaaatccccaccctcacttaaataaaattccatctttgattacttctttttctaaggagtgatacatttgatcttcgaatgtggtttcataacatagtactgaaatgggctagtaatgtaatactggaaaatggatgaacttttgacaacattcaaaatcaagcaagggttctgtgatatacttaagcaaccaagttatcagcagacatgtgcgcaagctccaccgatatagaaatcaatagtaataatggattaattcatttacacatagagaacaaaatctgtttgtagatcatgcaatatatttgcagacagcaatgaggaaaaagaaaaatgtacaatttcgcacctctgagctattgtatgcacgaagaatagtcaatggctgaggttttcctcgaacatcataaaataccacacgaccactatttgtgcctgcagccaatattgtaccatcatcattgtatgccaatgatgagaaaggggcctcgtgaggaatagtgtgtgttggtcgtcttgaccctgaatcgagtgtgtacaacttcttgtccaggccaactgtagcaattatctacaaaataaattatagaccttaataccaagatatgaagatattattcattcacacaataagaaccaaccatattaactagtaccaaaccttatcactggagggcgaaatacagacaccacttatgggtgcagaatgttgcttcagccatgagacctatatgatgaataaaatcagttagatgatagcattagagaaagcacaaagcaatgtaaatgtagcaatcacatctaagtctccataaacagagaggactattcaaatcactgtctggaatttttctttatttttcataaaataataatctgaaccagcatttgtatagatagatatattcacttgtcacttttgactataacacacatatctaggtaattgtttgctttcaactttcatacgaaatgtcatattgccctccaaaactaactaaatgcttcattcaagaatcaccaaatatgtggtggagagaatagaaagcaagggagttaatatggataaaatagggaaaatgcacattgggaaccataaattgacaagtatttgtgcacaaataaaacggtcaaaagtgacaagtattcacaaaatgagggaatatttcccaatcaatttaattatatttccaagcttctaactattggtaacagatagtgaagagtcaactttggcaattattaaacttagatttcctttatcacctatatgacatgctaccttcgaggctctattctatcttttgttcaaattatataaaaatggcatagctttgatttaagatgaaccctaggagatgttcaactaagcagcatcaatgtactttaggtacctttggagttcttgcagttgtatcccagagatgcacagaaccatcatctcctgctgtcaccaatatatgcctactattacgtgaatagtcaaggactctcaaaacctgaccttgcagaaaaagtgcaagaaaactaaatcagaaggggaaaatttaagaattctcgagaacttaaaatccacaacagggcatgacagcatcaccatactacacagaaacacagaaagtaaaaagttattcacctgcccatttgggtcactaagttcagcagcacgtgctccagaagcaagattatggagaataagatcccccttcatgctgattgaagccaaatgttcatctttgcaattatacatcacacccgtaatggtgtcagtgtgaccacttaaccatttgatgcacctcttccgctgcaaatcccatatcctaacgatgtggccactcccaccagagcaaagatatcgtgaacccttgttgctaaaactgatagaatatatgcactcctgataatgatgtgtaatttgctgagttaagctacaggctcacaagtcataattaccaaataatagattcaatgttcctctagtagtgaatcgacagaaggaattaaaaataaacatgaaacatatcgtgaaataaaaaatgtaaacataattttgaactctgaatcaataatacagaaaataataaaccatcgtagtttccatatctagaatataattttaaacaaattgcacgtgatgcgttatataagtaaatcaggtagggcatgtttggtagagctccaactcctaaacttaacttcaggagttgtgtctggactctggagtggagttgtggagcaaggcagcaagctaaacccagctccacctctctagttcattttgtgagagtgctccacctagctccactcccaatataggtggaactggaactgtttggctgggctctagctccaggagaggtggagctggagctggagctatgccaaacaggcccgtaatgcgtcgtcaaaccaatcatgtactagaacagtaacaaaattctggagtccagtaacccagtctagatttaacattttcatattgccaataactctaatgctaaaacaaataaagatcataaatcgataatgtgtgtaacagcatcaacagaaaatgattgaaaatgctaccctaacaatagataatatatatactctttgaatcgatgctagatgaattcctggtagaataatgagtaccatgcatggctatctggagaaagccaagagcacaaatattataagagtgcacttctacctctatgtcatccccacgatcaacagttgatgttggtagctgtcctacattttgaccttttttgtgccataatgagatctttttatcatccccagcacttgctacaattagatctgcaggtttaaagcattaaatgaaagtcatatagtgtagctgagctcatcatgtaatggcattattgaaccatttcttccagatgttgaggctaagctttggtaaaaaatctagacagataggaatgcacactgttaggctaagaataacttacgcactaagcagacctctgtgcttatttaagcacagaggcatcaagaagagggaccatttgtttcttgctcacagaacatgcagattgaacaaagagataactaccattgttcatgagttagatgggatattaacattttaggcatttggtttaactgctgaaggacattgtcacaacccaaggccgtgacaggataaacaccaccgggaggatagccgggcggcatcggctgctagagaaaggagacttaggatggggagaagaacaccagggagagattagactaattctgattcattgcttaatcttgaatgatgatacaattacatcgatatatagatggagggaagtacccagtaccctaaccaactgagctacctaggtaaacaagatgaggatagggatttccttggtatcaggctgggccttgacctatcggcctgatcccatgacagatatattgcaagtaagctgatggcttgctgtaaacatcacattggttagatttgctaaggatgaagcaacaaagaacactctaccacgtcaaggccctgtttggtgggcctacaaactaagataattcaagcagaagctaaagttcctccaaacagggtgcagtggcttcttggacttgggtttacaagagcattctcaaaaaatacctaagaatttctaaggaactatgagcaccacccaaatgcatgtgcatagtaacgcaaaatgctcttaagcaagcacatttgacatgaaactgcttacaagctcagactccatctctatatgttaccccaaacatattatagaaccagcaggtaaaatgtgcagttcaaatattagtcgagcatagctatcttgctgcttatataatgagatggaacagcaattaccccagtctatcaatgcaccatcttgattatgtaatacagctaaaattactggtagcaaacagagtacatccattcattagtcgtgaaatagaaaaagatatctcgattgattgcattctgtgtatcgctacatacaaatagttaaattctggctctacattgtaggatcagaaaacataagcgcggtatctaactgaagatgcaatgcagaatttcagagctcgggaagaatgacgagccactgggacagttcaacactctcagcctgcagtctatccgcgccaagcccactccacaatacccagtagatcacaatgctggaaataaatcctctcgtgccactatctcataacaacgcggcaggggcatcgctcaattagacaggggagcgcggacaccctcagctcgaatcgcccggacagtacggatccccatggccgggaggctccggctgcccaccgagagatcctcgcgcgaacgacgccaaaagtaaacccaactcgggagatctgggaaggggaggggggaggggaaagagagccggaggcgggacgagcgggcacgcggtggagccggcgaggcgaggctgggggtactcactggtgtggttccagcggacggcgttgacggggtgtcccggcgcgggggtgtaggcgagaacgcaggggtcgccggactcgaccgtgacgtcgaacagcttgacggtgtcgccgccgcacgtggccagcagcggcgccgccggatccacgaaccccatcgcagccggaatggcgcaacggcgagggcggcggcgggcggcggatttagggtttggggatggctgggctgggtggtgggggtttgaggagaaggaggaggaaatttgaaaattgaaatggtttttttggtttttggtgggtgggttgaaatgaactactttgcgctagtgaagtgaaccgaccggttggtgccgttgggggaggaggacaagaggggatctgaggtgtcgttgctcgatagtgtgagttcaaaggttccttgctggctgcaatcatggggccgccggcctgtttgtttcgagtttttgcacacgattttgttagttttcttttcgaaaggctggaattagaaatgacaacgggggatgtggtgttggtggggcttggtcatgtggcaacgataacacgagtctagtaaaatcgacggtacgttatttgggttgatttgttcatcgtgctacatgcaggatcgatgcgtttggtaggacgaaggattgtgtaagccatatctcgctctcgatgattgtacgatccgtccttccctcatcccctgccccagcggcggagctatgtatagctacggggtgtcaggaatccggtttaaaaaaattttagctataatttatctattttcaccatatatatttcttgtcagtttaaacttaggcacttgtatcaagctaaatttaattcaaaccagagtaaagcaagcgagtgaaaccctcttcattttattctagctccgcccctgccctgcccttaacctgatagcaaaggacaccgagtaatggatatggactttggagtttgtgacatgagttaattaagtttttaggccgcgttcttttcggctattgggtttggatgattagctacacataaaacgagaaatacgattagcatatgattaattaagtattaattattacaaatttgaaaaatgaatttatttgatttttttaaagcatcttttatatagaaagttttcgcacgaaataaactgtttagtagtttgaaaagcatgttaacggaaaatgatgaatagctaagcttaactagctgtttagaacgtggccttaggctcattgggctttttcttatgttgttgggctgctaagtgactctagttggctccctcctcactcccccgctcgttatgcgaccaagcgatggataactgaagcggcagagccatcgtaggcaagcggtgggatggcagtaatgagcatgataagggctataaccaacgggcagaacactaggcgagccgtcgagctggctaatgtagcgcctagcgtgcactagcactgttggagatgcatcatgtgctagcaacgaggcaagggtgatggccagcggtatctcgagctagtctagtagtattgtaaagatcaagggaaccacccccatcccgttgctctgaagttttctatgaagttttcgctatgaaggttgagagaaatcatcggttttcgctctgaagtttcctttatactcaaagcctaccaggtactactccaatgtcttcttataatagtatctaagtcttcccaagaataagttgtcccagccatttgtttctactccaaccctcattggctccagtgctagaaatacaacgtatggctggttcttcttgctaaggcctcaacctcccttgcgagaccctatttgggtttatgccgaggcatgatcttctgtagctcattgtgatatctctgttttcatcgtcatagtgtgcatcgtcagggttgcagttgtggacagggcatagcaaatcagctgattgttttttccatttcttgttagctccttctttgcataattctgagcctatgtgtaacttgaccatatttagagggtttttatgtaaaacttattgtacttctaatttcttttcttgaggcagtagccaggatactatagccttagcttgtaaaaaaaacaaccggagaatatcttaattcttacctatcaatgatttttggtgtttcattgctctttatgggttgtagaaagagtaactgacatgaaactaatttcatcattggcacaggaggggaatcgatcaagctgtgatgggccataatgcttatgaggattgagctttgggcccaattcatagaaacaacagggtatcacgtggatcgaatgaatcgaatcaaacggatgaacgttatggatttttcacatttttgaactttttgaaaaacttattctaaaaattaattcttttcacggcgccaatgctattggggcagtggcaacatgacagaacgttttttttatctttttgataacttattttgtaaatattctttattaaaaataggtcattttcaattcttttttaaataagttctcggcgtcaatgatattagtgcactcccctagcctcccaacggaagctggtcactgatgtgaaggggtttggcgccaatgttattggggtcgaggatctatttgtaaaaaaatttcaaagaacttgtttgtaataaaaaaaatatttacaataggttcccagtgagaatgtcattggtactatccccatcgtatcagtgacttaacttccatggataagctaagggaaggcgccaatgtcatttgcgacgtcatgttgaaccacgacaccaataacattgaaaagaatatgttcttgaaataagtttttctatgaaataacttttaaaaaagatctaaaatttaaaaaatccaggttgaacgttcgtgatgacatggcttaaccaaatatcatcttaacagcgttgacttgacaagttgacaaccaatgatatgtggacaaatatgatcaatgttcgggttagtgtatccattttgagagattgctcaaaaaccacaacaaaataaattaatccacccacaaactggtccgaagatactttctatttgtcgattgaatgatagttactcccttagttattttggatttattttaaatctttgatcaaatttatagaaaactataataacatttttaataacatatataacaatggatttaatgaaattgatttagtgttataagtattgctatgttattaaacttggttaaacttaagacaaactgtggagcagggagtgattaattaagctactctatctgtttcaggttataaaatgctttgactttagattaactttgtagaaaaaaagtagtaacatttttaacccaagacaaatttttattacgaaaatatatttaattattgatttgataaaaactaatttagtattataaatattactatatttgtctataaacttgatcaaacttaaaacaatttaactttaaccaaaataaaaatgtcttataacctgaaatagagaacagtcaacaaataatgatgagaaactacttataactgctggtgtactaaaaatagcttttttttttaactttctcttctctgaccaataacgcaaacctattaatttcctcgtgttagttaatgaatcatcacgcgcgcagcttccctaacaatcaaagttcccgcgtcttttcctcccatcctctagctcatgccgaccgaaccagctaggacggacaagctccacaaatatatagctcacgctctctcgtcccctccatgcacggcctagctacccaccccccaccctacctctcctccgccacccgtcgccggccggcatctcgctcggagccagcgcgccgcggcggccggagcccggagggacaacgcaacgatctctctctagctagagctagagctatagcttagctcagctaattataatacatagctaggaagaattaacaattaatggggaagcgcagtgcgccccggtaccccgacgacggcggcggcggcggcggcgggatttgctgcgtgctgtgctggtgctgctgcttcctgttcctgatcgtcgcggcgctcgccggcgcggcggcgtacgccctgttcctgtacaagcccaaggcgccgtcctactcggtgagcaacatgtcggtgtcgcagttcgacttcaactccaacgacctgacgctctacaccaagctggtggccaccgtgcgggccgagaaccccaacgagatgatcggcatcatctacggcgacggctcccgaacggtcgtctcctaccgcggcacgccgctgtgctccggccacctccccaccttctaccaggggttcaagaacgtgacggtgatggagatctccatggaagggaggcacggcttcgggtcggggctgcagagcgcgctggaggagagcgagaaggaagggaacgtgccgctcgacgtgttcgtcagcgtgcccgtgtcgctgcggttcggctcgttcgacgtccgggaggtgagggtcaacgtgcactgcgcgctcgtcgtcgacagcatctcacccaagaagaagcccaccatcaagtccgccacctaccagggcaacgtagagttctgatccattgcatgcatcgaacatcaatgccttcattaatttcatttaattgtttgttttaatttgttattaactttgctgttcagtggagttggggagaaagtatgtttgtgatgtaaacactgtagtaagaaatggttccaaactaaaattcctttggttgaagttatatgcagaatgcagagacatcttttgatcagaaggtggttgctttggtgctatagtctcttttcttgagactaattcccgctgactgaaattaacttgttatttttaaccgttagatcagttttgagattcgtccgtcgattgaagaaagcgttcttttttagttaatttgatccataccattataaatatgcctattcagataaataccattacaattcgtaagattcatcttattcctccatcctcccctcctctttttccccatctctctccactatttctcagcctcctccccaccaatccatcacgtcaaggcgctgaagagcccgatgctgacgcaggtgctggagtgctccttcaagctcgctgttgtcagagagaggctgccgacgctgtgttcgatccatggtgacgaggcaggtcagcctggactacggcgacgtgcgcaccgcactggagagccccgagctgcagcggcagcatgtcaaccaccggtgcacgccaccgccaagtggctgaagtgggaggtggaggacgagctcgctagcgccgagcaggacaatggcatgatctactacatggcggtgccagtcgacggagtgaccgctgagctgctcgggctgcagcagcggcttgtccggtccacctcgctgcagaacatccagtagcaaggaacgcacgacagctagccgccgtcatgcgcgtagctgaagtggtggacattgtagttgggagagatgaatatgacggatgggtcccacatgcagatggaggagaggatgaaaaacgtgacggcgatgatatggttccaattttgtaaaatttgagtgacacggttacgaatagacgaattgcaataatatttgtctgaataagcacatttgcaatgacatagatcaaattaacccttttttctaaccctgagatgagttctgagatgcttagatagagcttccagatgcgtgtgccggttggagaagcctcttttcaaccattagatgagttttgaaatgtgtgcaccagttcgagcaaaattaggcaacctttttaatgcatcagaggagttttgagatgcctagatgagctctgagagattgagatgcgtgtgccgatcggtgaaaaaacacttgcgcagggccaatgatcaaacacacgatgcgccaggtattcgcgcatgcctccagcaccgatctacactatttttttcgagttacaatatgaccacatacgtatctacatatgaattacacagcataattattttactatcgtaacataattatttacgtatatgatctttacggtcgaagatatacatcactaacctgacaacctgctttagaggtttgtcgtctattaaaatattcatataggtcaccctaaaatgacaaaaaaaacctctcaagtgataagagcaggtacaataacaggctataagctaagctataaacatattttaaagagataaaagaaaagagagaagaatagcgggctacaaatctgtacccagcacggactcttagacgtaatgtatgtatgacaagaatagtataataagcaactattgtataaattagctattacattggctatcaatgatttagagctagtagttagctatactattaaacttactctaacgatgcaaatcttcagcgtgttaccaataaatcccaaaattttcgaaaataccggtgggtccggatgacagtttacctccgatttaaaagcgccgcatcgccccgtgcgtccgcctccacttcgccgtcaccccccccccccaccccggcgcgcgcgcgatggcgtcgtcctcccagtcgccggcgccggcgtttccggccgtgccgctcgccagtatcgtgtcgctcctcgccgcgccgcgccgcttcgcggggccgccaagtcgctgctcgcctctccctcatcaagccccgcttgctcgctgacctggccgccgcctcctccaccggcgcgccgccgcaccgcacgccgtcaccgccttctacgacatgctcttccgcgcctacgcggactcgggcgccccgactcgatcgcacgggcacggccgaggccttggagctaaccataccccgcgcctcggcggccttgatcccactccctcacctcctctccctccgacgaacaggccatctcgacgccgccgccgacctcctcaaactggctgccacttcttgtcccggctccgtcacgcttcttctccgcgtctattgtcgtcgacggattctgcaagtccggccacgtcacctacgccctccacctgctcgacgaaatgacaagcttaatgcgctatgctataactcgctgctcgatacacacgcgctaggaagaacacggtcaggtagcggaggtgctggagttaatgggaaatcaaggcattgagcccacagttgggacgtacaaaatcctcgtcgatgcttcattggcggctagagatatcagcaaagtacggtggacaaggctcttgcggaaaagatggtcatggtctcatggagaagatgtgcctcgagctggatgtgtatacggtatacatacaatatggtagggcagataggatgcatgaggctgagaacctattgcatatcatgattgagaatggtgtcagaccaaacaatgtaaggtgcactacgttgatcagcatccgttgcaatgaaggtggcatggtcgaggcaagaaggctgtttcaagagatggcaggaaatggagcaaaatcaagtctggtaacctacaatgttatgattgatggtacatcaagaaggggagcacatgcgaggctgaaaggttcagaaaggagatggagaagatcttatgcagcggtagttcattggcagtgtgtcagtgggaagatggatgtgccactggggctttttgaactttgaaaagatgaagcagaggggtttcagatccaacgtgtggcatatacagctctgatatccggcctaaccaaggaaaggagatcagaggaggcattccagttgtatgacaatatgctgggagatggattgaacccagatgacactcgctgtattctgctcttgcagggagtagttctttttctcaccaggccggcaaaagctggccaaagtttaagtttattaagagaggggtgaacttgtagggagtcttcactcggaataaagaaaaaaaggaatcatgaacaaactaacttctgttgggcagcagtgtaagttgtaccagccgaaatgcattccagcatgaagtctatgggtgtgtttggttgctcgtatgtcctcagcctggctagggtaatgcaattgactgtgtttggttgtttgcatgggttgatcctggatgatatgagatgctgtttggttggttgtatgacaggatgctgtacactagagatggtgtttggtttgttggttggaccttgggtttgagtgacctcttgttacctatggtaaagttacctcttgtttgagtgatctctcagcagaaacgcagctggagagccaaatgcaggagtgcttataaatggattgttcaatgctcagtttgttacttaaccatctagattctacatgatttgattcagagcatgtggctgtgcagagttcgtttcagaatacagagtacatggaattgttacaactcaagcaattggttcactattgcaaacatatatttttgtttgcacaacaatacttcagtttgctggtaatgatatacatagactaactgagtagtgactacttttggtcattatttattgtatgaagtggaaaaccattgttctgagtatggtgaccttaaatttgtccatgctgttataaactgtgcaggggattgtagttcctttttcagaatatttgtgatggtaataataccacatggcaatactttccgatgatttattcaggagatcgggtgagatacatcggttctctacaagcctacaatcaacaggaattatccttgggggacaaaggtcggtgcatgtattaagcttggttttctaatgttatttgttgaattcttaaattcatgtacctcaatatgtgaagcagttttcatctctgtgttcacttaaaagttaaaagtacattttgtggtatgatagtaccaagggtgaggaattttgagagacaaattactactgtaatgccaatctggaaaacatttgcatcgcagtaagttatgtctggcatagacataagcttactttcaaaaatattcaactgatgtcactgtttggaacgcatgagtctcttaagaatatcgtaggaatttgtacacaccagacaggatgtcatatttttaattcttgtaggatttttgtattccaaacacatccaagaaagcagatctcatctagtaatcatggtaataactagctccattttcttatgaacatggcatgtgatattttctcaaacttattgtatatactagtattgtacttaggttctataacgattgtctgatggtgtagattttcttactgaacaaactgccctgattggtttgaatttctgattgtcaatctgacatgtgatggtgtgcaggttttctgaactatatgtattttatttatgaattatctgtttctatgccttctttttacaaacaacctcttaatgttaccatttgcatcttttacttgcaatcacctctgggtctttttccttttattaaaacaatcttttggtgtcatcatctgcatcctctgagtggtttcttccaaatgatacaatctgcagagttccagattatagttcacaagtgaagtgaggcttccttttgaagaaaatgaatccttgaaagttgggagtcagatttgataagaagatttctggtggcagtggcattgatcttggaggtaattgtgaggttgaccctggtttcttctgtccaggtgagcctctttgctctgtctccttaaataatttaaaactatatcattcatagattctgtaatatggcatttattgctaattcaacataaggtaaatttgtaatcacttgtttatgtctcttcatatctcgagttgattctctttgcctcgatggtccaggatgggaagatagagccaaacatccctctgatgtaattcaaggtgtgtacaatccttttgtcacgtgcagggattatttgggggtgaaggggaatatattagattataatagaaggaagtaacaggaatggccctggacctcaacagcgtgacagagtctagatcaacgccgtgccggagagacaggctatgggtactccgataatcttgatcgaatcctgacctgaccctccttatatagatgaactccataacctaatcccatcctaattaactctatccaactaatctactctatcctaacaaacactatccaactaaagctacgtacttaccgcgagggggccatcccctagggaatccgttactctcaggcccatgacatcttttgtgttatgtactttgtcctgttccaattcttgtcttttacttactgggttctttctacagtttgcttctgaagaaagtcagcatggccctctgatacagtcaaacaacagtttcttttttatttcaaaatgcccatacaaccaagcaatattcaatctcaccttcgaggtgcacttttttagttttattgaagcaccttgcaaattgaagtttgtgtcattaagctatattcctgaagtaagtaataattgcttgcaaaaatatggattatgatatttgtcaactgtatgatatggaacgtgttttaacttaaatttctttatcttaggaaataatatttttgaaggaggttcacctgctggctttaaacttgtcgttttctctgaactgctggatgtggagtaaaaccactggtgaccaatttgaatgctgagaagggaaaatgttttcatccctcgaggggatatgccgagaaagatagtgaaccatttctaagtaagcatataccgagattcttgatagaaacaccttttgtactgttatcctagtattttgatggtgatttggtggcagtaataatgacaaataacagactctacattctatcctgatgtaaggtgtttaccatacatcagtttatatacttgtaccatactaccactaaggcagtaattcatagagtttgtttgaggaaccttctctagcttctgtgcggttaatacattatattccctccatcgctgtatcacgccgttgacatttcatatgccgtttgaccatttgtcttattaaaaaattatataaatatcatttattttgttgtgacttgttttatcataaaagaaactataatcttgatttatacttttacatatttatactaaattttttaataagatgaatggtcaaatgttataaaaaaatcaacggcgtcatacattttgggatggaaggagtaattttttggtttgttggtatgcataatgtagaaatttgtaaattgcggtgcttagcacgtgttgctttggcttgggaccctgtatcaggtctgcacattattccaaatagttacttcaagactctagtggttgactcatcgcctgccttttgggattcgacatcaagggattgaaagaactactgtgcttgtcctggtaagtttatctgctgtgatattatgtttttgacatgaatgtaatattagtagtgactaatgagtagttagactgcaaaatataaattatggaacaccctaatttcttgtactaacacgtaaggcattagccatttattatcccagcttctctttttgtaacttataaattgtcatcttgatattttgcatactgttttaatcccagcatattatgactttattatctgccatgcacggatgtaccacctgccatagccacctcccagcagcatatgctgctcccactcccacgtgtaccaacaagttgtcctgcttgagttgctgacggtctcactatgtagttttcaatgcactcacctagtttctaagctaccattcttcatgtttggtgcttgcagtattggtaacccaattattgttgccagttactaaagtcactaaagtccaccagctgtgaacatatcagccgacacataataagcttctctccaaaattcagaatttaagaaatttggggtgtccatttgcacggtatccattttacaagtgtcactaaactatccatgaaatttttttatctactgctagaaaaactaaaatactaatttctcaactgtatacttactatataaggtgtcttcctattattgtatgctgattcctgcattgctcgtacgaagtgattcttcatgtttcacttagtgctgcaggaagcagatcctttttgctgtaccctgtactcgtcacagataatcttgttgtgcatgcatcataattataggccgtatccttattgctcaatttggatttgaggatggtattgttatgtgaaatatcatcttatttacacgaatcgcttggccagataacttattaaactgtattttttacattttgcagattgttggtttcatgattgctgtaatatttttttggcctgatgcggatacatgatttttctgcgccatctattttgtcagcttcagagtctaatctgaggctgccaggagcattcatgttcctttgcttcataccagtgccttcctattcttcaccagagagcaaaatcctcgatttgaaaccttcctgattgttaccatgatgtgctacatggttgctaatggtttcacaatatgattgatactaagttcaaaattgattttttatgttgctgcgattcaaatgtcttcatgaagacacggttaatacacaccaaatactgcttttattaattcagtaagtaatgtttttatgtttatctttgcgatggagatgttcatttgacctttatttcgagtatgctcagcatcattttttggcacttttgtgcaacgtgcgaactcgtatcctggattagtattgcaatcttactgatttactatctttttttttcagttaaatatttcctccatctcaaaataaatgaaaaatttaccacttatatacgtgctaaattatgagggaaggtaaatgttacgcccagaaatttagcccaaatttccagactattttgtatattaaatccctgtccagaaatcagccagggtacacaaaacaataaattaatatacagatccaaatgtaaataaaacgtaaatacttacagaagaaataattagtcctcacaccgaaacgaaagcagtagcagcggaaaaaggcgatcctagtggggctttagctccactccacaagcaaaacttaactggggtctgagccttggtcctctaacttcgtctccacgagcaaaactcaactgaggtctgagctttagtcctctaacttcgttttcagctcagaagcactacacttctgaaaaagggaaaataatagcaaggctgagtacaaccactgtactcagcaagccataccaatgatgcaaatgtacaaggggatacaaggacgacttgtggctatttgcataaaggcagctgtaaagcattttattgagcaaaacagtaaaactgttgagtaattaaggtaatattaaatctccactaatcaacgctacaccatgttgaacaggctcaaccatcccacctgaactatccagtgcattgcattgagtcgatttattaggggtgagactaatcacggtgattttgatcgatcgcccataatcgcaggcacggctattcgaatagttttactctagccaaaggtgcacaactgtacccataagacacaatccaccggcatgtcaccgcatcaggcctgacacgtcaccatgtcgagtgattgtgacaagacccttcatataactccccctgaccaagtacaccacacctcaggtttcgctcccactcctcaacaggcagcgggcagcctccctcgtgcctaggcgaatgtcatagcctgatttttcgtttcaggatttataaattatttaataaattatcattataatttatattaaatgttcattaatttacaagtgaagttaaatgtgggaaataaaatttcctaaatataaagcatggctcgatttaattttttattaaattctctatggttaattatactctctgaaattttctcggatttttcagagctcaattactaattttaataatacaaagaacattttagcaattatttaaacaataagttaatcattaaatggtctgcttataatttttttaaatacttatagtgttcaagtattttcaggagttttcttggaattaatctcgtgaaattcataactaaatcatatgaagtcggaatgaggccgttcaagcctccaaattcatataaaatcatgatcactttttatgtactgtttatttggttcttattagtctttttctttgttttgcgttttagtttctcgtttccatcgtttcgggggtacgtgtgtgtgttggaagtgttccagaagattaattgaagaccgattattgcaaggcaagtcacacagatcccaaacacaatccctttgagcatgttgatcctatatttaaattctctatttatttcaactgtgcatttattttcgaatgccatcgggtggtgtgaacttatacctttgttatggccaatttgcattgattactctattccttgataccttgggttattatgatttgactagttgagcaagtattggtttgactagatattaatataattgcttagccatgcttagaaacactagcacacaattgggatgattaatgtttcactattacctaaagatggatatttaatggtagctcacgatggtcaatcgtgattggataattaatagtcaactaaaacttgattaatggtgggttgtgagcacacggttggaagtttggattgttgtgctcatgacaattaaggatcggttcatgagctactgttgtgagatattaaccgtactaaccacaagtcagcatgggcaacggctggatactttgtgtagcaaggctcattgtggggagccagactgtgaagcggtgagaagtccgtgggggtcgctggggagtccatacctctggtttttgagggggtgactacaatccaggaaaggtgcgccgcttttagttgagttatgcgaggggtcttgtcacaactacacaaatggtgacatgttcagcatgggcacatggtgatatggtgacatattgtggagttgtgtcttgtgggtaaatttgtacacctctggccagagtaaaactattcgaatagccatgcccgcggtcataggcgggttgagcaatgtttttcgtgattagtctcacgctactcattaatgataataatgtgacaattaatttgactcctagtttggaatgacaaattcctggtttgggggtttgatatgtacgaccggggttggttgttcaggtttggttggggctgtgcagcattggggtgctgttcagtgttgattaatattgatgattaattactctactgttttactactcttaaatgtttgctaaatgctgcttttgcaaatgagcctatattatgccatcctttggtatccttgtacacttgcatatttgctgtgtggtttgcgaagtattccatgtactcaccttgcaataatcaatcaaacctcagttgaagaaaaaggatccataaggagaagacggttgacttataccctagttgagctgcctgtgggagtgtagccggagcttcgctagaccgtaattccgctgctgtttttcttttcttttgtaagtatgtaacgttattattatgatggatttgtatattaaattgtcagtttgtgtacctcggctgattcctggatgagggttttatgcataaacaagttcggaaattatttgtgaatttctgggcgtgacaagttggtataagagccatcttgactgcaggataagctaaatggtcaaaccttaaggacaaattttcgaaaaacattatttgtgaaaattttcctttcttccttctctagaattctttggaaatcattttattctctcccctttcctccttcaacttgagtagttgttaaacttgatggagaaactcgaagacgtcgatgtggtctacttatggaagtcaagtggatcaaggaataagaagatgatggttgaattgaagtgccaagtttttgtgatgggatgaagtttggatctgaccctagaacctaaaccaccaagggactttgcagaatagttagtagggtagaatgtttgttgcttgcttgtgtgtaggtatggttgcatttccatcattgatgtagttcagtgatgagcgtgtaactatactaggttgcttgtttaatcaacttaaacaatataatggtctacacatgtcacgcccagaaatttagcccaaatttccagactattttgtgtattaaatccctgtccaggaccagccaaggtacacaaaacgacaagtaatatacagttccaaacgtaaataaagcgtaaaatacttacagaagatcggcacttagtcctcacaccgaaacaaaagcagcagcagcggaaaaaggcgatcctagagggcttcagctccactccataggcaaaactcaactggggtctgagccttggtcttctaacttcgtcttcagttcagaagcactacacttctgaaaagggggaataatagcaaggctgagtacaaccaccgtacttagcaagccacaccaacgatgcagacgtgcaaggggatacaaggatggtttgtggctatttgcataaaggcggttgtaaaacattttattgagaaaaacagtaaaactgttgagtaattaaagtaacattaaatctccactgatcaacgctacactacgttgaacaggcccaaccaacccacctgaactacagtgtattgggtcgatttattaagtgtgagactaatcacggtgaatctggtcgaccgcccataaccgcgggcacggctattcgaatagttttactctgatcagaggtgtacaactgtacccacaagatacagccccacgacacgtttccgtacgccgacatgccaccatgacataccggaaagaggccgtgacaggacccttcacatacccccctctaaccgatcgcaccacaccttagggttcgcccccgtccccagcaggcaacgggcagcccccctttcgtgccgcggtgaatccggaagccgatcaaccggacaccccggccgacccaactccatcacgcccaccctcgcctgggtacgtcggctagagaaaagctacactataagcccagccgttgcccacgctggcttgtggtaagtacgataagttcttccagggcatccgcgaaccggtccttaattgccatgggtgcgactagcaaaaccacgcacccacagcccaccattcagttgccttttatttggataattacgaccataaagcatggccagatgtctcgagcacgcagctcattctgatactaaaaaggtctaatactgtaattatcccatcaactgagctagtggtaattaagcatggctaagcatacagttctagctaggtcacataagtaacatgagctagtcgatttattacccaaacttgacaaaggacagatatcaagtaaacatggcacaagcgagcagataggtaaaaccctgaccccatgtaattagcaaaacatgcatatttatttgcaaacagtaaaacatttgtaaattgggatcaacatgctcaaggggaatgtgtgacttgccttgcttcttcaaaacgatcttccgaactcttttcctcgcgaccgcggacttccgaaacgacggattctacatgctggcgcgcaaaatgaggaaaaactctaataaaaaccaagaaaacaatacataaaaactaaacaaacatgtagagctcaattttagatgaattttgcaagttgaatggctcaattcggagttcgaatgaattaggtatgaattttagaagttttaagccatttaaatgaatttctagaattaaactcgatttattgcgcaattattatttatttttacaaaggaaatggacctcgctgacgtcagcaaggggtgaggcgcggatcacgtccacaaagggggcgggccccacacgtcagcggcacggcccaccgtggaccgagtccacggtggcgatcggccacgcggccgcgcacccgacggtccagatcggccaaggccgatcggacggctggggacggccgggcggcgcggcctggccagcgcgcacacaaggctggcggcggcggcggccgggaccaaagcgacggcggcacacgggccgggcggcgcagggagcggcggcacgcagcgcgggaagcggcgagaggaaacgggggcagtgagggagagggaggtggcggagctcaccgaggggcacggcgatggcgagagcagccggcggagggaggcggcggcgctccataggttgacaatgaggaggggctcccggcggcggaaggcggcgaccgggcggcggacggggaagagcgggacgcggcggcagccggggtgatggcgaacggcgaccggagacggaaaaaaaatggccggtagggtggtgtggtggggaggtggttctggtggtggaggggaaaaagggatgggcggccgggcttgcccttccggtggtggatctaaccgaggcagtggcgcggcttgaggtggttgagnatggcggctanagncgcccgnagccggtagccggtggtgcccnagccgncggtgttccggagttgaaaaggggaaataaagtagaggccgggctgcggcacggcgccgcgaagccgacggtggtggcggattggcgcggcggtgggtggagcagcggtggcgggcggccagagctcgccggaaacggggtgcgcgggagcggcgtggggagggggatagagagcgcggctggctcgggtgaggaggggaaaagagagaggatgctccggggttcgtttttatagggtcggagcggcataaacggggccgagaggggcggcaaccagcggggaagtggggcgccgatggggggtggtggtggctcggtcggcgccggtttttgtgggacgagcggggaaaatggtggaggacgtggaggggatcgtgcccacgtcgttggatgcgagctcgggtgcgggagggcgccggattttgcggcgacgtgggcggcaatggcggttggggttggccggcgagaggtaggaggaggagctgacaggtggggcccacggtcccacctgtcggccggatggagagagaggagggaaaccgggggacgtaaagtagactttcgcaaggcgcgggccggccgagagagggaggaggcgcgcggcccacgagagtggaggggaaggcttgggccaagcccaaaagggaggggaggggattttatttgttttcttttttttaattgattaaatgaactttgtgctattaaaattatttcttgagctccgaaaattcacaggaaatttcagagagtattttagggcaaaagaatattgcaaaatattcccggccaatgatttttaagggaaaattttaattctcccattaattcactcgaataaattgctttaacttttaatataatttcttgaaatgcattattaaatgattttaaaacccgaacgaaaatcggggcgttacaacacacactagatcaatggcaacctggttaacgtctttgtctttagtataaccactctccttctatcttctctaatttgcaacagatggtgaaccctcgtgccagtggaagtggaaacaataacaatgaagataacccaacccttgctcaagtgctggctcaacaaacccaactgatcaacctgttagtgcaacaagtgcagaactaacaagggaacaacaatgccaatgctccaccgccacctcctccaccgctgcagaacaagctagcttattttcttcgtgtgaagcctccaactttttctagcactactaacccagtggaagcaggtgactggctgcacactgtcgagaagaagttggaactgctccaatgcactaattaggagaaagtcgtgttcgcttcacatcagtttcaaggacctgcttcagaatggtgggatcacttccggatgaacagagcagaaggacaaccaatcacttgggtcgagttcactgaagcattcaagaaaacacacatacctgcaggagtggttgctttgaagaagcgtgagttcaggacacttaagcaaaaggatcgtaccgtgacagagtaccttcatgaattcagccgtctagctcgttatgctccagaagatgggcgtactgacgaagaaaggcaggagaagttcttggaaggcctaaaggttgagctgccaattatgttaatctctcatgactatgctgattttcaggagctggttgacaaagcaattcgactggaagataagaagaacaagatggacaaccgtaagaaaagaatgattgttttcaaggaggcacaggatagtagccagaggcagtgtatgaagccactccaaaatgttgaatcggcttcgacatctcaagatcagtcgcaacagttcaacaccagtggtgagatcaactcagagactaatgcaagcaatgaagttaacattgagcaagctattcaatcagtgccagatcagcaggattagtctcgagaagacaacaatagaagggagcaacgggtatgtttcaactgttatgagccaggtcactttgcaagaaagtgttcgaagccgaagcttcagcagacacaaggtcaagtcaacaacatcatcatcacatgagcaaatgttgtgccagttgcgtcttcaaggaatacaactcagcaaccagtttcaaagcagcagtggtaattaagcatggctaagcatatagttctagctgggtcaacataggtaatacaagctaggcaatttatcacccacggttgacaaaggacatactcaagtaaacatggcacaagcgagcagataggtaatacccccctgatcccatgtaattagcaaaacatgcaattttatttgcaaacgataaaacatttgtaaattaggctcaaaatgcccaaggggaatgtgtgacttgccttgcttcttcacttggatcttctaaattcttttcctcgcgaccacggacttccgaaacgacggattctacacgctggcactcaaaatgaggcaaaaactaataaaaaccaaataaacagtacataaaaattaaacaaacatgtagagctcaattttagatgaattttgcaagttgaatggtccaatttggagtttgtatgaattagatatgaattttagaagttttgagccatttaaatggatttctagaattattattgatttattgcgtaattattaattatttttggcatcaaccgagggggagaggtggcgctgacaagtaggccctacttgtcggtgactcacgagaggagggcgcacggtggagcgagtctacccgtgcactgcccacaggcgcaccacgtggcagccatgacggacggggagggcgaagtggcaccgacgtggcgccacggtggcatccacactgggcggcaccggaaggccacgcgggcggcccggatagagactggggccgatccgacagcccagatcggccgcgcggcagggaaggcggcagccggctgtctggcacaaccggcagcggcgcgcggcggcggcgactcggccggacgaccaccggcgacggcggcgcgtcacgagcaagcccgggaggcggccggtgaaggggttgaatgggggtgaggtaggggagggagtcctcaccgtgctcgtgtaacggcgagaaggcgacaggaaagcggcagcgggctcctcggggaggcacgacaacggcggtccagcggtgttccgcgagcgggaaacggcggccgacggtcggagggacctaagggagataatggagctattaggagagggaagggagttgcggcgcgatgagaaacgctggtcggagggggaggaaacgatggagcttacagacgtgcgaaggaaactgggttccggcgaggattggaggaggaggaggggtggccgggctgcggacgacggctgtggtgtcggggaaggagacgacggaatgcggggtcaactagggcggcgagaagcggcggtcggaggcggtaaaggtggtggcggctcgggtgtggtggtggaatggtggtgccggtggtggaggagggaaatggagtggaggccggtatgcagcatggcgtggcgaagccggtggcgcaagcggcgaagtgcagtgccggcgggagtggtggtggcgcgcggtcgaagctcactggagagcagcggaggcggggaacgacgcggggagcacgagagagcgcgaggggagctcgggcgaatggggaaaaagagagatggaggtgtggggatcattttatagtgctcggggagtggagaccatggctgggcgtggtggcaacagccggcgaggtggggtggcaacgtgggcgcgtggtgggggcaaaccggcaccgaaatttgggggaaaagtgggggaaggggtggaggaggtggtgggaatgcggttccaccacttgggcgcgaacaggggtgacggggtgacgcggaatcggcggcgtcctggggcagcatggcggcggttggggggcgcccggaggtaggagatggtgctgagagagagggccgtgggggttgagtggactctggagggaaaggggagcaagtgggctgagcggcccaaagaggagaggggggggggtgggtggcctagcttgaggggaacggaggaaggagggggattcggccgaaagcagcccaaagggagaagggggaattttatttgttttctttttatttaaatgagtttaatgaactttgtgactttaaaattgtttcttgagctccgaaaattcacgggaaatttcagagagtattttagggcacaaagaatattacaaaatattctcggccatgatttttaaatgaaaattttaattcccccgatagatcacttggttaaattgctttaacttttaatataatttctagaaatgcattatttagtgatttttaatcccgaacgaaaatcggggtgttacagtaaatgacatagatgctccttattactcttaaatgagtgatgtttgtgatagggagggtagtgagagtgataagataggaagaaatttgaattagatgtgattaatgaaacaaataggagtaatacttatgaagtggcacttattttgggataaattttaaatgcaaagtggtcacttattttaggttggaggagtataactattttcctaggtttgctggggaagtagttattactgtgctcatcgtgcaacaaaaatcaattgtcatggcactactggagaaacatctttgctgggttggccaaaaaccacaataatcctggtttaaataggtaccgggactaaagaatatatcttgtcccggttcaaaaacctaaaaacacttaccaaacgggactaaatatcatttttagtcttgggtcaaaaaaggcagacggtgtcagacccctctactatctactaaagaactatttttagtcccagttgttaaacaatcgggaaaaaaaatcagcaaccgcgcgctaaaaaaaattggatttactgcccccgatctcatccttatctcttcctctcatctcatctccttatctcctctcatcaaccttatctcttctcctcctccttccctcattctctcaccccccccacatctacttctccgcccccctcccctctcctccccctcctcatcccctcatgcgtctaccttttcttcaatattttctactacttcattcccttaatttaatgatgttgaagtaaataaattgtagtatgtctttcttgtaggagcagtgtatggtcctatatcattttcttagatccaatatatcttagtttatgtgcatctgcggactttacattgttgcttggaaagtgtatattattcaagtacattttcagttctaattggtttatcataatagcctataaagtagatggttgctccctatccttacatgattatcccatctaggtcctagaactataaaaaatacagagattcaaatctcacaaattgtcagaatatgtgaccctttagctgaattgccatgaccctttgagattctacgtggcgatgacatggcatcatcactaattctacactaacactcgaaggaagaagagaaaagaaaatggaaaaggaaaaggaggaaaagaaaattttttaagtgggctccacttgttagtcggtataggattgatgaatatgccacgttgtggtatatcacgtcaaccctagagaaggaccatggtaatttggggccagaatgatatactagtataatttttcatcaacatttgctttgttcaacgcgcgtgcacatctgtaaatttgagggaatacattctatttaggaccacgttttcttcttctccatgttcaactttctgcatatgcaaattagggtatgtgcatatgcaactttctgcgtatatgtaataatgtaaattagggtttgtgtatatgtaactatgtaagagagctcatcagcgtactagagtcgatatgctcaaaattgttaatgttgtaaagaagtggtttaaggtggtccaaagatcatgaactctatcatgggctgttttacggctaaaatatacccacgatgcgggagacgaacgaatggttgcaacgaagaacgtgaagaaatagaagagctctaaactcgaagcagacaggcagggcaaggctgggctctagcatctgtgggcgtaataataatgataataatatatgttcttcaccggccgctattagcttttctctggaatccaaattttctttttgctcaagcggcccaaagtaggagattggattttatctttcttttattaccttttcgatcactggtcaaaatttggggtatccatcgaatggattcgattccaaaagtaatattctcctttaaaattgtcttctagatcattaagtgttagttcatggaccacagggtaaaagagcggtccatgaaactaatatcaaagtacgaaaataacctaaaaaataggagtatatatcaaagtacgaaaatatatatctgaaaagatatgtttggctgatattctttttcattcgtccagatgtgtgtcgtacgtatgatcaatcagaaaagccttccgcgaatttaaaattgtgtttcagtgcagctttaatttaattttaagatcttgctcaatcgcaatatatgcaagtttaatcttatactagaaccagttgctttctgcgccgtttgtggtggtaggatcaaataaaactcatcacataccggagatgcgagacgcttggcgcgggaaagtgttcatgcaaatgatccttaattcaaaatataaatacattcagatttgcatgaaacaagaatgtttggattattttatatatatcccgcgtgtgatcaatgagctagatgtaaacagctttttttctcaataatagaaatcaatccggccggcatccacaaacacgaatatcctccgacgataactaataagagcatcacccacaggttagcaataatccattcccaaaatttgattttgggttttctaaactgaaaataaaaaagtgaaaaaactctttctttcaagggatagcctaaattcaataaaaaaaagtggacccttatgttaaactaccaaaatttgattttttggtttcctaaactgtaaataggaagtgaaaaaactccttcctccaagagatagcctaaattaattcccaaaaattaaaagtggacccttctgttaaactaccaacaggaatttccctttttttccattcacgcgtacagaaagagatcacgatgacacgcatgctcccaatagaaatttcgccgctcgcgcgggaaggagaggagaagcgcagggaaggagagagaaacacgcgaacgagagattgggagtcgctctctcaccctcaaatctacataatgaaatatatggagatgggaactccaaaactaatgtaaggcttttgggaatatgttggatctgatttgtaaaaaaaaacccctcaaaatccgttttgggaatgaaatatgatgactgttggtgatgctgcgatttaagtgcattcatatttaccttgcccttgtattaatgaagtatacatgaattttagactatatatatattcaatctgcaataaattctgaggtatattctcttcttttaagcgtgtagcataacccctaactgtgggtcattatgtcatattaggtctgctccaccatggcttaatcggagccacagctttaatcttgaacctacatgacccaaaaaactagttagtctgatatgtaagaactgtctccacatgtcacaaatcaggcccaataatcttctccgtcatatcaatctatgtgacccgaatacttgttactggggcacccccaccatgagaaccatgaaagttattctgggtttccaaaccacaggtcgaattagagctacaactttaggtttaggtctttgagcctacacaattcaaaagattagtctgatgggtgatgtgtgccccaccttttaagttgtgctaccccgttatcaattattgatgtgaaactaaacccaacaatctctctcgtcacacatcgggtccaacaatcttcccatcacatcaacccatgtgaacccaaagacttattaccggggctccctactgtgtgacccatgaaaattattctgggttttcaaacctaggctatgataccacttgctagagtgcgcagtatagcccaccaaccgtgggtcacctaggtcatattgggcctactctactacatgattaatcggaagcataactttagatcttgggcctatgttatccaaaagactaatcttatggatacggaatgctcccaccttttatgtcgtgctcctccatcattaattaccgatatgggattaaacccaacaataaaaatgaaggtgaacctagtcttcgaggagtttagaatatgcaagtgatggaggaatccaatttcgcttgatacgatgatagtgatgatgggagaaaatatggagcattgttacaagtggagttcacacgaaaaagttacagggatagcggagtttctcgatgatggtgagtctgggtgcattaccttttgttaatatttttcatggagtagattttgtaaactgatgtctttctcagttcggatattacactttgaattgaattgaattacatatatattctatttaaattgtgtataacaataaatcaaggtgcatatttacataaaagacgcattactggagaaaccattttttacgggttgaccaaattccacaatagccccggttctttaaaaaaccaggactaaaagacacctttaatcccgatttataagtgcaacgggaccatgtgatctttagttccgggtatttaaaccgagactaaatatagcgatttttagtcccgcattcgtagccccggtttgctacctgggaataaaggggttgcaaaccgggctaaaaagatctgtgcagcagtgacgctcgcaacatcccactatatattaaaaaaaaacctttgccttgaatcagcttttggtaattattatgacataaataatggtgtgacgtaaccgtctggagagaatgctaaagcgaaaaggaaaaaaagtaggacgccgtccatcgattaccagacttagtacgcaacttgaattaatggtgacgggtgagtttcaattagtagctttttggttggctgctaactcgtcttgtgtgcttcgtaactactaaacggtaagttatttttaataaacattttatgtgcaatattttttaaaatcagataaatttcttttaaagtttataatagttaatgcttagttaatcatgcgctagcagctcttctcaatttacgtaatacacgaaaaagccaatccatttagctgaatttcaccctaagtcttaattttaatatggataacttattgtatgggctgttggtgtatgctaggataacttgttgtatgggttatctgtatatcttttaaatatgacatagaaagattatatatacaacaactgttaatacccttaagagcaactttaggtacttaaaagatactataatttggtatttctcagcaactcatgtagcacggtacctcatttagcaggaggttggtactcttaatatcgttacggatggttaaatttcttatttattaatgaaatggcttaattgcttaatccaagatagttagatgacccttaggataggagaggaatcttgttagaatattacaataatttaaaacctatacaatatttctttgctcacaataaaagataggtgtctaaggacatgattaatgtggtaagttagcgagtggcctcccaatgccaccttggagacagactgccagctcggccagagcggtagctctgtatgggcacatgtgacctatagagcgcacggtgacttgtgcatgaggcggttgctttggtggtccaagcctagaaaaataaggggaaccagggagggagtaggaaaaaaaagaagagtaccggagacttggagcatgtcaagttggtggaggatcctggtgcagattgtactagattgggcagtcaggaagcagatcaggctatcgtcgacgaaattagcatggcctcgatagagaaattgacgtaacctcactgtccttgtgtcatcgagatatcactaacttgagataggagggagggatgggatggggcagagtaaggtgacattgttggctgcatcggtaaagagtgtgagtattatagatatggcataccccgtatacccgcacttactatcattgtgattatttcatacttattcttatatggaaaggtatttctaaatatggataaatatacaaacaaggaatgactgtaaagtccgttccagtagaaataaggccttgtttttccatacttatttgagaccctgagttttatttgcgcaaggagttatatcacagtataaacatgatgctttacaggagggaagggcatcaaatcataagccttacacaacgccacatcgagtttataccaggaggaagccctttcgctagatgccgagtacaacctgccgctttgctcatcaagatcaattggttggctagattaggttgcttgctctccttttgtacttggtataatacatccaagatagaacaatacatataaacaggagtatggctattacccatatcggggtgctgtgttgaatagaaggacaaagggggttaattggtaggagagagagtgggggagggagaggaaaaagagtgcggttggaggctaactgggtgtccatcacgatgttaagggtatacactggtggagaaaccgtttgtagtcccggttcgtaacccccctttagtcccggttgtccaaccgggactacgaatcccggttcgtgttaccaaccgggactaaagatcggtcagccacgtggccggccaaaccatctttagtcacggtttgtgttaccaactgggactaaagattggtgtatcattttttttatttgcatggctctgtttgctgcatggttatatatatatatatatatatatatatatatatatatatatatatatatatatatatatatatatatatatatatatgtgcatatgtgtatatgtataaatacatatattacacacatatgtataattgaaagcacttaacattttatgtgcatatatgttaccaaaatatatattaacactaaagtaaatgtgtacatatataaatatatatatatacatgcatatatagtacaattcatttgctcagtagctatagctacgacttcgacgccggcgttatgtcagaagaggaaggaccgacgttatgaattgtcgatccgtcgtaatagaattcaccattgggattaaggacttctttgttgatgaatcccatcagttgttcttgaacagccgtgataaaatccttgtgtgggagattatccctcatgtgaatacgctatcattcgaaaaataatgacatatcaatatatgaaattaataaacaacttaacaaatcgatacgcaatgaaattttgaatggtttatgtatatgtacatcgagctctcgtgtggtgcatatttggtttgataggcagtgggcatactcgcatacgtagtagccgcataagttagttccctggtcctgctttgcacactacatgagaaacgatgagagatttaatatactctttatattaactgtaattagagattcaattcaatataattttggatcatgcatgtactcactggaaaatgaaacctccgtccaggtttttcttcccaagtcccgtggaccaattgacggaaccgatcccaagccctacatatgcagttgcaagctatgattaattaattattacccgagaccaacataatagcaatagaatccccgcgactttggaatagatggcattatattacctgtctatcagttggaagaccttgtcaaaaatcttctcctctttattcattgagtcatacacagtgactctgcatgcgtccaagtcgaagaataacaggacccagtggaatctggaatatgcgtgagatgagatatatatgaaaatgtacatgctatatgtatgggaacgaaatttgttcgaacgataataaaaactcactctgtgttgtacggcagtagtatgtacgtcttgaaatgctgctgcgttaggagatggacgagattgtcctctgtgtctttcttgtacttgtcgatcatttcggtgttgatttttcaagggtcgatgaacccagtatcgtagaccctccgccgttgggccctttgaatctccattctacaacgatgagaggaaattattattgcttatatatatgccaggagctaattattgaacgaaacaaatcgaactcaaagatactcacaaaatacatgcgctcagaagagagacgtcgagggcgtctagatggtacagatcaaagagatccttgaaatggatccagagaacatcttctccttgcaagaagtcggggtttctgatcctcgctccgaacatctctctacccttggcgctcatttccatgtacccttcatggaatttgtacatctgcgttggtagggactgcagctgctcaggcgtgacaagcggtttaccgagttcaaacttgtatgccacttccgccttcgggattggtgcgcctcgaattagctgatccacagttagaccggtgtttgaaatgaattccgttatgccaaaatctttgctggtcactaacggctcaacctcttggtttggttgttctccaagctgagggattggtttggacttcttgtgataggctttctgaagtgttcggtcatagtccgatatctgtgaggcctccttgtttgttgtggacattcccttaaagaagttcttcatgctcgggtcaataggtatcttcttttcaggactccgaggcttgagttgcctcttcacttctcctgccacataagcatcaagctcctcttgactgcaatcgtactgcggctccttgttattggtggcgtcaactttcgccttcttcgttgcccttgtgcgggcaggcggtggagcttggcgagaccttgtcttgggaggtgcaggcggacacggtggaggtggaggaggcgaaggaggcagggaggcggaggagccggaggagatggtgcaggaggaggtggcggaggagccggaggagatggtgcaggaggacgtggcggaggaaccggaggagatggtgcaggaggagatggcggagccggaggagatggtgcacgagacgccgcttgtcgcccagggaggatgatgtaccgcttgtcgcgatagtataatggcatggcttgtgtctcgtagatgcgtctcactgtctcctcctgggtagtccaactcgaggtcctcgtacgcggcttccaccagttcaacttcgaccctcgagtatcctgctggaatcggcctgcagtggtaagtcccggaagggtccgttgggatggccattcccgacgccaccttcacgtgatgagaggttatctattagtaatcaacctaagtagcaacttgcggaatgtacaagtcaaaaatcatcaaactacgagcataccttgattgataagttcttgaagggaatatgcagctcacatggtgtccgctgcgtgatctcatcaacggggcaggtggttttgtcctgggtttgcatggcgtccatgctctgtgatcctacctgccctgttgaggcgcagctgctacgattgcctgatgggctgaccattgcaggaggaatgtacggctggggatcctgggaccgatgtgtggccatacgttcatccaccttccttgccacctcctcttgcatgctgagctcgtagctcgataccctatactcaagatctacaatcttcgcctcagtatctctcttgctcctcatccgactcctgtacgtgtggatgtcctccttgaatccaatcttccagggaatcacgcctttccctcgtgttcatcctggatgctcgggagtctgtagggcgagtaacagctcgtccttctctctgtcgggtcggaatgtgccctgagaagaggcttccgctgcgttcgttagtcgactggcagcctcgcgtatctgatcgctgaagacaagggagccatcaactgggttaagcgttccaccgtgagcatagtaccagaacttcgatcgatccagccatttagcggtggccggttcgatacccctctcaatcaatcttgcctccatctcctcccacttcggcattgcgacgctatatccgcctgaccccaagtggtgatggtacttcttgttggcggcattttctttgtttcgggccatcatcgcttgtccttgttgccctgtcttgtaagcaacgaactcgtcccaatgatcccttagctttgggaatacgtcgaagttcggtgttagtcccttcaggatgtatttgttgttgagatctcccttgaagctctggaactgttttgccattttcttcagagtccactgtttcactatgttctccgtacccacgggtagcgtgaacgtctcgagcattgtggtccacagaccacatgatctctttctctgattccgggacaaagctgtcattatccccgcgtgccattgtttgcgctagtacaccatgttgacagggacgttgtccctcacaacccaaccgctgtggcgtataaaattcttggctgcttctgccggggcactaggtcggccgtcttcgtccacctcagttatgatgtgccgattctctatcttcttcgcggcacctcgttgtccgcgtgccctcttctgtccagcggagggatgacttccactagcctcctcctcctcgttcccctccgcatccctctccacgttcccctcctcgttcaagtgctggtttggatcctcgttcccctcttcttcgttccagtactggctgcttccttctgcgattgtatcgtacagtatctgttcctcattgcgatcagccatctgtgcatacaaaaaatatttgttaagtctataggtcatatttgctaagcgtaatactaaaactctactaatcttatattaaatctctaataatcttatattaaaattgcagtaatcatatatgctaagtctaacaatcttataataaaactctaataatcttatattaaaattataataatcatatatgctaagtgtaacaatcttatattaaatcgctactaatcttatattaaaattgtaataatcatatatatatgctaagtctaacaatcttatattaaatctctactaatcttatattaaatctctactaatcttatattaaaattgtaataatcatatatgctaagtctaacaatcttatattcaaactctaataatcttatattaaaattttaataatcatatatgctaagtctaacaatcttatattaaatctctactaatcttatattaaatctctactaatcttatattaaaattgtaataatcatatatgctaagtctaacaatcttatattaaaactctaataatataatattcttatattaaaactctaataatctaataatcttatattaaaactctaataatcttatattaaatctctaacaatcacttctttacattattgcctgcacgaattccttcgatggctagctacaacttcggcttgagggacgacgacgacgtcttctctgcaacattaccaggaaaatgtattagtctaaatgggccaagttacatatattgtatttcacgttttaacctatatatataatcatatatgtatgctaagtttaataatcgtttaattatcttgttcgtacaagtttcgctcgcgttcgttctcacacttttagtacaagtgcattcacgcgtttcgttcacgtttgttcacgttcgttcgcattcgttaacgtttcgttcacgttcgttcgcgtttcgttcacgttcgttcgcgttcgttcgcgttcgttaagcgttcgttcacgttcgtccacgtttcgttcatgttcgttcgcgttcgttcacgtttcaatcacgttcgttcacgttcggcaaggtcggggcgcgcggcagtggcggcggcggagcggcggcgtggcggcgtggtgagctcaaggcgggggcggtggcgtggcagtggcgtcggcgtcgtcggcggtggtggccgcggcgaagtcggtcgtcggcggtggcggttgaccgtggcgtggcagtggcgtcagcaacgagctaggcggcggcggtttggagagagagagagatcgagatcgagagagagtgagagagagagagaggcagcggcgactctcacccaagagatgcggcggcggtgtctacggtggaggcggcaaggaccgccaagcgacggcgagagacgacggcggcgtcggcgcggggttgccctaggcagtggcggcgaaggagaagccgagatcgatctcgatggaaaaacgtctaagtgttggtggagaagacgagggcacaccgggaatatatatacccctagatctttagtcccggttggtgagaacatccgggggtacagatcattactccctgttcgtaacaacaaccggggctaaagaaaaatagcactgaattttgaatttcattacatatgtgtttcaaaaatagtaaataatgcattacaattatttaaagccgaaaaattaatgacaaaaccttcgaaaaattattgttacctgtagtaaactaagtggataatatataataagcacatgaatgatttaaaattgttaaaaattctaataatcatatataattagcatatgcatgatattaaattattagaaattctaattaacatatgtaaataccacatgcatgatttaaaattaataaaaattctaataatcatatataattagcatatcatgatattaaattgttaaaaattctaattaacatatgtaaataccacgtgcatgttttaaaacttttaaaaattctaataatcatatataactagcatatggatgatttcaatttgataaaaattctaataatcatacataattaaaatatgtcatacaacaattgatttgtttggatattcaatacatcaaaaatagtttacatcgtgtacacaacaattacggtaatacatcggcggtgacggttgaccgcacgtactttctcctcactattgttcctttcttgtgatcgctacgtgagtaaggagtgtcttcatttgataggagggtgctagggtcaatcgtcaccgtgaaagggggtttcccatcaaactgatcgtaatcctcgtcagtcttgtcctctactttgacgatttttctttttcctgggaaaaccacgtggcgcttcggctcatcaggccctttgcccttttttcctttgctagacatgtccttgacgtaaaaaacttgcgttacatcattggcaaggacaaaaggttcgtccgagtatcaaaccttgttaaggtcaaccgttgtcatcccactgtcatcgatcgttacacctccaccagtcaacctaacccattggcaccggaacagagggaccttgagaggttcatagtcaagttcccatatgtcctcgatggcaccgtaatacgtgctagttgtaccatcgtgtcccatggcatcgatacgaataacaatgttctggttcgtgctcttcatgtcttgggctctcgtgaagaatgtgtacccattgatttcatatccctggaatgtcgcgatcgagccagatggtcccctcaccaggaaggccagttgttggttaatcgtctcgttacccatgagatgttgtcgcagccactcggagaaagtatcaatgtgatgccgtgtaatccatgcatcggacttaccgatgtttctggcgcgaattagagccaagtgctcctcgatgtagggagccaccaatgaagattgttgcagaaccgtgaaatgggctttacggaataaattgttgtctaccgtcattattgctttccttccgagagtcccctttcgccgtaatctcccttcatggtgtgattcaagtaccccgattgggcgaaggtcttcgataaattctatgcaaaattcaatgacctcctctgttccaccccttggcgatgcttgcctctggacgagcacggttatgaacatacttcttcagaacgcccatgtacctctcgaaaggaaacatgttgtgtaggtacacagggccgagaataccgatctctttaacaaggtgacaaagcagatgtgtcattataaaaatgaaggtggaaatatcaactcaaagctgacaagacattgtaccacatcattctgaagggcttctaatctatccggattgatgaccttctgcgaaattgcgttcatgaaagcatatagctttcttattgttgcccagacattgtctgggaggataccccttattataactggtagcagctgtgtcatcaacatgtgacagtcatgagactttaggtttgtgaacttcttctccttcgtgcttattattcgctttatattcgtggagtattctgacggtatcttgatgctctccaagcattcaaacatactttccttctctgccttgctaagagtgtagctggctggaagtaatggcttcctttctcctttggttccgggtgaaggtcgccgcattgttccatatgcttcagatcattacgtgcttccagtgtatctttcgactttccatatacacctaggaagccaagaaggtttaggcaaaagttcttagtgaggtgcatcacgtcgattgcgtggcggacgtccaagaattcccaatagggtgtcacataccatgactttgggtgtttggaaaatatggaaatggtggaagaagtaaaataaataaaacttttgtttaaaacttatatgcttgcttgtttgtgcattttgtggtgtatgcatatgctttataggatcatgttcatatttaactaaaaccaatggatcaaagaaaaattcttggaacaactcaaaaatctgggaagaatttgtggtaacttcttgctgaccttagaaactaaatgtggattttaatttagcttatcaactcattagatcaaccaaacaactctctaaacacttaagcacaggattttgacagattctctggagcactctttgacactctgccaaaattggatcttgaactcctaggctgtaaaactcgatccaaactgtagttcaatcattgctttacaactttgcctttggtcactagctctaactctgcctggaactaattttaaactgaacccaaagatggaattccacctctgttccagacttggccaaaacctagatctcctctccttctctctcactagtcgctgccatgtgggccagggctgcatggcgggaccccattgtcagcctcacattcctctccacacgggcccactgcctgaactcgcatgccacgcgtgtgagcacgcgtcgagcacgggagagggcgagctcctcctgtccatctccgccggcgaccatacttaacccgaccggccgaccaactttctctccctctcgcccttgtctcgtttcgcggaagaaccgaggtaccccgcctcggattcgccgggaacggaggcgccatctccggcgccggcgagataagtcctcgactccgtcgcaatccggtgagcccatttccgttcaatatgcgttctgtaatcccctctcaatgccgtctctaacaccaccaagaacacctcatttggtgcagccaatctccgggaacgtgaccgcgtcaaatcggaacaccgtcgcgctctggacgccgctgcttcgcctttgctcgtcgcccggcttccatagttcgttacaggctgagccacttcgtcacgagcttcatcaacacctgtagatcaagaatcccgaaggaatcgacgcgaggtggaccacagtgggagatcctcttcttcttctccaatcccagccgccgacgccattcctttctttctccttctctggtgagcttcggcgcaatattttccgcctagagctaccttgtgctgatctaaacagaggcatgcttcctctctttgcagtagaagcctggggatacgccgtcgacgacgaccgtagcagccgcgccgtcgccgaaccagtacaccgtcgccaagacttcgctgagctgcgtttgcttcttggtgagcctcctagtagtccctagagtccttaccatacgcatgcacgattagatcgagcctcaaaactcacatgcatgtgcaagccgagcttagccgccgcttctaacaccctgacagccgctatagagcaccaaggcttgcaagaaaaacaccaataggttcgtacggttgttctctacactttttgttttgggagcttgagctgaatcgccgctgttcgccgctggtgatactgtgaagttcgtggctgtgctgctgctctgttctgtccagagcaagggcatggcttttgaaatttaaagactcccagggatgtattagcagcccgagcaatcacttacatatggggtcgtgcactaatctgtaaataacatagaactcaagtcccattttgaataaaatcctggaacacgtgctaggggctgcgggatctatttcctgagaacccaggagcttttgcgcaaaatgttagtctctgtctggtggacctgagaaaggaaaatgatgtatgaaaatttgagaaaatacaaaaactaatttcctatcaactgaaaaatgtcagaactttagaaagtggtagaaaattcatcctgactctaaaaattgcaaactaaattatgttggaatcatattttcatgctttgcatcataaaaatgtttgacttaacagaatcataaagatttatgtctcaataattcgaaatgcatttaggaccataattaacatgtaaacactttaaaaaaaaatctgtaactttgaatgtaaactgttagattgaagtttctttcactgaaaatcaaactaacacagagcacaccaactccataaaaaaaagcattcattttagagcatgttggatttttatgtatgtttaaattttaaatttttgcatatgtatgtttagacgattcgcagccgagtctcgaggaggcctactttgtagctgagcaaggagtggaagagcaaggcaagccacctcccttctttgatcacattgaacctatgatttggatgtttttgaaaagtttgcaaaatatgcatgtctattgtacactaatccattaaaatcttgtaaaatttgttagatcaactccttaacttgcattatcacctgaactccacaaaagaccttaaccattattccaaaaccttaggaacaatccattgtgtcacattaagaatgatgtttgagatagcaagtctataaaaatgctcagccatgcttagtgatgagtttacttaccatttgggctcaattacatatattaaatgatttattttatgatctggattaaaatgataaaatgtgatatttgttaaataaaatgttggaaaatgtggattttaggtttgggccgcatgtggtacacatattgtgtttagttgtgtactgatagggggagagtgtgcccaaaccgacctaaggacttcactcagcgtcaattcatttcgtatacagtacaaccacatgtgctagtatgggatagcccaagcttagtaaattatttatgatttagccttacattctggtaggccggtgtgtatgagttagtcgataattctgaggaattagtcgttgattcagaggaacttctatttaccccgacgtggtagtttaggtgactaagtctgtccaatacaacggtattgtgccacgtgggtgggttcccgttgcgtccgccaccacggcgttaagtttaaggcgtgggcccgccacttaacggttctaggtcatatatcgagtatggcttaggatggagtaacacgtatcgtgctggtgtaaggctaaatcatgaatcttggaagggctttgttgtgagtaataaatcgggtacttatgtatcgcgtgccatgcttttgcatgattattatttcgcatcatgtgggtaaagtgtacgtactctgcagagttaaaactaatcgattagccgtgctcacggtcaagagcggcgtgtgaatatgtcatgagtttagacatgtgttttattcttctaaagctgaatttgaacttcaaaatgtgatgtg

SEQ ID NO: 4549 - DNA, 10487 bp, Oryza sativa
ttagttgtcaaaatttggaaggcaaaatgtggttttttgagccaagtaaaattcttggagttgaactatcctatcagatcacaattgcgtgattaaaatggaagtccttttacttgatattgatcaataggttttaagatgaatctttgatggccggcttagtcacctgttgctttctccattttctatattttatttttaatgtaaagctttatacaatataagatagtttctcgcaagcactcttggttggtgcataagcctaatgtttttgtcatatatggaatggattggtcttatctattatatctttaataacaaattttaagatataagctttttgtgacttctggtatttttgtaatcaccaccgcattgttcaatacaagacagcctactattcattttattgccatatcttgatttattaatccttgtttttgtactaccaagtgcaattggtactgtatgctgttttacccccaggttgcttcgtacattgctgtagtatgtgaaggtgtggaaaatgagcttcttggaaaccaaatttcattaatagacctcacttaggatcagggaagaggagctgtcaagtgcctagattatttttcttacaagatatatactgtagtaatcacataaaactgttgatggtcttaaattccattgtggatgactgattgcctgaagtattcaagtttcataggtacaactaatattcaagttttatctgtgctaatcccactgtcgatatcgttcaaccgccgttgtctgcactctgcactctgcagcactgtgactgccgtcgtttgcaggtctccagcacaagaattactatgctgttaacatgtacagactgtaaaattatgttaatttgagtttcataaaccttttcttttggtatcaggcaacagttgaagatgccactaatctgtatggatggcccccttgcattgacactctactatgtgtctgtaattttgcttctgttgcttatgaccccaacagaatttgatgattcagatttgatgtacaccaataaagaatgtaagcaaatataagagaagagaaacgatgatgttcttagtgacagattaaaggcgggcttgatcctcttgatagtgagagctacttccttgtttttccttatttatggtgagcatacttttcaaactagtattaaacagtatgtttatttagaaaacttcctatatcgaagtttctcttaaaaatcaaagtttatgatagttaatacttaattatatgcattaatcactaatcatgttttacgtgtagctcataagcttgacccatccatccattcgaacggagcttaactatacttttcaaactattgtttagaaaacttcctatatcgaaatttctattgaaaatcaaataaatttgtcttgtttatgatagttaatacataatcaattatacattaatcatttgtcttgttttacatgtactctttccattcgtaatataagagattttaggtggatgtgacatatctaataccacaaatctggacagttttcttaacaagattcaagattcgtagtactaggatgtgtcacatccatccaaaatcccttacggcctgtttggtaagagcagggaaggggaatttatatttttgggatggagggagtagctgataagctagacccatccatcaattcgaacgcagcctaaccaggcaaaaggattttagagtgttcctattggatgatttccatcacctgaaaataacatattatttcagatccattttttgaattgtttgcattcggataatttgatatattatttcagttaaaacacttctaaacaattccagcgagaaaatataatcttatgaatcgtgcaccaatgaatcaccaggaaaattattggaattacaaaattgcgccgtagcgtaagcacggacatattacaactagttttgattaggaaaagacaaattaaaaatcaggtgaaagctactcccagtgacggatttacctccagggcaggccggacgactgctctggcttcaccgccttcatgtcgccgagccgcttagcattagcgattaacaccgccgattcagcaattcccgggcggatcgtgggtgcaaggcagcaacgcaagctcgtgcaggcgtgcagctgtcaggttgtccttgcaggcagcagctcaaaagcatgcatgcttatggctgacctaattaccttgcttaatcacacctatctatcaatctattatatactaaaaatccattaaacttcctacaaacgctcttagatcaccatgtggcactctataaaccctcctaagttgccacgtagcaaagaaacatctaacccttgattttcatttaaattggtggacctattcttttcaaccattagattagatgtaaaaaataataattcccccatcctaatccacctaggtccactctattcctgcggatgtaagctcctacatcaccacgtggtaccctataaaccctcctaagctgccacatggcaaagaaatatctaacccttgattttcatttaaattggtgaacctattcttttcaaccattaaattagatgtaaaaaaaaataatccacacatcctaatccacctgtgcccactctattcctacggatgtaagtacacgtacgtactccgtatgctcctattcccattattctcttttcattctgttatctttttctctcctattttccttctttcaatagaaagcaaaatttatgtaaaaacatttaggcaactatagtatttaaatcataaaagtaactaaataatacatatatgttttgatcacagtagttaaaaaaggcacatagatattggtgttatgggtgcggaaagtgataaaaccagcacctatagaccatttcccacctctacaggatgaaaacacaagaaaaccggtacggcacctttaatagactataagtgttgattaattaacaaaccgataccttcaatctattatatactaaatatatttatttgtcagtgttatggataccacatacctaatagtagttgactaaatctcggcaggacccaccacataccatgtcttatacggaaacaacctttggatataggagaagttccggataaggaaaaacaactagagttctatatggaaatgataaggactactcggattgtatttatattggtttccctagttctacttggacaagtggacacctatgggtataaatacaaggccccctaggaggagaggggacacagaacaatagatcaagacacaagatcaacatacaagccaacatgagtcaagacaagacgccggatatcgacttcagatataagcatggctagtcccctacggtgtctacggatactgtcaggagagacatagcgctgtctttgatctcgccagatgcggattcaaggaggaaggctaccctgttgtcgactacgagtcagcacttcagaccgccaaatcgacaacagttagataggctaccccaaatattgtactggtgtgattatggtgaataagagcaacgaccggcttcggccaacaggagtagggttattacctgacaattcaggggcccgaacctgtataaaaatctctgtctccatctcttttacctcaatctcgcatataccctgataccaacgatctccataccatcaaaataccatagccgcgatatcaaacgtcgacactattaaacttcctacaaacattcctaatccgctatgtggcactcctacaaaagctatagagccgctatgtgacgctctaataaattatagaaattatgagaaaaacgaaaatatctaacagtcgattttcatttaaaatagtggacccaatcatttaaaacatcatatcaaaataaaatccctcttacgtatgtacgtacgcctatcctcccctcattttctctttcttttttttttgctaattaagttagttattactacgagatatgcaccataacttaatattgtaaatggttatatctttccttgcatggcatggagcatcgagttggctgtgcaacgtgcaagtactaattttttttatggacgatttatacattgattttatgatacgcttcaatgattgtatgttttaattaaattaatcaatgagctaagtcctatattcactctattttctatgttttcgatatagacatagacatccgatggatcatctgcaataatatcatatctaatgggtaaaaaaagataagccgtttgagatatagttacggccttacgggatatgagttcctctgttacggtggccgatcttcacatagtctaaatgattatatataaacaatagatagctaaatgattatatttttaaatatattcagtttttagtttgatccatgtaggcttttcttgatatatgataaatatattttcagacataaatccatatcctttccgtgacaactaaacatcaatgcaacgttatataaaaattgataacatatatcgtatcatcatttatttattagatgtccattacaacacctctatgtcttcacatttcacatctaataaattattttttttaaaaaaacctatttttgagaaaaaatacatatgaccatcggttttatttaaatcgatagaccttccctctccgaaaagtttagggctctcctctcctcttgcccttcctattatttagctaaagtccattaaatttactacaaacacttataacttgtcacatgacgctctaataaattagaaatcaaagaaattatgagaaaaaacaaaacaactaaccctcgattttcacttaataaggttgacccgatattatacaccattagatctatctttagaaaaaaaaatcaaaacccatctccaccgcctccttcctcctgggcctcctctcctcacggtacaaacatccctccctctttccttccttcttttaattttcccgctaacagattaataaaaatcataaagattctaataaatgtttagccattatttttttaaaattgatggagccattaattttaaccgttcgatcttcatctaaaaagaaaatcggatacctgcactctcactgtcacctccatacgtgcacacttatgacttatgtagttacgttctccctccaccctcctaactctccccttctctcctactccctccgtttctaaatatttgacaccgttaactttttagcacatgtttgaccgttcgttttattcaaaaacttttgtgaaatgtgtaaaactatatgtatatatgtaagtatatttaaatgataggaaaataattattaattacttaaattttttgaataatatgaacggtcaaacatatttaaaaaagtcaacgacttcaaatatgtagaaacggagggagtatttcttaagctaactgctattttttagctgacactcaatctatcaaaaattaataatcggatttctaaatgatcataaaaactcaagttacatattttctcaatttttttgaattattgtgttatttataattaaatacataatttgagatccatatacataactcgaacttctaatataaatgtttgagatcaaaattttaagcatcatattaaataaatattatattttgatcctataacgcccctaaataatgcccctaagccgacatgtgaccctcaaaataaattataaaaattcatagaaattatattaaaaaaatcgaaccattgatttttcaatatttttaatcattagatctaatcttaatcttaacctatttaaaaatttcaagatgattccatcctccattgcttgatgatgctatccatgagtcagccgcacatactccgcgtatatgttccgttcacgagagagagagcgcacacgattctgactcaaattgataaaaaaaataccacatccatttgactcggctcgctgaaagaaaaagtcgattgaaaaaatatcttacttttaatttgaaattaaattgttagaccgatttttaacaaactaatacatatgcccgcgcatcgcgtgggctaccttcctagttcatataattacgttaagctcatagtccactcaaccaacatgtagctcaaggaatgaaatgcatattacgtactatgctgtatgcaacgtccggctaaatgaatttctttcctgtaccgcgtgctctgtgctcatgatcaatgcttagatttaaatagcaaattctgaacaatcagcagtgccgctttaagttattcacattttttcaacgtataaacatttatatgcacgtttggactgtttatataaaaacattatatattttgatgtgcaactttagtgataatttagacatatatacttgattttagtcgttttatttaggcttacccacctgcccacggtttagaaaatttctggctctgctactagctactcaaatgacattgttagcgatagaagaaatctcaccatataaaccaagccatggaatggaatgccacgagatcacgtaaggcaagaacaaataatttctactatatgggacaagaattcctgagacctagacacacataatctggaaacgaacgagagtggtcgctagcagacagcccgtgaagtacaatctcgacgagcaatctcgcatgtccggtggtccagcgtcccaccaccgcgggggaggcaaggcaatgcaagcggcagtactccccacgccatcatgcctgtccccccctcccctcccgcgcgcgccgccctgctgcctgagacacactccactcgcggccatcatggccgagagacctcctccccccctagggcgcgcaacaatggcgcataaccgcatcgatggccccgacgcggcacgcgcgcgctcgcagcagccacccgggccctcatactactattgcttcgcgtgtgcttgtgcttgtgcttcgttttcgtcgtaacgcagggactgctgctcattcgctcctcttccgtcttccccccattgactctggccccgcctccgcgcacgggccaatgcaacgctgatgcgtgtgagggaggggtaggcaggcagcggcgtgggccccgcgagtcatcggggatgttggtttggggggtgggtttttttttggggggttggggttggcacgttggaagcggcacgcgcacccacacacagcgcacagcagcatcgagtgcgcacgccacctcattaattcgttcgctcctcgcgccaccatccatccattcattccctccattcctctgcactggactgcactgcggctgcactccatatcctctcctctcctctcctcctctcatctcctgccttccccgcttgcttctctgtatcatcatctgctcaaaaggagtgcagcgacgagaaaaaggagaggaacaccaatccgagcatccaacgcttcctcgtccgctgtatataaaaccgaccccctttgctggctccatccatccatccatctatccgtctcacttcctcccctgttccgttccatcgcccgatctgcttcttctacttctgtctgctcttaattggagtaccaagttatcacctgcagttccctgataattttggtacgccaagtagtactactgcatttgcatcccattcgatcattcatacttcactgtcgttgatggccttccaagctctgataagaggctggtgctgtgtctgtttggcagggaagaggcaaggacaggatgccctgggcagggacgacgtccgttcggctggcggtgttcttccgcgtcatcctgtgatcgatctggtcacgggcaaggcgatcggtcaccggcggtgaggggatccgagccgtgccgcggcggaggacatgtgcgttgggttcaacgggaggagccttgacaccgtcgttatgacaagtggcgccgtcgcatattactacagattgatgcaagtgtgccaggtgagagaccacacctcattctctcctcctccatctctttgtgttgcatttttgttcaaatttgcaggcatttcggttacttgcaaaagcgtgtctttttttctttcttctttatttgagagatcgtcgatcaatgtgctggtggtgggaatcataatcatcataacatttcgtggataagcaacttgctaattggtgctgtccgttagcgtatgtagatagaaaaaaggaagtcacaagatggtgtcgcatcgcatgcggataggtggggcccactgcatgcgggacctaccttgatgtcaaccatggggggctaggtctaagctagttgacaaaagttttttttcttttattaaaagacttgacaaagttttctgcggtcaaagtataggtgtgaactttgaggagcctagtacatattgtgtcttgcaattgcatcttgccgcagcctggggagcatgttcatgtgtttgtttccttctggtactaaacgatcttaattaacatccattaattagtgaatcgatgctcctatatcctcggttttacagtaattagttctatgccgcgtgcaaagaccatcttgaatgaagtgctaagctacgtgaagttgttctatttgccagtttatcacgtaagtttatcgtaatttggcataaccagaatcaattgctcctcagttccttgtgtttttttacctaatttagatataaggtgctgatttttttaaatcaacattttatctactagatcagtcaagctaatcagacgagcactcgattcactattcaatccaattattctatcatagttgttgtatcccttcctgtgtgcatactctgttttgctttcgtccaataaagtgtaaactatagatatacaaaaccatactctttttaattggcgtgttcgtactacagcagtacaacatacaaattgaccgaatagtacgttgcaatttaaccatgaatgcaattcatttttgaaactgagaaccaaatatgaagatctgtaggattttttctctggattgtcaccgctctgtacagcatacatcaacatcttggattacaaattcaacattttttttgtcaacttctattcgacaaattgatggataacagtctttgctcctgttctcgcctttatttctgtttcagtctgaaaagagcaagcactatcttcccatatacaacttgcctagattgctttagaccttttctcatatgctctgttctcgccggcaaacatctttgacgaattacattggcaaatcgcagcttattagtactttctccatcaggttgacacatgaaaaacttttacatgacgactttttacctactgtttgattctctcaatgtgaagtattgccttgtcaatcagagtagtaattcatcttcataatggttgttttctgcaggccgaatacttccgccagctgctcaagcccgtgacgtagattagctcacgcacacattccatccaaacagcctgaaacccccaaacaaactaaccaaatcaattttgaattggaccaaaaaaaaaaagccaagctccagttagcaaaacacctttgaattcatacttgtttagtttcgtttcaatcaaaagcaaaacatttcctgctttcccagacaaacacagccacacaaaaccagcacgaatttgagcagcacccgatgcagggcgacccagggtacgggtacggtggctacggctacggctacggctatggctacggcggcgccggctacgacatggccggctacggcggcggcggtggagggtactacacgagcgatccgtacaatgccgctcctgctgcttatgaagacccgctcgccgtcgctggtcggaggcagcacgacttcccggcgccgctcaccggtgtcgagttccagccgtcggacacctgccccaagaactacgtcatcttcgaccagacctacgaccggagccgggtcatgttccacccttcgctggccaacaacctgggcaactccggcggcggctacgaccaccaccaccactgcggctacggcggcttcgagcaggactacgccagcaagagcgcctactatggcgtcgaggacgacggcggcggcgggtgctcgatccggcagaaggaggacaccgacgagatcgacgcgctgatgagcacggaggacggcgaggaggaggacgacgtcctgagcacgggccgcacgcctgggtgccgggccgggggctcgccggactccacgtgctcgtccggcgcgtccaggtccgactgcggcggcgggcggaagcccgaggccggcggcggcgagaggaagaaggagcggatgaagaagatgatgcggactctcaaggggatcatccccggcggcgaaggatggacacccccgccgtcctcgacgaggccgtccgctacctcaagtcgctcaaggtggaggtcaagaagctcggcgtgcgtggctcaagcaggtagcgcgcgccacaacatccacagtcaaaaattttcctactttcaccctttggcagataagacgagactgactgg

SEQ ID NO: 4550 - DNA, 13402 bp, Oryza sativa
tcccggtttttaatggaaccgaaactattgtgaaatttggtcgaccgaccaaagatggtttctcctccagtgaaccgcttgctagcctgcacctgctgccggggacgacgagcaggcgcggcgaacggaggagggcgaggttgagggtcttgaagaattggtgggacttcatgtcggcggcgccgcggcgggagccgaggcgagcggaggggtccttggctaggagccgcgggcgatgaggccgtgcgcgtcggcgtcggccggccgctttaatttctctcgatccctaactatatatgccgccacgtgcatggctagctaagctcatcatcgatccatctccctgcagctacgtactgtacttgttagcaaccaatcccatcaaatcatccgccgcttgctgctgccgctgctgctacgtaactatacaccttgttagcaatcaacttgattagttaggtttaacgacgacggcaacagggacagatatgacggccgccctgcaagcgctgctcgacccgacggcgctgtccctgggcctgcccacgccggtgatcaacaaggaggtgtacctcgccatctgcctcaccgtgctcgccggcacgcgggcggggaaggccctggtgggcaaggccgtcctaggggtgtgcggtcagcgcgtccgcacagggcctccaatttccagggaccccttaggtccaaaacttcaacactagtctaactagttccgaaaatctgttattttttcttatcgtttcggtttcgattacgtctttgctggttcgaacagttgcgccggttcgcaatcttgaatcgcctcccactgtggaactcgccaatcgccaatcacaacgaacgagaggagtaaacgacgccttacctctctctctcgtgcggtcgtgccgcctaacgccgtcgccgcctgacacctgtcacgcccctgacctaattctttccggtaatttctaatccgataatccctaattttggattatcattttaggccatactagattgctatgaaatatattacggagtataaattattttcatattatatcatcaattaagtttttatccttcaactttgcacagggccaccctgctggtgggagtgggagaccagcaggaggtgcagccatgtaggcctgcaagcggttgtccccgaggtggcgagcggcggcgcgcaccgtggactggaggccaccctccgcaacattgtccgccgacctcttgccttcctctccgcctccggctcgtgcggccccgccaatgctgacatgcgccacctcatcgctcgcctccttgcgaaggaccccgccgcccgtctcggctcccacgcggcgccaccgacgtgaagtcccacccgctcttcaagaccctcaacctcgccctcctccgttcgtcacgcccacccattgtcccgggcactggcgccgcgccgctgcactggtcgcagtcgtgtaaggtggcgcggacaacgcaaccaccgccgacgataatgaagatggcctgctcagagtttagagaggagagagaggaggaaaggagaggaagggagaggctggcctgctttcgtggcatcctgagtcagccgccacgtcggataaatccggagtcaaaaccgctgatggatctagtttgcactggtttttataagttggaggatgagttgtatccggttttgtggttgggggacgattttgtaacttgatgacaagttcaggggtgtactttttccttgtagtagtagacccaaagtcccgcacacgcgccaagccgccaaccggtccttgcactcccgcctcggcggctgctgcttgggccgtgcgcatgccatgccgccttgctgcctgatgggccttgatgtctcgttgccaatccggctagcccgagcgaacaggccacctccatcgatcaaacagctagcttgatatgctacagtgatcacattaccattggtgtttacaatttgacaaaatttactacatcacccgctcaaagttcatggtctttgttactgcaaatccagaaaacgtgatacagtttataaatgctctaaaaaatcaaaccaataatttgctaaaaggcactgccaccattattttattatttgcggatcaaatagaaagagaaacaacgtagaaaagacaagtttgcccctctgcctccatgtacctcctgcggttgatcacctcctcccatcacgtccgtgcattagaaatttttactgtgctgctatggaccgctggttctgaaccgtttgggacttgaacaatttgtagtgaacccttgtgctagtataaaagattgtttgtgtatgtctactcagctcacgtacgtattcgacctagtgtttcagtgtattagcgtgataaataatagccatgctgcatgttctagcttgagagtataagaaataatatgcaaattaaggaaatgagagacgtttggcttgcctggaacagtgcgccttgtggaagtaatcggtggtttttgatgccgccggcgccggtgcggatgaagatgtggcgggcgcccaggcttgttggcagggcactggtcagctacggcttgcgctggtgcccggcccggctgcagcacacgcgccagttgtcgcagcgaaacgtactcgagccacccgtcgtcgttgttagatagcttgtcgtcgatcctgttagtgcgtgtactggtcgctgaagtcggcgatggtcgataatcagggtgaagatatgtccgccatccttgtctgtccgatccggatatacgtacgtatatgcctcgacaccacgccctcaggctgcacgcgccactgatgcctcgccgcggcgcgccaaggttggacacgtcagtgctcgtggcggcctccacggtcgcccatgcatgatgcgggtgcgccgtcaactcagcatcaatgtagtggaggtgtagctcgtcgatcgtcaatcagctgatggacggtgacgcggcacgacacaaagaggcggacgagcaacttggcggccagagacgcggtgcgcacgtggtcacgggcgatgtcggggtgaatataactagcaggttggcccgcgcatttgcgcgactaggtttaagtcattttatgttttactcatattacttttgttctttaaactataaaacatgtgtttgtttactaagtaattgttgtctgtttcagtataattctatttaatatttatctatatgtttttattctttaagcatatattaattgtgccatggtgttgcgcaagcttagaaccatagctgcatgtgagatcatgtgaactaccatcctttaaacttactcaagactattgtcggctgatgctctcttgtctgtccgctacagtggtcgagctatcatgttgtcatctccttgagcttgctctccactttagacattactatcatcaagctcgctttctattatcataccgtcaatcttgttccatggccattgcactctttgtgcttacttgtggttgtcaccttgtttgatctcgcctcatgcacaattgctattgtcctcgagctcaaaacttgcaactgaaactcatcagcaagggctgggtatccgagcttattcatgatcgtctcatcctcgatctcaactgaaacaatcactactgctatgccctcaagcttgtccacaaccaccattatatcgacctcgctcgacattctcgttaaatttcttgtgtagtttgtcttcaaacatatatgctctcaagaaagtggtgaggaagaagggtggcaaaagatgtaagcttgaaaagataatgcatggcttttaatagtaggacggtaaagatgagaacaaagatgattctttatagtaagatggcaaaagtgaactaaaattcctgctatatgtttaaaatcgtaatatatttactgtatgtcaattttgtctatctaaaagtataatgtggaaacaaataccttttgcaacctattattatctgtaccaatctatattatctatgattatggagaagattaaccaatgaccacatgaatatatatgatgtgcaatttgttctgtgccttatttcaaggctctttttacattatttctagtaggattttttgttgttaaatgtgtatgatctaatggtgtagaggtccaagtggctgtttatgttttgtttgactcgctgacgcatcaaaatctaatccttacgatctagatatattatgatctaaaaatgtagatttttcttttctatagcagatctagaccttacgatctaggtatattatgatagaacggtctagaccttacgatctatatatattatgatctaaaggtgtaatttttttctttttatagcagatctagaccttacgatctagatatattatgatgtaatggtgtagattttttcttttttcttttgtctaatctttttttttgttttttggttaatatgggattttctaacccgtgagagtgaacgtggtggctttttttctaattacattgtatttctaatcggattcttcttaactggaattttagatatttccagattgtatttatagatggactcttacctaatatcaattatggcggcgggcctcggctagggtaacagtgccggcggcgacggctggattagggttagggtttgtttattctttttttttgtttcgattttttatttttccgtgcgggcggcacgcgaaaatcgattttcccgtgcgggtgcatcgcccacacgaaaaaatcgcgtatttttgcagacgatttcttccagacggtcgaatcttctgcacgcgaaaatcgatttcatccgcacggaaaaatccttgtagtagtgtaatcgattttctctatttttaaaaaaataaccggtagccaatgaaattgtactagataatgcatgttgcatgcatgcattcacatttggcatatgtctgtcgttaacactcgtacgggctactccagaacatatattgtataagaaaatgcttgcttttgtcaaaagggacaagcacaagcaatagcaaacatacagatcactacaggttctacgcgtgcatatggtcaaagaatcattcgtatctgatcaagcagaagcgtatgtatgtacgtacatagctaggacatatacatacatacatacatacatacatatatatatatatatatatatatatatatatatattaactccctctctctctaacctaatggcgccatgagctacagttggacatagctagcttattaggcagattgtccagtgtcgtacttaccgagctgtctcacatgtacagtgcccacacgcagaagcatcccatggtgcaatgctaacaccaagctgtacgtgccatgcacacttctgatttgtccatgcatgcatggtcactcttatcatcatatcggttccatccattcattggccctcgatccatatcgatctatcatcgcatgcatgcaagcgctcctactaggtaggtatggtactccagtaataactccactctggatcgatatgatcgattgatcgtcgtcagacaccacacccaccaactacacatacacacatccttctcgagccttgaacaagctatccatcacctttcacttttatataaaggcaaacaaaaagcgatgatcttttaggtgagaatttactgtgtgtttgctatcacattattgtgtacgacatatgcaagaaatgtatggaaaaaatatattatatatatatgatgtggcttcagggctagtagctattttttccctgcaggtagatctcattaaaaaagaaactactagctagtgttgtccatgtttgccaacattgttggaattttttttttaaaatggaattagtaagcttagttggttaatttcaatatgcaaccatccgtgcatgcataaagaaatttgtgtagtctgcatctaagctggagatactattactacaaatactgcatctatgtttgaatgcatccaagtcttaaaaaaagaaaaagaatgttcaccacatgtcatcacaaaaatgcttgatatatacctagacccgtatcaggttcagtcaggtgacgaactaaaactctataagcaagaatatatagcagttaacaaagctctttaccgatagctacatttttgaagaaaaaatgtctggtgtgattactggacagcgatggacacgtatgtaaagcggttgcatgcattagtcaatgctagtcatgcatgtccgtcttacaagcacagcgcagcacgcgtacgtacgtacgcacgtaggatcgatcgagcaagcggctggtaagtgtagtgacataggccaggtgcagtaaaatgcatggcagacagggcgatgtgcaatgatcagtacaacacaacacacggccaggccggccggccattaatattttgcttctcatctctcttgctcctttttctttttcttttggctcgtcgtcctctagcgtttgtactggagacagtgtctgcgcccgcgaaagaaggatcaaaaaaattatacatatatatatatccaccagagaaaacaacaacaaaacgtaaaaaggaaattaaaggcaatgcagcatgcatgagatgagaaaaaaaaaagagcaaaagtccggaaagccatcggaaaagaaagaaagaaagagagagagcggccggtgctcgctttagggagcagcaaaagcccaacgggcgtcaccgatcgatcgaccgatcggccgctctgcagcagcgagcgttgcatctcgcatgcactttgcagagaggaagctagaggtagacgacgacgcgcgaggcatgcagcgaagcgaggagagcaagcgctgcaagcgggcgagagcgagtgatggagacgtgtgagaggagagaggcctctcctctgctgcaggtgcacgcatgccgtttgcgtccatccagtccacgacaagggaatatcgtcgtcgatgcagcagcagcaccagccgccctttgtttatttaccaccataccttgctacacatccactttactagtttcatatacacattgtagagggagaaagtaagagacagagagaaggtgttgtatatatactcctacctcacacattctcattctctctacataggagtatatatctgtcgtcgatcttctaaaactagtacgcacattctatctgtatgtcgctccgatgttcatcagaaagttgttaaaataatcaaagcatgtttgttgcaggatcattgtcttgaagggatcaaacgtacgcagatgtgattaaactattgcccgaatctctctgacccctttttcttcggacatcaccgatctggccgtaataaacaggctattccctgtttaactatctatccacggtctccaatgcaaatttgcagccaggaggaggatcggaatggaagcggcacttgcagtaaaaaaattgaggcatcgaaagaataggtcgcggtacgtacggccaggatcgtccgtagctgggatgagaattaccagcagataatatgtgttggttctttgttcggagcgagtaaaaaattagtggtaacatttaagccataggtaggaagcaaatcaagagagacatcgcacagtggattctgacatgactgtgcattcaggcgtgattactttaaggccagcacaggataaggctgctgatatcttcactgagacagcgagattagataactgctgccaggtgagctccattggtgttacttaagccagcttcaacatgattcgagcatggagagtttgggccttttattttgtgtgtggaaaggagagtgtgggcatgcatgtgtcaagatgggtggataaattggtacaaatggttgagcatatatatattatcaccttgagaagtgttacaccttagttacaaaatttataccctcataacctcacaatatctgcgccttattggaaaatgttacacatttatcattatttatataatacactgttggaatattgtcggttcttctttaaatgttattttacagacaagagaaacaaaattttgatcaaaaagagcatctgcgcccctttcaacattcataaaaagatggcaaatttacgggataggtaatcagagtgcttgggtggtgctcagttctatatatatatatcggtctgtactggctgcattttgatgaaagctttgataaataacatctctgtttgttctaaatcagcatacacatcgtttcatgcgatcgaaacatataattggcactctggtcaatgtagatgcgttgtactggagcacatattcgatgatttgcaaagtccgaattttcaataaattgcaaatattcgataaaaggacgcatgagttgcgtcaattactcaaaaattcacaaggttcaaactggaaacagcagcagtcagcagtgcgctcctaaagaaagcaaattcaaccggggactttctgcgcccaagactcccaacactccccacgcataattcacaccaagacaccggcccatggctcatggcacgcacagttgtcgccgctggatcttactgtgcatctcaccttaccctacatgcgtagtactccccttgacgatctacctatatttacacataaacgcaggacctaggagagggctagaaccaaacggaaccagaacccacagggccactacggcaaaagcacggaggagtagggggtatgtaggacactcctccgggcagcgtacatcatctgggtgttccgatgataggagcagtgtttaggagaaaagcgctctgctgctgcatgcaggctgcagcaggcactagccaagccaagagagaagaagaaaaaggcgacaggggagacagacagggcgcaatcatgccgacccccccaaaacacgactcgattccaacctacacaaacggcacaaccacaaacgtccacgcccagtttccttggactctctcctatgctcctatgcatcctactactcgctttctcgctcacctgcacgcctctctctctttcttggaaaacgtgacacattctctcctctcctctcctactcccagattctctctcatggggggatggagtgagtgagcgagtagttttttctaccagccccataacatcgcaccatcgcataatggaagagagaattgaaacaagttgcagcacgaccacaagacgacaatctgccccaagacaaaaacttgctgcttataaataggcacatgcccactacactaccaccaccactactaccccccctcaaacaacagaacccccaccaccaaagcacatacggcaaagtagccagacaaacggaaactcaaagagaggagagagtgagttcctttgatcatacagttgtttttggccaatcatcgtccgaggagagatggggatgcagagcaacgacggcgccgtcatgttctcctccatcgcgctgctgcagcagaggttcagggagctggagaggatcaaggaggagcgggaggagaggctcatccagatgctccctccccgctccgaccgctcccacagtggcgctgcggccgtcgtcgtagccacggctgctccgagggaagtgccggtgaaatggttcttccatccggagctgttgtatccatgcaggcctctgcgtgacatggctgctgctaccttacttccggtcatgccggccaccatcgactgtgaattcaaaaccttccagctccgtggtgactcgctcgccgtggacctgtggcctagtaaggcctacaagcatgtatccagtgaagttgatgtcgacacctcactgcacctctagattactactactgctactaaaattgctatcctaagctgttaaccttccaagtatccaccagtgttgctgctctagttgtttttggtagcctagtatgtttctcttcttctttggttttgtaacaaggggcaggagggtggtgagttgtaattattgccagtagtaagattgtgctggttgtttccctgttaccttgtcgccgctgaattgccagcatcttccaattgggcactgttatcgtctgagtagtagagtagctctgcagggcaaccattttctgatgtatcagtacactcctcatcatcgctatcggaagaatcaccagggttctgtttcttccgtttgatgatctttttcgaaatcatccggttaacacccttgctgtcaacatctacacattcgctgctaattggcttgaaacggactttgccaacctttcttgcattagcctctagtatctgcaagggaggccagagatttagaaaaggtgacaaaaattatactccctccgtccctaaatatttgacgtcgttgacttttttaaacatatttgaccgttcgtcttattcaaaaaatttaagtaattattaattattttcctatcatttgattcattgttaaatatacttttatgtatacatatagttttacatatttcatataagtttttgaataaaacgaacggttaaacatgtttaaaaaagtcaacagcgtcgaatatttagggacggagggagtaattagtaagcagaacatgatgcaagttaaagcacaactgaggaagcttcagattcctaagaaggattgctaactgcaccaaaaaaaaaagatctggagacaactaaatcaaagttctgtacaaaacgtcaatgaaaagtgttgtgattattctgctaccagctcttttttcttgagttatttattagaaaataaaaaaatatttaagtaatacgatcttgagcaagataattgtactactttatatccctgcataaatagaatatttaaaatccactttccctagtaaggaaatggtaagggtgaaaaaaaatatggcaagcataattgggcaactactcttgtggtaaacaatgtttactaaacatgtgaaaaatatgcaagctttggaacttagtccagcctgactagagatcaagtatgttggtatgtttcctttttttttcctgaagacaaatatacattatacatggatttgccttcatacagttttagtaattcaactgttttattatattgttatctagagaacataagtgtaataggtaaaaaaaaacaaacaagaagttagttgtttcctagaaccatgttacttttcatattacccttttcatttgatagttgacaccttacatcatgtgttatgcttaaaattatagaatatggatatatgaaaatagtattatactttataaattcgagtgatctaaagttggaaaaataataattgtaagtcacagctcagggactgtaaaaaaaaaagcaaaataaaaaaagagagaaagaaatgagtactggaaaaaaacagctttattgtgggctatgtacacagaataggcatgaacacaataaatatcttccaactgaaaagaaagtggtgacataacccaataaatacaaccttgaataaaagctaaataaatcaactgaagtaaacgttctcacagggtttttggaaacctgaactaggtcagacagcagaaggggcactggttaaaattcacacaaaaatcatcaaatccagctacctttcttttttctcaactttttttttctcaattttccatgttttccccggatttgaccctaagcatataaagcatatgcaactacaagtctattgatatgtaagatgagtttgaagaaactattattttggacatggtgaaccaaaataggggtaccaaaagcagacatggtgattgagcagtatggtccattttttatatatatggtggataaataattcaaaaggtgcaatgagtttgacaaattttccattttcatgaactctaaactctagccagatttggtaagcagagattgtaggctgatggccaagtgggattggttaggccagccaggtatagttgcatgatgtgccaagattattttacagtgcatagcacgagggaacctatgacaaggacatggtccatgggttgctaaaattatggatcaaagaagaaaggtaatctgtaggtcactagttatttagcaaattgcattaaacagacaaatatcatgagattgacaactaccctacaaagccccacattctcatgccttcactccaaatgacagctctcggcagcagccccctcttcagccacagctccccctgctgtctcatccttcctccacccctgactttaggatacggtggagaacatccagagggagacatcttggacgatgtcccatgtgggatgaacttcacaactgtattcataaggggatcctagtgtggtcttgaagaaccaaaccacggaacaataacttaagtccatgccccaaaacctgtttgccacgagacaccacgacccttgcactgggataaggaaccaaagaggccagtgtatggatccgagctgacacaaaggaaacaaggtttgaccttcagctggtccttgatgattcaggtcacgccaccttgctgatgtagttttgaaattccgccgtaagcagaacattgtctgagactgttcacctatggcctttgtactccctgtgtacttccaaatttttctaaagttatgtatagtgagtgtgtgttttggaggtaagaccaccatgaaggtctaagtgctctggttccaaaagttcaggagtaaagatatccaattgtgcagttcatgaggttcagtcaaaacctgaaacttaccccaaccttgaggtggtaatattgattattccattgcctttattaatgctatgttcaggttaataactgaagtactgaactcatattaactattttcaaataaagcaaaaaaatgaaaaacaaattatcagaacacataactgaacatttcatcctatgtagaaatagaaaggtatttaaaaggcaaagtagtacaaatagaacgtgaacaaaatggaaatgaatcaccaaaggaagttttggacatgacacaaataacataagccaattttgttggatgacatttgtgcatccaaatgcattagaaaccattccgggcttggaaaaaaatcactaaaaaaatatagatgcaggagatgttcatctctgcttacaaaaaaaaaagttataaaatgtatcctacatgatgaaatgatatgaacaaccaaagtagctaggaacatcaacccgagttcctattttggttgttttctaaagtctggtgtgaagttagaaaacgtcttatgtatgtatatgggctggagtgtgtgtgtgtgtgtgtgtttggtgttgtatcccgtatgttcttctttaacaaaatgacaagcagttctcctgcgttcgagaaaaaaattgtaccctacaattttttttttttaaaaataaaggccatttctagaaagtagctctagatctgtttattgctctttgttttcctgatatgcagaataaaacatctagggtaatgttggc

SEQ ID NO: 4551 - DNA, 2645 bp, Oryza sativa
aacaggacccaaagttttgctataataagcaatagggtgaccctgctgacttaaaacaacaccaagaccataagcacatgcatcagtctccaaagtaaaaggaagctgaaaattgggcaaagctaacactggagtgttactcatagttgtcttcaactgatcaaaagcaagctgagcagcatcagtccaaagaaaggcattcttcttcaacaagagtgtcaatggtcgtgttatgatactataaccctgaacaaattttctgtaatagcctgtcagtcccaaaaatcccctcaattcagtaacagaagtaggcacaggccaagccagcattgctgctgtcttctcaggatcagtactaactcctttgtcagaaatgatatgtcctaagtattctagttgagtgcaagcaaaagagcatttagacctcttagcaaacaactggtgctgcctcaaaataacaaaaacttgctaaagatgatgcaaatgactatcaaggtcagggctataaactaagatatcatccataaacaccaacacaaacttcctgataaatggtgcaaagactgagttcataaggcactgaaaggtggagggtgcattcgtgagaccaaatggcataaccctaaactgaaattgcccatgatgtgtcttaaaggctgtcttggcttcatcagtttccaccattcgaatttgatgatacccagctttcaagtccagtttagagaagaatttagtgcctgagagctcatccaataattcatcaacaaccagcataggaaacttacttttaatggtgagagcatttaatcttctgtaatccacacaaaaacgccaacaaccatcctttttcttgacaagtaaaacaggtgatgcatagggactcatactaggtgtaattaaaccagcatcaatcatttcgttcacctgtttctcaatctcgtctttttgtaatggataatagcgataaggtctgcagttgacaggaatagcatcaggtactagagaaatagcatgatcaaaaaccctgtgtgggggaagacacttaggatcgtgaaagacatcgtcaaagtcagttaacaattgttgcactgaagaaggaatcacatgctggacatcatcctgggaatgttccaacaaagcagcagtccatatttcacaacccttatgccatttcaaaagttgtggcagagtgacagcagcaatttcagaagggactgcagcatcttgtactccttgaagagaaatccaagacccttgatactgaaacttgagtgttttattagcccaatgacaagacatttccccccattgctcaagccagtccctacctaagatggcatcgtgaccccccaaagtgaccaccctcatgtcataagtaaatgtgtgcccctgaatccaccaagaaaaaccaggaaccacatactgacaaggtaagcaatcaccattagcaactttcaccagagtagaaggaattggttttagaggtaaacccagcatctgtgcaaagttgtaatcaataaagctgtgagagctgccagaatccaccaaaagtaacaagactttactgtgaaccaatgctctcaaatgaatagcagtaggaaggtgagctcctgtcaatgcattcagagaaatatgacagtcctcctcatcatcagattgttctgcagcaataacaacatccaatatgtcatcagtgagcacctcttccaactgcatagctttgatttggcctccaacagcacaacgatgttcaggagtatatttgtcaccacacttaaaacaaagaccctgagcacgtcgatagtctttcaactgcttagccttccatagatcctctttatctactcgacctggagcagtatcagaactgatatcactcttgtactgaggaagtttcacaaatttccctttgagagctttggtagctctactagccaagacagattcctgcataagagcaatagcagatgcttgctgtacagtgtcaggcaattgaacaacaacagcagctcgaatttcttcagtaagaccattcataaaacgagtcactaacattttatgttaccccccacagatggatcaaacactctgatctgatagacaagagaatcaaattgttgtttatactcagtcattgtaccagtttgagtcagagtatctagtgcagacattttctcacgttccacaacaccctcaaattctgtttcgactgccattctaaactgatcccaagagttaacctcattcactaacttataagaatgataccattgagccacatttcccgacatatgaaacacagcagcagagactttgaaattttgagtgatttggtacatgtcaaaataagtctcacacatatccaaccaaatccgcacatcagaaccatcgaaacgaggaaaatccattttaggaagtggctgatgacgccgataaatcccatcaccaaaaccacgacccaaatcaaccccatccaacacaggaggaacaggtggattcaacggcggaggagtcgcggaacctgcaccttgccgacggaatccatggcgagatccaccttggtagtcaccttctcgagactgccaccttgggaatccagccgctgatcaatctcgtgcatccactttgtgatgccttccaacttc

SEQ ID NO: 4552 - DNA, 14498 bp, Oryza sativa
atttccaaccgaaattagccgagattccataagagaaaagatagagtggatcgcggggatcatttcccctctatcgattcggccggagatggaaaggagcgacggaatttgaaaggccgccgtcggcttgcgcgtggctagggcacggctgcgacggcgcgaggttgacgacgaccctgacaagtggggcccacctgtcagcgggagagagagagaggagagcggcggctcggttgcgggccggcttgggccgaggagagagagaaaaagagagaggatttgggccgactttcggcccaaagccaaaagagacttttaaaaacctttttcaatttaaattattcatgaaatgcaatttcatttattaaaaatacttccttggctcaaataaatcccagaaaaatctaggaactatagaatcaagcaaagtatttaatgaaattttatctggccccattttatattgggatttattaattaaaattagatcttctcttctaggcttttaagatcatttctaataattcccttttagacaacaatttataaattaaggatttttaaaccagaaaagcacttaatataattataattagatcattaatgattaaataattactgaactgttctttgtatcatttaggaattgagctccgaaaaatccgagaaaatttcagagagtataattaatcatggagaatttaatgaaaattaaatccatccatgctttaaatttaggaaattttatttcccacatttgacttcacttgtaaattaaagaatatttaatataaattctattaataatttattagataatttataaatcctgaaacgaaaatgaggatgtgacattgatcctatttaaagctattgtttctattcaactattgcatttatttttgaatgtcaccgggtgggaacgacctatttcctttgttatagccctttgttattgattacctatactttgtcacctggttaataattggattagctagaacattatatggttttagctaaagtaattaggatgcttagccatgcttagagacactagctcatatgaatgggataactaatgattcactactacttaatgatggattaatggtagctcatgaaggtcaatcatgataggatgattaattaagatgccaactaaaacatggtaaaggtgggttgtgagcacatggttttgatggtcgtgctcatgacaattaaggaccggttcacgattttcagttgtgaaacattaaccgtgccaaccacaagccagcgtgggcaacggctttacattttgtatagtgtggttcattgtgggcaccagactgagaagtggcagagataagcccacgggggtcgctggggagtccatgccttgttttataagagggtgattatgatccaggaatggtgcactgctttgaattgtgttatgcggagggtattgtcacaatctctattcgggtacttgttaagtatcgcgacgcatggttgacatgatgttgaggttgtgtcttgtgggtacagtggtacacctctagccagagtaaaactattcgaatagccgtgcccgcggttatgggtgggtctaacaatgtctttcatgattagtctcacacctctcaccataatatatgatgttgtaattgattataacttgtttagctcctggtttggaatggtatattcctggtttggagatagaactgtgtagccaggaatggttgttcagaaagtttgggcctatgcaacgggtatgctctatagcgttggattaatattgtttaattaaatactttactgtttttttaaattcaaaagtatttattgaatgccatttatgcaaatgagactattatgccatcctttgttatccctgcacttgcatatttgctgcatggcttgttgagtatgtcagatactcaccttgcaatcattcattagaggaggagttctacagtgatgctgaaggtgtggaggattaggcgtagccctggtcaagctgcttgtgggatggagtcgcctgtgctctttattttattttccgctgcttagatctttattgtttgagaggaactatctacctctgtaatgactttatattcgcctattaattagagtaataattgcactctattatcaatttgttattgtgtgcctcagctgatttctggacgaggatttacacacatgtaagcgtttggagttttggatagaaattccgggcgtgacaagttggtatcagagcctccttgaccctaggttatgccaaatggttacctatagaagccctctaaaaatattgaaaaagtagaacggttctcctctctttctcttttaattaaaccaagctaatggcacatgcagattatagtctctttaattgttctcattcaaaatttacttattattcctgtgttgttagtactgtacatctattactgtactaatgggccatttaccagcaaaagttttacaatgttacttttatttaatcatgttgcaatataatgaacttagcatgttgattttataactctcttttattttatttcttttgaaacctgttattcaaaagtgcaaaaatttgtgatcctgttttcaactgtttcaacttatcttgcaagattagtttactttatttacctttcactttgattttctaactttattcaatttaattcaaaaacttgtgctattaattggataaatgtcttaactccctcctttctcttgtccttagatgccgcgcttcaagcctgagtacttgttcggtgttgagggatttgtccaggagctgcgtacgatgtcctttaccataggattcgggactgcccctttgtatgcccagattcctcatgatcgtgataaagagaagtgctgtgtcaaggtcaccttgaatagtgatcgtgaagacctcccatcggtgatcttcgaggctggagggggaagctatcctcatgcttgtcaggaggtggcaaggatcgccataggagagctctggaccgttacaatgatctgttggccgacactgagtatcgctaccatcctcatcagccccagggaagggaccgtgccagctatgttgaccctgaaggaattgagaatgatgctagcacaagacatttggtcgagatgctgtgggccatggatgagtcccacgctgaagtcgtgtcagctactcaagctcgtgaagaccggaaccatggtaagatctacaagctggaggacaaggttgatcgtctggagaaggaactgaccgaattgaagggagaagcgccaccacagaaggccagggttcgtcttaccgcaaggaagagagctctttttattccccgctaccagttggtgcccaagattcgtgtggtggcaagagaagctgtcccaatcccagtggatcctcgggtcgttaatttaagtgatgatgagaaagaagattcagagcgcacccattcaaaggttgagtggggtgttacttaagatgatgaggacgagccgaacgagctttcaatcaactccgatgccaggaagacctagacgtcttgttgagtcgttgccttagcgcgttgtgttagtttgcttgtttaagtttggttgtgtgtgtgggtcttgcatgtggtttacatcattggtgggatgtaaatgcatgaatttgtttgctttcaagtgttaggaagtttgagttaagtggtgtgggagtcttcagttttatgtaataatgaaactaagttcagattaataaaagtcaagttagtagaaattaattccctgtcgtaagtagttttcccccttcttgttctcttgcctatgccagatggtgaacacttgcagcaatggaaatgggcccaacaacaacaacaacaacaacaaatgagagattcccacgcttgcccaagtcctagctcaacaggcccaactcatgaacatgatgatgcaacaactccagaaccaacagaactaggggaacaatcacgctcctccccagaacaagttagcagaatttcttcgtgtgaggccgcccactttttccagcactaccaatccggttgaggctggtgattggctgcacgtcatagaaaagaagctggacctgcttcagggcactaaccaagaaaaagtctcctttgcttcacatcagcttcatggccctgcctctaagtggtgggatcacttccgtctcaacagggctactgctgaaccaatcacttggcttgagttcactgccgctttcaggaagactcacgtaccatcgagagtggtgtctctcaagaagaaggagttcagggcgctcactcagggatcccgttctgtcaccaagtacatgcatgaattcaatcgtctggcccgttatgctccggaggatgtgtgcacagatgaagagcgtcaagagaagttcttggaaggactgaatgatgagctttcttaccctctgatgactagggattattctgatttccagaagttggtggataaggccattcgccaggaggataagtacaaccgaatggaacagaagaaacgcaggattgctcacttcaaagctcagcagaggaatagtcagaggtcgcgtctcactatgggacctcaggcagtgtcacagggaggatcttcgtctgttgttcgtccacagcgtcagttcttcaacaacaatgctggcaataacaaccgcaaccaagctccacgccctgttgcaactccagtccagcaccagcctgtcaagagggagcaaggaaacaagccaggggtgtgcttcaactgtggtgaagcaggtcattattctgacaagtgtccgaagcctcgacgtgtgaagattgttcctgtgcagaataactccaatgcaccaacgtcaaaggctcgtgtcaatcatgttgctgctgcagaagcccaaggtgctccagatgtgattttgggtatgtttcctgttaactcagttcctgcaacagtgcttttcgattctggtgctacacattcttttttgtctatgagttttgcgggaaatcatgggatggagatggaagatcttagacgtcctttgatggttagtaccctagtaaccaaggactctcatcacaacgtagcccttctgtcagaatagagattcaaggtgttccatttctggccaactttattttgttagaatccaaagaccttgatgtcatcctagggatggactggttagctagatacaaaggtgtgatagactgtgacaatagtaaagtaactctcaccagcaatgatggtcaagttgtaactgttcatgcattgcctactgaacctttaaggtcaagtttgaaccaaataacattggaagagattcccatagtacgggactacccagatgtgttcccggatgatttacctggtatgccgcctaagagagatatataattcagaatagatctggtaccagggacaaccccgatccataagagaccttatagaatggcagccaatgaattagcagagggggatcaagagacaagtagatgatttgcttcagaaaggatacattagaccaagttcatctccatggggagctccagttatttttgtggagaagaaagatcatacccagaggatgtgtgtggattatcgtgcactgaataatgtgaccatcaagaataagtacccaatgcctagaattgatgatttgtttgatcagcttaaaggtgccaccgttttctccaagatcgatcttcgatcaggatatcaccagttgaggattaaagaggaagatatacctaagacggcttttaccactcagtatgggttatttgaatgtattgtcatgtctttcagacttaccaatgcccctgctttcttcatgaacttgatgaataaggtgtttatggaatacctggataagttcgtggtggtctttattgatgacattcttatctactcccgaaccaaagaagagcatgaagaacatcttcgtcttgcactagagaagctacgagaacatcagctttttgccaagtttagcaaatatgaattttggttgtctgaagtaaagtttcttgggcacgtcatctcagccagaggagttgccgtcgaccctagtaatgtggaatccgtaactaattggaaacaaccgaatacagtttcagagattcgtagtttcctgggtcttgcaggctattaccggaggttcatagagaatttttccaagattgctaagcacatgacacgcctgcttcagaaagacgtgaagtacaagtggtcaaaagaatgtgagcagagctttcaagagttgaaaaatcgcttaatatcagcacccattttgattttgccggatccaaagatgggtttccaagtgtattgcgatgcatctaagcttgggttaggttgtgttctgatgtaagatgggaaggtggttgcctacgcatctcgtcagttatgtccccatgagaagaattaccctacccatgatcttgagttagctgcagtggttcatgccttgaagatttggcgtcactatctctttggtactcatacggaggtgtacacggatcacaagagtttgaagtatatcttcacccagccagatttgaatatgagacagcgaatatggttggaattaattaaggattatgacatgggaattcattatcacccgggaaaggctaatgttgtagcagatgctctcagcaggaaaggcaattgcaatgctacggaaggacgacagttgccatgggagttatgcaaggaatttgaaagactgaatttgggaattgtcagtagaggttttgttgcagctttagaagcgaagtccacactcattgattagtgattaggttagagaagctcaaaccaatgatcctgatatccaagaaatcaagaagaatatgagaagaggaaaggctatcggttatttggaagatgagcaaggaactatgtcacatcctgattttcgtcttaggatttataaattatttaataaattattattagaatttatattaaatgttcactaatttacaagtgaagttaaatgtgggaaataaaatttcctaaatataaatcatggatggatttaatttttatttaattctccatggttaattatactctctggaattttctcggatttttcggagctcaattcctaattttaattatacaaagagcagttcagcaattatttaaataataaattaatccttaaatggtctgattataatcttgttaagtactttgagtgtccaattagtttcaggatttttcctgaaattatttgagcattggaagtatttttaacaattcaaagatcattttggtgattgatttatttggaaaagtaataaaaatcctcctcctcagcttgggcccttttcggcccattccttcctcccttctctctgttcctcagcccagcgtaaagtctaatccttctccctctcgctacagtgcttctcctacctccagccggctggacagaggtcgtgttcatcccgataccggcgccaatctccgccgaacccggtcgcttcgttgcttcccttccaaaattgattgcaaaaacggattcctctctatctcctctatcttatccacaagaaacctccatcaaattcgttaactatctcacgaattttggtcgtttttattcgggtgaactcgagataaatcctaatttccttcaccaaatccatctgttcccgaggcggtctctccctcttcctgctataaatagcatcccctcggcctcctcttcggtttccctctgtttcccgaagttttccctagccctagccgcctccccacgctcgtcttctctctccgtcgccggcagtcgctccagccgccgtttgccgtctcctcggccgtcgccctcctgcaccgccacctccctcggctccgcaaggtcgagctctaccccgtccactggttcccctccgcctaatcccgccggaagccgctgtcaccgtgaaggctgagttcgccacccctgtttgatctccggccgagcctcctcgctattgcggtcgtcacccgttcaccccaaggacgtcgtcggcatcgcagcgccaagctgaagcccgtccacccgtccgttgccgccactcgtcgccggaaagccgtcgccatcgtcaacccaaggtcgccgcccttcggagctcgtcgccggccatctccctcgccgtctgtcgtcgcgtaagtggtggtaagggtcgccttgatctcctctctctcccggtgccctccatttgcatcatcgtaccgtggttcgctggtaaccgccgttcccgtgctcaccggcgtcgatcccgcgtggcagccatgtcatcgctgacatcagcgccatcttggccatcaaaatcaatataaatcctgttatccctttgcaatggcatattagttctttttactatatgtcgtctactaaattcattccaataatttccggaggatgctttagtcttttatctcagatataaattatttgtaaattgtttaattaatttggaatagtattttctttaataggctttaattggaattaatcttgtaaaattcataactaatccatatgaagtcggaattaagtggttcaagtctctaaattcatctaaaattatgatatacatgtttgttttctttttatgtacggtttatttggtttttattagtctttttctttgttttgtgtgttagcttgtcgtttccgttgttgcgaaggttcgtgagtgcgtcggaagtgttcaagaagactaattgaagaccgattattgcaaggcaagtcacacagatcccaaacaaccctttaagcatgttgaacccgtttaaagctaatgttttatgtcaacttatgcattattttcgaatggcatcgggtggtgagcctttcccaattaattaatggccgaagatgactttattttcctatgggttatactttgattagctagaaccttatatattggtttggttcagctaaatgctatatatatatatataattgcttagccatgcttagaaacattagctcataaatgggatgaatcacactacattattatttatgattatatttaatggtagctcacgatggttaattgtgttatgataattaattgataattaaaacctgattaatggtgggttgtgagcacatggttttgaaggtcatgctcttgacaattaagaaccggttcatgagctactgttgtgagacattaaccgtgccaaccacaatccagcgtgggcaacgactttaccttttgtatagcatggttcattgcagggcaccagactgagaagtggcgagaagtccgtggggttcgctggggtgtccatgcctctgttttttttgagggggtgattatgatccaggaatggtgcactgtggtgagttgtgttgtgcgaggggtactgtcacagttcctttccgagataccgtggtggcattgaggcgcatggtaacatgtcgtggagctgtgtcttgtgggtacagtggaacacctctggccagagtaaaactattcgaatagccgtgcccgcggttatgggcgggttaagcaatgtttttcgtgattagtctcatacctctcacaataattattgatgctataattggtaataatttgcttaactcctggtttggagttagatctgtatagccgggtatggttgttcaggatagttgggcctgtgcagcattggggtgctgtgcagtgttggttaaaattgatgattaattactctactgttttactactcttaaatgtttgctaaatgctgcttttgcaaatgagcctatgttatgccatcctttggtacccttgtgcacttgcatatttgctgtgtggcttgttgagtatgtcatatgctcaccttgcaataatcaatcaacctcagttgaagaaaaaggatccgaaggagaagacatttggcttataccccagttgagctgcctgtgggagtggagctgaagccatcgctagaccgttattccgctgctgtttttcttttggtttgtaagtatgtaacgttattattatgatggatttgtatattaaattgtcagtttatgtacctcggctgattcctggacgaggattctatgcacaaattagttcagaaattattagtaaatttctaggcgtgacaactgtatggttgggtgagagaatttgtgtcccagacaacaaggagttgaagggtacagtcctgaaggaagctcatgacactttatactccattcaccctggtagtaccaagatgtaccaagatctcatggagaaattttggtgggcgagtaggaagcgtgagatagcggagtatgtagctgtgtgtgatgtatgtcagcgagtcaaggcagaacatcagaaacccgcaggtttgctgcagcctttaaagataccagaatggaagtgggaggaaattgggatggatttcatcactggtctgcccagaatgtcatctggccatgattctatttgggtgatagtcgacaggcttacaaaagttgctcattgcatccctgtgaggacaacatattccggaaatcgtttggcagaattgtatatggcaaggattgtgtgtttgcatggtgttcctaagaaaatagtatccgatcaagcgagccagtttacttcaaagttctggaagaagcttcttgaagagatggcttctaagctgaatttcagtacctcatatcatccgcaaacagacggacaaactgaaagggtaaatcagattttggaagacatgttgagagcttgtgttttagacttcgatggaagttgttataagaatttgccttacgcagaattctcgtacaacaacagttaccaagctagtcttcaaatggctccttatgaagcactgtatggtcggaagtgccgcactccacttttgtgggatcaaacgggagaacgtcaggtttacgggactgatattctgagggaagcagaagagaaggtaaagatcattcaagaaagattacgtatagcccagtgtcgtcataagagatatgctgacaatcgccgcagggatctaagttttgagaaaggagatcatgtgtaccttcgtgtcacgcctcttcggggagtttatcgttttcacaccaaagggaaattggcaccgcgttttgtgggaccatataagattgtcagtagaagaggtgaggtcgcctatcagttggagttacctcaatccttggcaggtgttcataatgtgttccatgtgtcacagctaaaatagtgtttgagggtacccactgaagaagctaatcctgagcagatagaaatccaggaggatctgacttatgttgagaaaccaatccgtatcttggagacagatgagagaagaaccaggaatcgagttatccgtttctgcaaggtccaatggagcaatcactcggaagaagaagctacctgggaacgagaagatgaattaaagtcagctcatccgcatctcttcgccagctcttccgaatctcaaggacgagattctgtttaagggggtaggtttgtcacacactaaaaatcccaaatttataaattgttgtttaaatggaattgttagaaatgattttaaaagcctagaagaaaagatctaattttaagtaataaattccaatataaaagtgggtaaatttttattaaatacttcccttgattctacagttcctagatttttcggggatttatttgagccaagaaagtatttttaataaatagaattgcatttcatgaataatttataaggaaaaaggtttaaaaatccttcttttggttttgggccgaaagtcagcccaagtctctctctctctctcaccggcctatgcgcgcccggctcaagccggcccagttcgcccctctctccctcctctctctcccgctgacaggtggggcccacctgttagggtcgtcttccacctcccgccgccagccgcgccctagctgcgcgcaagccgccgccccttccagattcggtcgcatcttttccgattcgatcaaattgatagaggggaaatgatccctttgatctcctctatcttttcccctatagaaactttagctaatttcgtttcgaaatcgtcggattcgacctcgattcggatttgatttcttccctccaaccctaaaccttccattgctgctgttggtcgctgtgggcctagccgccgcctcttagccactataaaaggatccccaggacgtcctctgttcgccgccaccttcgccctagcccgccgtcgtttgtagcgccgcttccgcgtcagcccgtgcgccgccgtcgtcgccgcaagtgcagtcgtgcggcaccgccgctcttgtcatcatcgtcgctcgggaaggtcgccatcgggttcgccaagtcgtagccgtcctcgtcccgtcctccgtttccgccaaaggtcaccggagcaccgccgtcgccgtcgacccgaacgtcttcgccgcctcgacctcgccgccgtcgctgtcggttgtcgtccgtcatcgtcagagccctcggtgagttcgccgcgtcgccctctacccgtaggtgttgtccgtttgcgccgccgcgccgtcgttcgccggcgagcatgaggtgccgagccgccgtcggcaatgacgtcatcatcgacgtcagcaccacgtcagccgtagacccgtggtagatcggttagatcttggccgttcgttttgtttagattagatctcagccgttcgttccgtagaccgcttctgtgcacccggtccaccgtgaacccgagccccgctgacgcaataaatcctttttccttttcaaaaataattctttattgcgtcataatcgaattaaaatctatataaatgatttaatccgatttaatctttaaaaattaataactaattcatcttagctcagatttagttggttcaagtctctcaatttttctaaaattgggatctacatgttaaaaatatccacatgtgctgtttatgattgtttatgtactgtttggtgattttgctcttttatgcttagattccgacgttcccggagagtccggttttgcaggagaagactgaagaattccaaggccagcaaggcaagtcacacagatcccaaacaaccctttgagcatgttgatcaagtttaaagctattgtttctattcaactattgtatttatttttgaatgtcaccgggtgggaacgacctatttcctttgttatagccctttgttattgattacctatactttgtcacctggttaataattggattagctaatgattcactattacttaatgatggattaatggtagctcacgatggtcaatcatgataggatgattaattaagaggccaactaaaacatggtaaaggtgggttgtgagcacatggttttgatggtcgtgctcatgacaattaagggccggttcacgatttttggttgtgaaacattaaccgtgccaaccacaagccaacgtgggcaacggctttaccttttgtatagtgtggttcattgtggggcaccagactgagaagtggcggagataagcccacgggggtcgctggggaatccatgccttgttttataagggggtgattatgatccagaaatggtgcactgctttgaattgtgttatgcggagggtattgtcacaatctctattcgggtacttgttaagtatcgcgacgcatggttgacatgatgttgaggttgtgtcttgtgggtaaagtggtacacctctggccagagtaaaactattcgaatagccgtgcccgtggttatgggcgggtctaacaatgtctttcgtgattagtctcgcacctctcaccataataaatgatgctgtaattgataataacttgtttatctcctggtttggaatggtatattcctggtttggagatagaactgtgcagccgggaatggttgttcagaaaggttgggcctatgcaacgggtatgctgtatagcgttggattaatattgtttaattaaatactttactgtttttctaaattctgaagtatttattgaatgccatttatgcaaatgagactattatgccatcctttgttatcccctgcacttgcatatttgctgatggcttgttgagtatgtcatatactcaccttgcaatcattcatcagaggaggagttctacagtgatgctgaaggtgtggaggattaggcgtagccctggtcaagctgcttatgggatggagtcacctgcgctctttattttattttccgctgcttagatctttattgattgagaggaactatctacctctgtaatgactttatattcgcctattaattagagtaataattgcactctattatcaatttgttattgtgtgtctcggctgattcctggatgagggtttacacacatgtaggcgtttggagttttggatagaaattccgggcgtgacacaccaagtcttagatcggctatatttgtttgacatctaactgtcttcaaatttctcatttgtaggccttagccgatctattttcttttgatatcaaagattactttgatgagacagaaga

SEQ ID NO: 4553 - DNA, 2312 bp, Oryza sativa
agttcttaatgttcgtatggtgtaaattgggaaattgtaccataataagcctaaggcaacacattatcttcaagtttatggcctgaagtgagttttacacctgtggaattgtttttttaatcatccagatacactgtaaatcactttaagatcagccccatgtttgttaagtgttaacgaactcctgaagcaacctgaaaagaattagtgactagttaggtgtggtcatgtaacactacgccaccgcgaaactcgccgccgacgagagagagagatatttagacgagatcggagttggggacgaagagaaacagagctgaggcagaggagagacagagtttggagagagatagattcgatttcttttgccaggttggccacagccattctctctctcgagtatttatctcctgattacatgggccgttggcccaaacgatttaaggcacgcaggccgcattctatttgataaagtctagcccaaaacacacacactatcattcacagttaaacctctttctcagtgtcaccattgccggtcatgacagtgccgcccgcaggagtttcagcttgtccccaagctggagcatctggaaagcgagtcttcacaacatgatagtcctcccaagtagcatgatctgctggtaatgaagaccatttcagcaacacctggacatgagctgcattgcagcgcttcactagtcgacgctccaaaatcgcctcaggaacaatgtcagcagcattaagaaccactggggatggcaaagaagtataaacaggagtatgatctggcacctgagctttgagttgagaaacatgaaacactggatgcacagtgctgctggcaggtagatccaaacgataagccgccactccaatgcgctccaaaacagtaaaagggccaaagaacttataagccaacttaggatatggtctattaactactgaggactgagcataaggctgtaacttcaagaaaacagcatcacccatagcaaaaacacggtcagaacgacctttatcagccttgttcttcatacgcagctgggctcgagttaactgctgctgtaaaaattcagacaagtgctgcctttcagtctgaacatccaccacatcaggcagagtagccaatgtcagatcaggaacttgagaataatgaggatccaccccaaaaagagccttatgaggagaacagcaaagagatgtatgataatttgtattgtaccaaaattctgccaaatgaatccaatggctccacttcttagagttagcctgagtcatgcatcgtaaatacatttccaaacactgattgacacgctctgtttggccatctgtttacgggtgatatgctgtgctcatctgtaattgagtgtcccaagtagcaaaaagagttgtccaaaacttgctagtaaagagacgatcacgatcagacacaatagaacgagggatgccatgagttttaaatacagttttgtccaccagatgagccacttgtgatgcagtgaatggatgacgcaaaggaatgaaattcgcatacttagtaaaacaatccaccaccaccaaaattgcattataaccatcagagcgcggtaagccttcaataaaatccatggagatgtcctgccaggcctcttttggaattgggagaggagctaatagtccaggaagccgacagtgttcatgtttgtcctgttggcaaacctgacattgcttcacaaaattttcaacatccaacttgagaccaggccaagcaaataatttcttaattcgatgataagtagcagcaatcccagaatggccaccaagtgcagaagcatgaaaagcttgaatcaacttagtatgcagtcctgcattggatccaatccaaatcttattctggaatctaataatcccttgtgtcaatgaatacccttgagaattaggagaatgcacagccaactcagctagtagctgctgagcttgaggatccactgtataagaattgatcacctcctgaatccagatcggttggaccacagaaagagcacaaaattgagaggaggaaggcattctagataaagcatcagcaacaatattatcaacccctctcttgtattgaaaagaatattgcaaacccatcaatttagtcattgccttttgctgtaattcagtccccaatatttgatcatccaaatgacacaagcttttgtgatctgttttaatgataaatggacctctctgcagataacatctccacttatccacagccatcataatagctagaaactctttttcgtaaatggacaatttctgattaacaggacccaaagttt

SEQ ID NO: 4554 - DNA, 3244 bp, Oryza sativa
tttgaggatggcattttaacgaaaccacttttgggagtggcattcgagcgaaaccccgttttgacaatggcaaaatgtcaattttgcaatctcgatcaaaatccgcagaccgcgaggccgacacgggagccgcagaccgcgcgatcaaaatccgacggtctccgctgcaatctcgagccggaactcaactccgacccggagaaacaaaccgttggagtccgacacgtaggcgaacgcgcatggacacggcccgtgccgcctataaatataggctgctgcaacgttgcaccgtcgaacaaacaaaagaccaagcgaaaccgcagatttatttcctgatattaagcgaggcatataaaatcaaagggttcgtcaaacccatccgatccgacccctccgccctgccccgtgttgggatggagaacaaaggcagcgagaacgagaggagcctggcgaataatgccgccgctgctgccgccggcgacgtggaagaagagacgacgaagccgttcaggtttgctcccgaagtggagaagtggacggcggcggagaaagaggcgacgctggccttcttccgggcggcgaacgctgaagcggccaagtacatggagatgacggaggaggacgtggtggaggagtaccggcgggcggggaagcttcaccggtatgacccggataaggagtggcagaagcgttatgcccgcgccggcagggcgcacccgccgcccgcttgtgccatatcccgcttgcctcatattcagcaatacctcaaatacctcgaggaagatgatcagaagcaattttccgtgataaactaaatcagtggcgttctttactgatgatctaggtcagtagcgagcctctttgaggcatggtttgtacaatttgtgagaaaaaaatgtcttacagtttgattggcttttcccacgatgtaactgtatatttgtggtgctcctcccttgttatttatatttgatgtttggacaattaaattgaatttgttatagagtctgcaaggctggctttaacataaagcgggattttttttaaccaaccactttttcttagcaacgatttttctacaatgttttagttttttctgtaagagtaaagactattgcattggtgttttagttttttctgtaagagtttttaatgccccgcattcgagtgagaggaggggatagaatagaagactagtgcattgttgtttcagattctagctaaatctctccaatcaaaactcggaacaaacttaatctatgttaattgttaaacaatctgatttgttttaggggtgagcatcatgacgctgggtttattgttgtttcagattctagttgaatcgcagtaatcaaaacttcaatcaaataatatcctagataaaaaaactacacctatgttccgttctatcaaggatgacaaataaattggattcagttaaaccaaatagttcaaacaaaaaaaaactgtcagaaatacattgacggctttaacattgatcacaaatagaccaaaaaaacttatccaattcaaccaatagccgaaatgattcggatagaatagacagaaaagcaactgatatttgagtttcacctaaaaccggttcaatcaaaatacacaaaaaccggttcaatcagaaggcacacacacggtgctaacattagtatcatctagacagaaaaggtagggcatgtttcactatccacaacaatccaaccatttgaactcaatacagtgccaagtgcaacatatctcatacaagctcactatccacaagttcaaagacaagacacacaaacgttcctaactatcatgccaaaacagacaagctcactatccacaagttcaaagacaagagacacagatattccccaactattcctcaactaagacacggatattcttcaactattcctcaactatcattccaagatgatgtagcgaaccacgaaacgtgcattacaatactgcaaaacagacaatagaactatagaagccattaaccaactgtaaaagtactattaacatagagtatagccacaaatcacatctcattatacatcacaacttgttagattaaagtattgccaatatgtagttgctcaaatctaaatcagccacttaaacacgagataagaaaagcttcaatcgactgcgatagttcaggggtaattcagtcgaccgcgatagttcaggggggtaattcgtacttttttctttaaacaaaaaagaggttgttggtatcgttcttcagtattaggattaatgtgccttctcaggatttttattgcgaataacattacttgaaacatactccctctgtactcgtaaaggaagtcgttttggacagcgacacggtctccaaaacacatctttaacttcttgcttctataaaaaaaattattaaaaagcgatatatgtatacttttatgaaagtattttttaatacaaatctattcatataatctttatattttcaaactcaacaacttgagagttattcatgatttatattctcaagatttaacttaaacattatcctaaacgattttttttatgagtacggaaggagtatgtataacactcttttgtgactcaataaattcaacttcttgttccctttttttttcttttctcggcagcagacgaaattcttcttaggtaacatttcaacaccaaaagttgtaaaggaaaatgatcaacaggaacacatgcatgtaccatctggattcttcactagttcattgcattggtgacagcaagcagtagctaaaaatcgacccttgtgtcctgtgatgagggtacgtacgtatctgggacggaggcagtgactttggcaaccatggcctggcggtggcacagctagcatcgacggtgatcgaacaggcgaagtccgaccgaagggcacgcacgcacgcagacatagaattaaatttgaaaatatactttgtttcttagaaatattcgtgatacaaactttttagcagaaatataacgtcgatcttgcacaatcgttatgcgaaagtgacgagagcgtgacgacacacgcagtgtcgcgcggtgggagcgcgagaccgtgcgaaatcacgatatgaaacagcgagagcgaacggtctcgcgtaaggaattagcgagaccgaatgtcttgtccatcagtgccgattaattagtgattaattactcccaattaatgattgaataatatttaatcattaattagagtaattaatcactaattaaccat

SEQ ID NO: 4555 - DNA, 5774 bp, Oryza sativa
cgggcgccgtggcgaatcaggaagaatccaacgcacggggacgcccacaacctggttctgataccactgtaacactatgccaccgcgaaactcgccgccgacgagagagagagatttagacgagatcggagttggggacgaagagaaacagagctgaggcagaggagagatagagtttggagagagatagattcgatttcttttgccaggttggccacagccattctctctcttgagtatttatctcctgattacatgggccattggcccaaacgatttaaggcacgcaggccgcattatatttgataaagtctagcccaaaacacacacactatcattcacagttaaacctctttctcagtgtcaccattgccggtcatgacaggtcaggatgtttcatccaatgatcaagggaaatatccataaaaagggaacctttacctcttggaatcattggatgatacagagaagttcttgctgagccatttatatgaaatctgtcaaaaacacacatatcgattgttgaaacagtctgccaaggtaaacaaatccaacaactcaaacaatttcaatgaatcaaccactaaacaagtaacaagaatattacgagaaaggacaggcaagtggttcatcctatggtcatgtggagctgcagtatcacactcgtttaatcattatgtaaataaactcatgacatacaacaatctgattggaaactccaccatcccaagctgaacaaacttggccagttcctgttgaatttgacaacaaaaggctgatgcaatgttaatcctcccacaaaagattggaataaatctaagtttgtcatggaaaactggaaacattgttactccatatacatgatatcatgaatgggcaccgaaccatcaacaaagatatcaaatccaccatgaactggcacatttgtttcttgtttctttttttgtttttctaagcttaacgcaatatgaacattaatgtccaaaacaaaacttatcaaccctaaggtacacctcgaacaaaacacaaccctaacccatgcgcgccccaagtaccaaaatgagccggcaagaacaagaattcgaagcgcacgagaaaccaagaaatcatctcgaccccaaccttaatccctaatgcggtagagcctcgcattccgttgtgactcaccacttagagcggatcagcgaagagggagtggatttgggggatcaggtcgagcagcgcctagtccgcggtggccgccatggggggtggtgcttggcgcgagctcctgctcccgttttcagaaggttccagatccctcgcaccttgctagggtttggggcaattgggggaggaggcaaggaatttgggcgcgggaatcgcgcggttggagggccaatgaccagcaccaattttcccgcctccctactcctaccctagcactagtaatatgccctgctaaacgctacggtgcaattttatttgtctaacaaaatatatttttcaaactgggagatgatgtgatatgaatgaatatataaaagaaaggttatatgcagagctcagatggattttttatgggagagtactcagatcagggcgctaggagaaacgatgctcgctcgggcgcttcatccgccattcaatctgggtcactggaatggtagtgctgttaaaaaaaatcggatgatagatataggaagtgaaacagcatacacgatagtgtcacgcatctcttttaatttttttttgccacacgtttgatgttatgctcagatatttttttggtgggtatgtgataaaatattttattttaggataatgtcacacatatcttttgttttttgccacgcgtttgataaatattttattttaggatttgtttgtattcatgttgaagccgcccattataaagcactataatgtgattcatgtcacatcaccttttttcgcgtgatgtgataaaatagtttattttgggacatgaaccctttttgtatgcgtgcgttcaataattagtttattttaggattttttttattcatgtttaaatggacagtccaatttaattttgttatatatatagccctgaagagcgggactctacatagcccagtgtttatgtaccatactgctggggaaacttgctttttgacacatacattttagtatgctgtatttggaactttgaagttatttgtcctacatggcgagcttctcaaatcttgaatttctacagcaagaatcaaagtatcaaactaatttctaacaacaatgatgtgaaaaatgaatgctgcaactgtatatatgtagagaactcaatttatcatttaatattggcaatgtactgcaacaaatgaaaaataaattaacaatatatctgaatataaataagtgcaaatttgctccatactgagttataccgcagaacaatgaagcagccaacagcaagaacgcaagtcacttgacaaacatgtatctccaggatatataagctgtgctcgaatttgccattcaaaatttgagtaacctcctagaattagcagtgtcaaagtttaccatattgttaatatgcatatcgaataaaccagaacatgtatatgttcaattttcaacattgtatattctgatatatggaaaatagactcctataaaatttgtagtccactactctatgccctgagccacatgtctaactaactgtgcttcccaaaccacatatttctattgtcatagcttcttaatgcttacctgccactgaaaacaatgttacatcgtgtataagcctatctttaagcatcgataattcaacttgagtacttgacaattggatcactgaaggtgggaaataatgtggctcggtaaaataagccccagcatggtgttgacagggtatttgccaatgatttcagcctaggaatgactaacacagtatcagatattttcaacctgctaaacaggatggttcctatcaaatacaacctacaccaacagtccggtgtcaattatttattgcaaagacatatggccatataacttttctttttctcatgaaaggggcatttctgcttaatgttagtgagctatccatcgtgtggactgaacataacatataagaaggcagcacatcagctgtaataagtagctcaaattccttgaaaaagcctgtaagcataaactacttgttttaaaaagaatacagcttttcaattatgaacacagccaagcaatcaagtaccaacatatacatactgctaccgatttgttttattattgcttatttcctatgatagactgttatctgaattctgcctagttcatgtttagcatagccaaactaaagtttaaaacagacaggtcctgatcacccaagcattataattgagcatgaaaaatatatacatacatgctgaaaaactaaggactctccggctcatctgatcaccatggggccttatgccgcctctgggaagccaaccttcaggttgtcataatcaaacatggtatggttggctacttggctcccataaagacatctggcatctcccaagatcctgcagcagcaagcacccatatttagagtgaaggacaatgtctatggggacttgtttttagtgatgtttagcacaacggagattggaaagtaatatcataaaagaggaaaacttgaacatgtcttaatataaagtctaaaactgttgaatgcacttcttttgttgattaacaagtatctagaagaataccatatcactgaagactaaagataccaaacatctaagaactacctcatttctttcgtggtgacatctctacatatcacagatcttcatttcagattttccaggcaagcaggccataaattaattaaggcaatggctaagctatatagcgcccttggcaatacatttgcttgggggtgattagtaataaatgttatttagctccccatgatattaaacaattgtctgaaaacaagcacttgaaaacaaaggttgataaaataggtagtgttacatattgtattaccataagaaactgaggttaaataccactaacaaccaatccatcgtatatgatgttttgcatcctatacattttcttcaatttgaaagttaaatttccttgataacagttggtccttatacatatggtgttatttagagtgactatttccagtgaactaaagaatgaattaaatgcttttaagcagttccaaacttacctcaaatggaactgcaacaactggatagtgatgcagagacagaagttatgcagcatagtgagggcaccatgttaccaaatactgtgagcatttaaattgcaagacctctgaaaaagtagaacaagcagttgacagaattcagcaatagatctcgagtatatacagttagacaagctagagatgtacgaacaacgaaagtaaatagcaatttttgcaacaattcctaaattatatatccaacaactccatgtcatatgcaccaactatcatcctgaatttcgtttccttcctggagataaattgcttggctaagcacctttaggtccatacgctagtgaagcgtataagaggtgtaaaacatgttaattatatgagaagcatactgtttaagcaatccaacttgaaatcccattgcatcagcgcagttattaatagcaaaaggttgtttaaaataaacagaaaagcaatggttaatcgacattatttcttccccaaaatccatatcctggtaaaaaaaaattctaagtagagacgattggcaccacatgaattagctctaatctattggtacactcataaacaaatactggccatagcttgcaatagaaccagaatcgagattatagatttacaacggttattactgaaatgcaagaaagagaaattatgcaacacaaaccagaatcaaacggatcagagtgggccaaaatcgaaaagcaattggtgttgacaggggatcagagaccgtggaacggcggggtgacccatggaggggcgaaggaaatttgtcctacaaagctttttgaatcaaaggaatgaaccctatggaatcatatgaaattcgtatggaatacctcttcccatataagttttggagaaattttaataagaggtagaacctcatggaagaaatcctttgagtctttatctctcatcaatttcttgtggtctaatcaaacggttattcctatattttttctgtgttttgtaatcctctgttttacacttacattcttattagaattctatgtttttcctattcctctgttttttcattgatgtgattcaaagggacccttatcgatcttcgttgctctatggctgcggaattaaatttgaaaatatactgttgattcgtttttttctcacaaatattcgggatgtaaatttattagcagaaatataccctcgatctcgcacaaccgtttcgcgaaagtgacgtggacgtgacgacgcgaacggtctcgcacaacgacagcgcgagaccacacggtgtcgcgcggtaatagggcgagaccgcacagtctcgcacgatgaaactgcgacactatgaatgacaaaatcgaggacgtacgtggtggcggcgtcagaccacacggtctcgcgcggccaaaccgcgagaccaagcagtctcgctcgctcaccgggcgaaagcgactgttgaaaatggttaattagtgattaattactctaattaatgattaaatattatttaatcattaattagagtaattaatcactaattaatcggcaatgatggacaagacattcggtctcgctaattccttac

SEQ ID NO: 4556 - DNA, 6846 bp, Oryza sativa
  unsure (1)..(6846): unsure at all n locations
gcgtcttctttcgaagttcgtactcgaggggcgtcttcctccctagaggagtgtacgcttcttctcccggcctctacggtgagtcctcctcttctctcgcttttttttttctgtttctcatgttgtttttcgattccttcnccgtggttggctcgcttctctctctcgctcgtgttagttgaatccaaggcgcggttgatgatttgattggaccgtagctgatctgcggatgcttagtttttcgtcgggtttggtagagagaggctgcttcgatctcgcgttttttgactttgatcataaggtttacccaatttgaaaccgatggatttggttgcgtggatactatcaaactgcttcatggctcttagtttgtgccgatttatgatcgtcctggatgcaatggagtaattagtcgctgtgccccaataattattcagttccttcttcatgtgttttctctgttttttttgtgtgtgcatgaggtgacctcgtgtccttgtttggtttgaactttgaacacgcgaggacgattacccttgaaaataagtggtggagaaacaaaacttagatgcgtctctctgctggtgatcatctgccacttgttaattatttttctgcaaaataaaaaaaatcggttgctgacgatgaggtcggcgtagtaggctttgacaacgccccctgaattttttaaaccatcctgaatctgtggataacaccattgcataatctctgatagtgaattgaacctactattctacaagtgtatactaatgttaaacctgtcaagaaagtacttgtaagagtagtgagcccttgtgccttgataagggtgagcttcaggtttgcaaaaccgtgcaattaccgaacggctatcgtgggttataacttgtggtaactttttgaaatcacggtataccatacgataatctttaaaccgggagtgactaaacggtttggtaaacctgttgaacgctaattgtttgtgtttctaaacggtttggtaaacctgttgagcgctaattgtttgtgtttctcaagacggcattctactacctgcgtcctagtaacccctcaatccatcccaagatataaggattttgggtggacgtctagattcactgtcttagaatgagatgggattactcattctaggttataacattttgggcaacaggatagtattatgtcgagattcgatgtttaggatgagtaagatcgtaggttataacatttgggaaggaggaagtatggtataatacactatattacactgtttttttttcacggtatgaactggctatacagtattggtatatacagtattagtacacagcattcaaccatgtgtaactaaaacgtctgcaccttcataaatcagtagggcgtaaaagacgccatgggtttttaggtgcacgattgatctctgcatttatctcctggcgtagggtcttaccgtacatcgtacttagttgacttcagcagacacgaaaagaatggacgggggcccacctgccagtcgtggttcaccggttacggttaggttaccatcagaggataaacctgggcgtcccacttaacttttgatctcagcaactgatctagtagtattgaattgtactaccagtagtaattactgtgtggtaggattactagatgaacatgccattcgctcatattagtgatgggggcattagtatctgcgtattgttattacagtcctgggtacggggtgcctgggtactgctatgctggtgaatgttgttaattgttctgtctgttttctgtttccaaacaagtgatgtcaatggatttactatcaaaactttgaccaaacaataaaatttcataaactattcggtcaggaaaaattctactactaagttttagcaattggtgtcagattttgataacagatgaagtagtgctatgatcatgggtattttatacacatgttattggattctatcagccgtgtcgagactcgagagtggccaatacgttgtactcctcttactattttatattatatgtcattttgattcttttatgttttttttaaaatttgactaagtttatagaaaacaaaacatatttttcaacacaaaacaaacatatcataaaaatatatttaatgttagatgttgtgaaactaatagttaaacttgaataagattgacatgtgagaaagtcaaaatgacttataatataaaatgtaaggagtaactgacaatcacagtgatgaaaagaaatagtgctgtttttccaggttcagaaacgtccctgtatgactaatacactgtattagtattcagtattagcagcggtggctactattggttcgtcgaatctattcctctgcctgccaattgcagttaactaaatcactaaccggatgcggtttaataagttggtagcattgctgcatgtgcagcagtatcaatgtattcatagtaccgtagtacaatcaggggaagtgacaggaacattaggggtaagtggcggtatactaatcgctgcaaccaaccaacgtttagtgccagtaattagtactgttcgtgcaacgttgtgatgcgtaaagtggtgtgctagcttaatggaaggctgcactgctgccaatcctggcagtccaccaattgatagtactagtaatcaaatttctgtatggactaatccgtttctttcttgttccgtttttttctggttcttttgtttggtttcatttcatttgaggggaaaagaaacagcatggcctgcagtggttctgcagttgcacgtgagctctgatagtcttctggggaataacagttgcaattagtcatagtctagcgcatctttttgtactatactacctgtttgtgaatatttttttacatgggagtttcaccgaactccctgtttgtctcttgaatttgaaaagataaatcatctctgggagggttagttactgttcttcacttttggtgcgtttcaccaaacaagtggcagcaccatgattttttccaaaagacaaaaattttccggtaaagaagcacgtgatgtcacctaataccaccggtaggatgcagcaccttgtcgacagaaaaagatgtttttgagttcaacttaagtggcatgaatcattgcaaataaagctgagaggggtaggatgttttagtgctacagcacaatagtagcaagcaatgtgctgttaatcgccgtccattccttttcgtttttagtaggagatgagttgcaagtagccatcaggaatgtgtcgctcgacatgcgcattgcacctttctttgcttccactatactctcatctcgtgataattgagccgtggaaaactgtagcaacagatttgttcagctgcacgaggacatttgagttatccttggtgtccgggcttaatctaggttaagatgatgctagcatataggacatgtcgggtttgattagtttatgagcatcggaacatcggagcaaataaactaacccaacctatgaattggctgagttgcttgaatttcattaaggctgtgtttagtctacaccaaaattgaaagtttggttaaaattggaacgatgtgacggaaaagttggaagtttatgtgtgtagaaaagttttgatatggtggaaaagttagaagtttaaagaaaaaatttgcaactaaacacgacctaaaaaagattttgcatgacctcatccactcaggtctgtctttggttggaagttcaaatgcaaaaacgattttggatcctatttggttttaaaatggggatcaggtgtacacaaaacacacatattttagcaccatatactagtagttttgttattttattttatatacccccctgattatgactgacctaaccaatctccaattgaatctagcataaccggagaagttccaaacattgctattgctatcaacaaaaagccattgcctttattaggttcctgccatgtgtgaaccccggaagccagcagcggctagtcatctgtccttacccttgtttcgcatatcaccagcattacttagatttaataaaattagattcagatcagattgccggcctgctgctgctgctgctgctgctgagttgttgactgcatcatgttcatagcacagctccaccactgttggaacacacacgtcacgtaattacttcccatggagcctggaatcctcggtgaaagcgattttgatcagcatgtgataaggtgcaattaatccctgtaattttctgcttagtaatcgattcggtttgtggcctacgtgcaatgacagcgatcatttgggggaggaggggagagagatgtttgtgttgcaagtgttgccacatgttgggtgaaaacggcgaccctccaaacgccggaaaatacagaaggttttgaatcatttggatggaatttttcatcatcaaggtttcttgtagtgtgctggagtacttgctgtttgggtggtagtgaaggatttgttgcgttgctcacaagcttcaaatgcttgcctttgttttggcacgtgtggctctgtgctggtttgtgtgaaacttcccaggatgtcgaagttagagcttaccgtgttttgcctatttttggacataggagtatggcacaatcatttatctattcttttatactcttcctttttcatttttcctctgttcttttttttaattaaagaaattttaaggagatggcagcttttcctatgctttttatggttaggtttagcgtgtgttataggatatgacgatctatatttcgttggatagggtgatctaattttttttgtttggtttatatagatatggcgatccaattttttgttttgttagagggatatagcatgtatgggaaaaaaccaaaagttagtgggacccatatatatatatatatcaaaatttaatcatctgagatcttgttttaaagatttaattgtaacaaatataatgtgtaataaaatcataaattagataaaaggtttaggagaaaaaaatcggttggagcttgcttaacagaaaatcaaacaaccacagccaattaaaataggacacatcacccagaccaaaactaatgacttcatccagccaaatcgaccagatgcacttatccagcatattgagagaatattccttattccggaccgcctcatctaccctgcccttcaaccaaacacaaaaaaaaatcgggcggccatcttccatcaggctcatccacccaacctagcaaatgggatatgggagctgggattggaaaagggaaatgaataaatggctaggattaaatgaggtgggaagaatggatggttagatgcaatattactctttggagggtaggatattatttcccaatcctcaaacaaagcctcagttggcacaaataaatgcttgtttagacacagctcgaattctttgcaatgcttactagaattggaaattgctcaaaattgcagctctagatacagcgtgcattcggtcaaatttcaaatagagagctgaagtgaggtcccattggctttgaatacttactatttatatttgaatttagaaaattgctattaaagcattaaagcattaattatttgcagtatgtttgtagtactactcatcagggcaccgtatcacatcatagtaattgcattatactcttaattaattcagacctgaatcttctccaaaaatgcccatttctatatgcatcaagcacgtgttaaaaaagagcacccaaaaagaaaatagagtgcaaaatatagttagctgtaaaaattaatgaattagcatagtgcccctctaaattctcccaaattatagaacccacccctcagcagtcaccacctcatcgatagcacaaccacacatgcacagtgtcacagtggtcacatcacccacccctatacccccctgcacgccccccatcttttttactttacagtatcccccaaatattcccgcaaaaattaaacccactcctccccattcccccgcaggcagaggtagtagtagtactagcccaagaagaggaagagcaagacgaagctggaggtggaatcctcccgccggcgacgagaggccgctctagatcgacatggacgcgcaaatggcggccgcggcggcgcaccacccgctgccgcatcagcagaaggcggccaacctggcccgcaccttcaccaagctgctccgccgcaagcgcgctgacgctgtcgccgccgccaccgcggtgggagagcccggtgtgcccgatgcggccgcggcgtctgtggttggagatgagtacgagtgctccgtcgaggcggcggcggcgggtgtgccgtcgttgagcaagctgaagctgtccggtaaccttggcgcggcgtattcgctcgacgcgttcttccgcaatgcggccgagaagaaggcggcgggggtggccggggtggcggtggcgcagacgtcgccgcaggtggcgccggatgtggcgaaggattcgttgctggctaacctgttcgctggcgtctcggcggtgaaggcggcgtacgcgcagctgcagctcgcgcagttcccctacgacgcggaggcgattcaggccgcggacgccgcgctggtggcggagctaaccaggctgtccgacaccaagcggcggtatctccgggaccccgccgcggcggccaagaacgcggcggcggcggggcacaccgcgctgtacgcgcacgccgaggagcagcggcatctcctcaagacgtaccagatcacggccaggaagctggagggcgagctccgcgccaaggaggcggaggccgaccgcgccaggagctccctcaccgccgagctccgcgccgagcgcgccatggaggcgcgcctccaccccgggcgcaccctcgcgt

SEQ ID NO: 4557 - DNA, 21696 bp, Oryza sativa
agggaggatgccgacgtggagggagcgggagaacaacaagcggagggagcggcggcgtcgcgcgatcgccgccaagatcttcgccggcctccgcgcccacggcggctacaagctccccaagcactgcgacaacaacgaggtcctcaaggccctctgcaacgaggccggctgggtcgtcgagcccgacggcaccacctaccgcaaggtacccccagatctcccccctcccctcccctctccgccccaccggatccgccgcgcaggccgccgccgccgcggcgacgatgtgaactgtgattccgtttttttttttttttttttttgcgccgtggagatgcacgtggtggcgactggcaaaggtggggtgaagatgccgccagtctggacccgcgcacgggtgtggtgggtgggtggggcgcgggtggtggaatttccggggggaattttcgcgcggagagcattgcagttcgcggattcgtggaatcctttgctagggcgattgttaccaccactccacccggtgattcccgctttgcttttgtttgcataagcaaaagcggcggatcctggctcctgattggccgatgggatttgtggtggagcgggggatgcatgaactcggggcgtgtgtgtatgtgtggatcggatcggccttatgcttgcgtgatgttgaccttgtctttgcccttggatttggggatagatatgcgcttgtgttaacatagtggttttgtaacgacgattgaccgtgagtatctgctcttcaagactgggcattagcatttgtgttgttgcattagcaagcgttgctaggttgtctcttcagaatttcatggctactgctgatttgctcttctagaactgaaacaatacaattagtactactttcgaatctgctgatgattgtaaattaatgaatcataaggtcatttttagagttgagttgaacaatggggcattggagttgcatgatctataaaagcttggaggttgtttgtgttgttagttcactcaccttgttctgtatcaaatgtgcttgtctgcgtcccaaacatcctgagaaacaatgcatttgacttaatttcagctaattgaataatttgatgaatgattttatttatgtgtaaccgattgtgcctttttccacagggatacaagcctcctgaacgcatggaagtgattgggtgctccgtatcaccaagcccgtgttcctcgtatcaaccaagcccgcgggcatcatacaatgcgagtcctacttcctcctcattccctagcggcgcatcctcccccttccttcctcaccctaacaacatggccaatggtgttgatggtaatcctatcctcccatggcttaaaacactgtccaattctccatcatcaaagaaacatccacagcttcccccactattgattcacggtggttccattagtgcccctgtaactcctccattgagttcaccaactgctcgcactcctcgcatgaagacagattgggatgaatcaaatgtccagcctacgtggactggttcgaacagtccctgcgtggtgaactccacgccgcccagccccggacgcacaatgcttccggacccagcatggttagctggtatccaaatatcatcaacaagtccatcatcaccgacatttagtcttgtgtcatcaaatccatttagtgtctttaaagacgcgattctggtgggcaacaattcatcgaggatgtgcacgccagggcaaagcggcacatgctcccctgcgattcctggcatggcaccacacccagatattcatatgatggatgcggtttctgatgagtttgcatttggaagcagcacaaacggtggccatcaggcggctggtctggtgagggcgtgggaaggcgagaggatccacgaggactcgggatcggacgacctagagctgactcttggaagctctaggacaagagctgctgcttaacaaaaaaaaaaaaaactaacctggaggcattcttgtctgtagcttatttgttcgtgttcattagtttctgaaagagagaccaatcgtgtggttccttcagatagcttcagttgtgatgataattgtgttatttatgtgaggcacgagctagagagaaagggggctttaattcggccaaacccagctgtgatatggtaatctcagctggctgtaattttaaagccccccctttgttgtgacaaatgtaaattgatgtgagaaatcatgcaaaattcatggagcgttcagctcaacgaagcattcatttgcgttccgtgcacggacagcaaggcatccacatacttttgccgaagcctgctgctttcctcgagctccacggcggcgatggcggtggtggtcgacggcgtctcgccgccgtggtccaaggaggccgtcgtacacctcctgtccggtgagctggtggtggtggtgattgactattgtatcatccttgccaactcgtgcactacagggtcattttcaggcttaattgaacgtgccattcgaagtcagcaaatgcagctgtgagagcacacctgtgccgtccttttccactgccttcaaaaccaaatcttgcccttgaaaagccagaccacacttgtactgtctgttctccgtgtgagcataacagcaggagtggtcgagtacctgatagtagtagtaacaaaaatttttttagaccctgggatttgacttaatcaaatgaagaattcagtagccctgatcacgtaagtattagtgtcacagctcaccaaccctgcctgctgaagaacggcttggaggagacagagacaactagggcaagtggtttgccaaacttgcgcaatgattcgatcaaccgtgttctgattgagtctttggttgaaaggtaatttgcattttcagagggttaatcttgacttgtggtgttcgagaaaccgcccctgatttctgaacatttagtacaagccaagtaattagaaacatattatagaactttagttgtgctgtttgttggaattaatgaatgggccttagcccactcgaagattaattctttggaaaatcacaaaagcccacctcatgggatggcatgcatgtggagtttagtaccaccttgcttattctaggagagggggacctccttaaaagggaggatgccctcctagccacttgaagcatgtgtggtggagagaagaggggaaacacacgcgcgtgcttgctcgcctcgcctggcctggcctggcagggcaggcggcgcgcgtgcacgacgtacgcgtcgaatggtccgaaaaattggctcctcacccttgcgcagatgcagcctccttttgcagttttgttttgctgcaaattcggattcgttttgttttggaaacgttccgaaaaatccggtgcgtgcaaacggcgtggagtccggataagttacgcgcgacttatccggttcggttacgcgcagtagagatcgtgcgggcgccctgatcaagcgacccttctctatataaaccgacccgccgtcttcacgcaatatatgcgaaaatcaatctagggtttgcctcctactctgtactgcgccgtcgctcgtagactactccatcccgctcgccggcgtgcaccagcgatcgggagagcaggtctccggaacctctgcctttgacgtcctgcaccgggagaaggcggcaataaggtttttgggaagcgcttcgcgcgactgctccctgttcgttcgcgacggctcgccttcctcttcgctcgcgtgtttcgtgccttcgtagacacctgcgaaaagtttcaaccaagcagccggtcttttcgtcacctcggtacgtgttcaatatgttgcgcatatttgatctgttcatgttattctgcgtagtttacatgtgtagatctaatgatgcgttcatactagttttcatctgtaatgtcatgatttattcatggaataaattaaatcattatatgcccataatctcaacactgttgtcttcagtccataagccaagcactagtctccgagctgtctccgagtaggctggactgctgtatatgcatatgaaaagttcgtttgtttttacatggatggtttgtcatgtcctgaaagtctgaatttcatctgttttagtacaaaaaaagagaatgacttgagagttgagatgaattcaattaggtaggaaaaacgtaccagcaagagtatatttgccagattctgattttaaaattcgtgttaatccaacttcagatggctttcgtctttgcacacgcctgcctgcatcaacacactcatggtgctataaaagtctagaacatgatgcagctggcctggactagtctttcactgtctttgtgctctcaattctcaacagattgatagctttgccattgagtcagggagagagatggctgggagagaggatggagcagcagcaggagccatggaagaagggcaagacagcaaggaggtgaagtgtgagagttcagaggatggaagcagcagcagcagcagcagcagatgccatggcaacgacgtgatctccgtccaattcatgcagaaggtacgtatggtgatggtcgttgcgaacttgcgatacacggtctcctggtactaccccgttgccgtacctgaactcgcaaactgaaactctgaacttgacacccgtgtcaaaagcatatggtttctgactttcttctccattccttttcagcagcagtaacacgtttatagtaattccgttggcgattactaccatctgtgactttttgactgtggagtagatttcttcatgtagactaattcagaaacatcattagagattcctagtgactgactgactgactgactaatagggatgaaagcggtcagcctgctatcccgtataagagcccgaatgctagttcattttcaatccactgctacaaaaattagatgcaaaaaatacagttacagttgtggtttaggggacaacaagcctgcaagcccgccctgctttcatcgatccctactgagtagtactggctaaccgttgctctgaatattttcgcaaactgaaactctgaacttgacatccatatgcgactaattccactggggattactgtcatatgtgactttgtgagtgttcatttcttcatgaagactactaactcagaaatggcattagactattagagagggaaatatacggtggaaatcatatatctagtagaaacctgaaaattaccgttggattgaaaaataaacgtttgagattcgtccacatcatcaagagtaaaaattttactcctaggtttactcatgagtaaaaattttactggacgtgaatgaatttcagacatccattttctaatccaacggtagtttttatgtttctacaacatacgtggtttgcgctacatattttccatattagagattactcgcctgaccaactgtaactatgattgatccttctagatcaaattttcaacgaacattgattgctgacacagatccatggtgcatgtgcatgaacaaaaacctgctgattcttgcggaaattctggggacatatttcatgatattcgccgggtgcggcgccgtggtggtgaaccagagcaccggcggcgcggtgacgttcccggggatctgcgccgtgtgggggctcgtcgtcatggtgctagtctacactgtcagccacatctccggtgcccacttcaaccccgccgtcaccgtcgccttcgccacgtgcggacgcttccggtggaagcaggtaacaaagcattttcttggatctgaaaatgacatcccaaccaacgacaatttttttccagctttctgtagcacaaacggagttatcagtggcactgtagactgtccgacaaaaacagatttttggtttcatggttcgcttattggctgaccagccgcatccaaaatttaaattcaaaaaagttgatttaaaggtttttgttatatacgtgtgtataaaaaatatacagtatacaaagtttgtatacgtgtatataaagtttgtatacatatatagtattaagaaataaaaaaccaagaaaagaaaaaaaagggaaagaaaaaaaggaaaagaaacgaaaaaaaagaaggaaaacaggaaaaccatatgtgggaatcagatctactgtttttttccattgcataggaatcggacagcatgtttttttgtcgttgtttttccccatttttaagggaaccggatctacgattttttttgtttttttcgctattttttttctcaaactctttttttttgcttttccctgtttttaaggggaatcggacttcttttttttcggtttttttcgctattttttttatttagacggacggaggaaacactttgtattttttaagtagtagagatagagaagagatatatttttttaaaaaaagtaaagtagtataagtagaagagaagattacggacaagaaatttttttagggagtcgtagcttttctctaggagtcggacctttttttttctttttttcatggtagaagttttttctcctttttttctcgctttttttctccaccggggagttggacgttttttttttgccgattgattttttttcctccttttttgtttttctcgcttttttttttccaaacggacgacggaaatttcttttattttttaaatagtagtagatagaagatagataatatttcttttctcctttaacattggcttttagattgtaaagaacatggatgtaaaagtttttaactgtcaattaaaaacgagaattggaaggagagacattttgctccaaacattttctaagaaggaattgtgatctcgttgattgaaaaccacacacaccacttaacgctgtactattaagtacatctctttctacccgtcaattatttgtggttgcttccttcaatttttccagggcttatcaaccgtggatcaaacgatggatcggattatgtttcggttaaatttactgccaataactcatttgtggtgatcaatgtgtgtgtgtggtgcaggtgccatcgtacgtggtggcccaggtgctgggatccaccatggcaagcctgacgctgcgcgtggtgttcggcggcggcggcggcggcgcgcgcggggagcacttgttcttcgggacgacgccggcggggtcgatggcgcaggcggcggcgctggagttcgtcatctccttcttcctcatgttcgtcgtctccggcgtcgccacggacaacagagcagtataagatcgaacaccaaaactaacaaattaactatatatatatgcatgatgatcgatgataattttgtggtgtacaacacagatcggtgaattggctgggctcgctgtcggtgcgacggtcgcggtgaacgtgctcttcgcagggtatgtgttgaagtaaatcataaaatttcacagttaactacgtgctgttgatgccgcattagtagtagttgttcggtattctttttcgtttatgcttatacttatcagccagtttgaatttttaaaattaaatttgaaactaattttgtgaatttttttcatcaaagtttatttttcagcctttacttttaaagcgctaaaaacctgtatataaaagttttattcacaaattatcttttttttataaacacgtcgtttgatttattccacgaataagctaaacgatgaggcccctcattgttgttgttgctgctgctgctacagtgtgtattgcattgggggtttaatttgcaggccggtgacgggggcgtcgatgaacccggctcggagccttggtccggcgatggtggcggggaggtacggcggcgtgtgggtgtacgtggcggcgccggtgagcgggacggtgtgcggcgcgtgggcgtacaacctgctccgcttcaccgacaagccgctgcgtgacatcgccaacaccgcctccttcctcaggaggagctcgcgtaggagttagtgatagatatatagacagaattgaagccgttctgtctctcgaatttgcagcaaaaatccaatcaccgtgatgctaatgtttttcatgcccgttgcaagtgtaaatgtgtaattaacggcccaggcaggcaggcaggcggaccggcccatccttcggttgatttggtgaaatttgggccgaggcggaatgaagtatcgggccgtgatgtcagagatgcggtgggcccatagtgggctgcgcgagcggctagtggggtcgtcgtgcacgtacgtcggttacacgattctcttttctttttatttttaccgaactaggtaaaaacccagaagttgcaacgaatattataaaagaaaaaaaaatacagtatagtcggtcgattagatatataatgtcatcttcaaaggcagccatactaaaatatgctgctatgctggtggatcatctattcttatcctcttcatatatttccacaagttatatggtcggacaatacaacgttgaacacttctaattcacctgacacccacatatatatttgtgtgtgaaaccccttgcaatttctagagttaacaattctcttattcattcatgtgttgtggggcttatggcccccacatgttagtttgtggtattaaaggcagactcgaataccacactagcatcacttaaagcagtatatatacaccaaaacatacatatactacactcggacatataagaatatataataatacatcatttgacacgatctcgaagatacaaaaatcaacggtagattcatatcatcattgaattctattaaaaacgcacccacgtgcaaaacataataactttggttggaggttcccagtagaattcaataattaatgcgtctttgttttgtgtggatatttattagcttgtgttttctttagctttgctggtgtattttttaaaacttgttttttatgctagtttgtgtgaatttgtataataattggctgtagctccttgagcaaaggctgagattttattccattatctaaaaaatgcaaaacataattgtgagcataagaatcttaaacctggttggtggtggagtcactccatcaacgtaccaatggtgcttcctctacacattttttttctttttctaacttgatgatcggatagattatagatactagatagataccccgcgctttgctgagtgatatttttattctaccaaacagtatttggtatacattgaagtgttattcttgctttgaatgaggaaataatatggaaaagagacatgaatgattaatctaaatggactacatgaaaacttgatagccaaaaaaggcacattcagaattatacatacagttgatctcaaagaaaacaaaaacaaaatcaccttcaattgagatcgatgtacatacagtgagatgtcagtgctgtagccacttgtaattatgaattagaacttgcgcagtgtgcaaaaaaagttatctgaggctaaattagaaaaataaagatcagacataatttgaaacaaagtaggatatattatgaaaatagatgcacaatggagacacgatttttacgtggaaaacccttataggaaaaaaccacgggcgctgaccaacaataatcactatagaggagttggatacaaatgcggggaatacattgggctgttgcacccttcttgtgcggcttacgagggatatatataggagaaatatatgaatcctagtggggaaagatttaagagtcatactagtaaactaatcataatagtcaagttctattagtaaacttatccgaatatattgcaggcctaaatttcggatcacatatttaacaaaatctccaccttgatacgaatttcccaacataaaaatcttcaatctccaaacaacctcacatatgagataaaatcactgcgcggcaaatagcctccatgactatactgtatcaccctcgatccagaagaggtagactatacttcaaactcgccattgggaataaatcctgaatctgctagtataaaccggtgtgaacctagcagagatgcaaaattgatgcacaaactttaaactcaccatgggaataaaatcttgaatttgctggcatgaatttctgtaatcctagcagaaacgcgaaactcttgtgctcaaaacggagtacttagatcttcttattaaccttctgatacactgggcaaacggacgtagcaattccgccgaaaatttgaccaccctcatgtgatttggacaggaaccttccaactccctctcgatgatttcgcttgtgtgtcctgaaacatgtatgcgcaactgatagattggtgcacgacagtattagcatctcctcatcccgcttcaaatcatcacttgccataatgagaatttgtatctcaatcttgaaacggtagatcaaatttcaaactcgtcttgggaataaaatcataaatctgccagtataattcgttgaatcttagcagaaacgcgaaacaccctagatgcataaaacgaagtattttgatctctgtgcagaacctggtagacttggctttgtgaacatggcaattgaattgattccctagtatacacaagcttgggtgcgtataacaatttcccctccgaaaaaatcagactagacaggagctctcggttaattttgccccgggaatcgtgcgtgattagatggcctcctgcttttcttgcgctgctctttctgcgatggctgtgcagcggctactgctcctttttcctgtgcaggaggacggcgacgactcggacttgccgaacctgccgattagtagggctgtgtttacatccgagggtaaaattttctggcatatcacatcggatacacggatatactcctccattttttaatatataatgccgttgactttttctcgcatgtttaaccattcgtcttatttaaaaaaattacgtaattataatttattttgttatgagttgttttatcacttatagtgctttaagtgtgatttatatcttatacatttgcataatttttttgaataaaacgaatggtcaaacatgtgagaaaaagtcaacagcgtcatctattaaaaaacggaggtagtatatttgaaatattaagtgaagtttaataataaaataaattacagattccgtctgtaaactgcgagacgaatttattaaacctaattaatctgtcattagtaaatgttactgtagcaccacattgtcaaatcatggagcaattaggcttaaaaaattcgtctcgcaatttacacgcaatctgtgtaattagttatttttttcgtcgatgtgacagggtgaaaatttttggggtgagatctaaacagggcctagattgattcttcaatcgggagaaacacgccggccgccaggactagtagatctaatcttcaatgctttaataccacttgttataaaaattgatgtacaatggagacacgaattttacgtgaaaaacccttacgggaaaaaatcacgggtgtcgaccgacaatgatcactatagaggagttggatataaacgcagaggatacattgggctatcgcaccctccctgtacggcttacaaggaatatatatatgggagaaatctattgagttttagtggggaaagacttaaaacatatttaacaagatagatttatgccgaaatataaagttgaatgcaaagtctcgtacccacaaatctatcctaacaaaatattgttctatacaatctggcatcgctgcaacctaagcaagttaaaaatagggtgaatagccagttcagtccttcaacttttgctcagaggtcgaattagtacttcatgttttataatgtccaaataggaccctaaagattatcatgcggcttaatatagtccttagacccacttaaaacgccacatggacatgccacgtcatttgtgcatgtaagataacatttaaatgtccattttaaccttcaattttctatcataaaacaaaaaatgttaattttttttatctatcaatgctacatatttttgccaatggtcaaaagctttttttttgtgttttctcaatagtttttctttatttcctatgaaaacataagggtataaaggacatttaaatattgaatttacatgcatagatgatgtggcatgtacacatggcatgtttagagggtctaaggaccatattgaatcacacaatgaatttaaggtacttgtttggacaatacgaaatgtcagggactaaattgatccttaagtaaaagttcaaggatcatgttgggtattcacccttaaaaatacataatctaaataattttccagcatgaagcttggatgaacagaaaactgcgggatgtatactttgtacttcagattcatatatgcaccaaaaatattgatatcttgagctcataattatagttaggaatccatgcgttaaccaaaacaaaacattagcagtaaacagaaggaccatagaaattcgagagaaaagggaaggggagataagtaaataattacctgtgcttgccgtcaatgatcgattaaacagggttgaacaacgaaactaagccaataagattgaattgtaggctacgtttctcagagtaggaccctaaagtaatctaatatctcactttgtggagcaactgtgcgcaggatgtactagtagcaagcctacagaaggagaaagagcaccatggcaagatggtccaaaaaagtatgcaggcaacatgcaacaaatagtctcatcaaataagtaattctatgaaaaatatttgaaggggtctgctttacctcatagtgcagcgacaaacacttttattggctaatcagacagttggattttttttccgtaagaaacattatacatttttatcgaactaagaaatttttgatatttgacggacaatttcagaaagaaatccgaaaccaatctgtagcattaataatggttaataacggtttagtttccaattttttttctcaaaaacgtcacatcgaatatttggacatatgcatggagcattaaatatagataaaaattaaacaaaaatttattgcacagtttgcatggaaatcgcgagacgaatcttttgagcctaattagtccatgattagccataagtgctacagtaactcacatgtgctaatgatcggcttaattaggctcaaaagatttgtctcgtggtttccatgcgaactatgaaattagttttttcattcgtgtccgaaaacctcttccgacatccagtcaaacattcgatgtgataacaaaaaattttctttttgcgaactaaacacaccctaacatacctgatgggaggtttgcaaaatccgagatcaagtaggcgagtaaaaattttgaacaggggctaatcaaattcctgtgcatcactgcaatgatgatcggtggcacttttccctgcttgatcaaatcagttgatgctagagctattacatcctaggcttcaattcaaataacttgatgatatcatggtggaaaccaccttggaaagagagattgaattctctctgttttttttcaacaatgaactgtattctctcataggggaaaacaaattaaatctgcaacttgacgatagaaaatcaataaaataaccttgtcattacggaagagaagcggccagggtaggtagaacatcactcgagccagttgcctattgtcaaatagtatgaacaatgaaaaatgagaaaaatgaaatagaacttggctgcttgtgaggataatgatgacatgcgagagattcatcaagcgatcgatcttctgattgatttcagaaagacgaaacaactgttcgaagctctcaaacatatgcaaaattagttgatctaggcgaggtgccgatcacaacagatcgtggtcggagaatacaatcacgaaggccttcaagatcagatgataaagccaggatgacatgccctttaataactggcatccgttggctctttagtactcccaccgtccctaaatatttgacgtcgttaacctttttttaatatgtttgaccgttcgtcttattcaaaaaaatataagtaattattatttttttctatcatttgagtcgttgttaaatatacttttatgtatacatatagttttacatatttaaaaaaaatgaataagacaaacggtcaaacatgttttaaaaaaatcaacggcgttaaatatttagggatggaggaagtaactggcatccgtttccacttttgcgtgcatcacttgaaggaggcgaccagccacgacgtgggaattcaatggtcagggatgtgggacgccacagtttaatcttccatccagtcaaccatggagatcgccatgtacgtccttataaatgcacacgtccatcttactccaatgagcacctccacgagactggaaacaattaattagctgtaaatacaagcatctcgtgccaagtatatgactttaatttaggtgaataggttccactacaagaaacctaaccatttaagatacgcacacttcgagacgaaaaaactcatatcgatgaattatatattataaagataataacaaataatttagaaaagcactatctgttcaatgcttatgtagaacgtttattaagcatcaatatcttctacaataaaacctttaattatgtgttagctgcccccccccccctcaaagctatcctccatccccgtgcccgatctagcgacgttgctgcgctctcccatcttcatggcccacgaccgacatgctgttgccctagcagcctagctccctctaaattcggcgaacttcccttccacggttccaccctcacccttaccctaactttcaacattgacttgtcagagtttgttgaagcatgtttggacttcgctagagctagaaatcaaaggaggttttagatcacaaacagtgaagcagatatgaaggtcatgaatacaatattttggttggattgttttttctcatatgatgtttagcgaattcaaaaattcttagcaattgttattttcctcatacataagtcttggattgagggtttttttttaaaaaaaaatccacggtccacataggccaccctctagatttgtacacgggtgcgcccctcaccctgaagaattttcttcctgaacttgaagaagagaacctaaaccctcagcaagagttggataaaaattaagatttttgtggcacgcttttcaaactgctaaacggtgtgtttcgtgcgaaaactttctatatgaaagttactctaaaatatcatattaatctatttttcaagtttgtaataattaaaactcaatcaatcatacgttaataccatctcgttttgcataaaaaaaactttatcttcatcttcatcttcaggagaaaagaacaccatcatagctgagccggtggagatcaggaagttggacagagtgacagagagacgattccatgtgcgtcgagttagcgggcgattttattcctgtgtgatgtcgatgtgatgatatgatgcaaaatgcgtttagggatccatggccatggatacatagcgcctcactgttcaagtttgaacggtcttttgtgatgtgcgtacgtgttcatagtgtgtactaatcctagccaatacgtacctagaggagaaatatgtagatggaatattggaattgaagtatcaatagatcacattccttttattttgtactactccataaagccactgctcactccgtagattatacacattctagtatttcgaattagagtttgtctataggtccatggtactgttacgatgtgtttaatttagttataggttactaacttactatattttatgatttatgatttcatgatagagagagtacattattagaccggcctgttcgaacccactggttattcctttagttaattattaggaagggtcaccggcgagcggcggcggccggccgtctgcaagagctagctagctagatagatacgccggctatatacatagctagctatgccgtgacggtggccggaagcggcggccgccggtgccgccctcgggcttgcaggtgaagaaggcggcggcgacgggggcgccgagggcgtggtcgtcggcgaagccgcgggtggagaagttgtggcggagcagcggcggctggtccacgccgccgcgcgccatctgccggaacagcaccaccgccacccggtggatccccgccgctggccgggggctctcgtagcacaccacctcgcgccctgcaatgtgcaatgacatattattaccaatttacctccgtgcaccatatgcacacatatcgccaaatttacttgctgtgcaattgatagtgcatgcatgcagacattcaggcaattaattaacagtactgttagttcgaagatatttgtaagctaattcctatatatatctataaagttcaactccactaagtgtaggtaatactaattctctcttctctcgcgaagccatatcaactcaattgtttttaatctttgaatgattcatcaagggtgtaaattacatctcttcatatcacctcagttgtttttaacttttggatgattcatcataggtgtaaattgcatatctcttccccctaaaaggcacaccatacaatcaatcatttataacttttggataattgataaatataaaaatatatataaacatataaacacttgaaaaaaaattgtatagtaggtaagaaagaaaattttagatatatcacacaattctcccacagcaacgcacgggtacccatctagtttattagggatgatgtacaaggctagcttaactagatatactcccttcgtcctagaataaatttatttttttcctctcatttgttccaaactaagtttattttttaaagtaatcattacatagaagtttgtaaaaatatgaaataaatatattagaagtagataaagagagaaataattgcattattgttatttgataaagtgggggtattcattattttttattttatattgagtgaataatgaatatatattttggggcagaaaagtacaacagaacaatttaaaaagagtattttattttattttatattggtatgtgtgggattaatggtagaggtgaaattgaacgaaagatgattttgattggttaagatgacaaagtaggtgcataaattaaacaagataatatgagtactgatcgtgatgcgggagcagatgccaaaaataacttatattttaaaacaaaatttaaactatataatttgggagggagacactaggaagcacaaactcgagcaaattattgtaataaaaaaagataaattattgcaaacgaaaaagataaattactgtaaaaaggacaattattgcaaacaaaaaggaagataagtactagatgtacgatcgacaaagaaaacgctataaaaagttgaaagttattgtcagggacacgcgagtcctttacatatgcacaactcacaactttcgtattttcagattagctttgctgctgcagcgcggcacctgagtttagcgaaacacggtcatcggctatgtaaagatcaaatatccaattacatggttctatttatgatagttagattcagacttttgctgtatatattcatacagcaaatgatgcattcctgcttatatctataaaggacatttaatttagtatttctaagatcaagataaattaatatactatacactgatgaaacttaatttgcatgataaaaatagttgcaattacaaacagtttagtagtggataaaacatgcatgacagaaatttgctatgacagtattgaataaataactagattgatgagtgtagtatgtgctaccgctaggtgttaagtagggtaatcagggcacttctataaatcagatggttgattttggcatctctacaagaaatacagtatatgcatgatccatttcccattttagcatgcactaacagcatctaacgtactaattgtttgaagatctcatgaccgttttgttttaattgcatattgcattgcatttgatggtaacatatgatatgtagatatattcgatcacgcatctcgcaaacacaaaactgcactaagagatctcatggaaacaaaaaaaaaatgaatgtgcagttatcaactgattcagctgacagtgttaacgaatgtttccccataccatagttcgcatcagttgttccaggaatatctgtcaccaacctgtgcaagcaaacaaactaatggtcaaattccaaataaccatgcttacgtccacgtactgaagttactgatcttcagagtttttcagacatctacatatatgcacgctgcatgcagtacaacaaattaaaaaggacaaataacgatagatatgatagatcgatcgatcaccagtgtaagtactctctcaacgtcggattgcttgggtttggagcatctggatccaccatcaccttaatttgcatgaatcagacatatacacagcaaattaattaatatgtagtcaagaacacagctagcatcatatatacttcaagaaattaaagtaacatatatatactgacgatcgtgtagaactggtggagatcccctccgacctcgacgctgggcctcgccgacaccgccgacggccggaggtcctcgccgttgacgacccgcacgccgttgtacatcacccggagcgtcacctccggcgagaacaggtccaccacgtcgccgatcacccgccccagcaccaggctgttcgccgacgacatctcttcaagctaaataaatcagttgaaactacagagatttcagtatagttaaacaattacccttgaggacgtacaattggattggactctgctcacattatatagaatagatagccaaggctgcgagcgtcatagtcaagaatcgaatgacatcgtcgctgcatccaccttcgaaaaaagatatcttcgatgcatccaaaaaagaatcttattctgatgtatgaagtgctacgtcattccagtgcatgcaagtacgcaatatatatgggccggccggctaactctttacgcatgggccagaattttaactagctctatattcttattaaaacgattttatggagcttgtaaaaaacagcttctacatcatacataggaactcacgatcacaaagttcattttagtgggtaagtgtattggtaagatgaaagtggaacggtatttgtcatatactcccactagtggagaaacccttatttatcccggtttgcaaccccctataatcctgggttgcaaactaggatcaagaattcggtcccgagtgaaataatcgggattaaagatacatagtagttaatatactcccaaatatagaaattaatatgactcaaaatttataccggacatcaacatttccaggccattgattccaatgcacgggaattcaaacatttttgagcaatcatgtgcttacaagaggaatctaagcaatttaaaatttgaacaataagataactaaaaggtttttttttctcgtttaccttaatctttgctaaataacacagaaatacttatatttagaaacagcgggagtaactttcacatgtgaaaatcagattgctaatttattatttttattccaaagaaaagaagccactctcgctctcaagactaaaaattctcacattagataaaaagaaaaagatattaaccgtccaattgtgatatatccaaattataacggtgtaaatatagttgtatataaaatatgatggcatctataaaaacagaagttaagagttctatacaattgtatctatgaaaatatgtgttaagagttgtataccaaatctggtttttctattgtatataaattacaattatatatcaaatgttaagtgttgtatacaaatccacttctacattaatttatctaacctcacacaaagttgtgtgggtcaattcactagttgtatctgatatggattctttattgaataattttacaacttttaaccaaaatatcagttatttctaaattatattttaatgaatactgtagaagggtagtttattacaataagaaagatattacatctcatagatatgatcgattgagataaggttgataagacatccaaaaaaatgaaacaatatatatcccttgtaagccgcatagggagggtgcgacagcccaatgtatcccctgtgtttgtatctaactcttctatagtgatcattgccgaccagtgcccgtggtggatttttcccgtaagggttttccacgtaaaattcgtgtctccgttgtgcatctattttcataacatatcctactttgtttcaaattatgattgatctttatttttctaaattagcctcgataacttagaaaacctaaattcaactacaaaattaagttttaaattcaaattttggatataactatttttttgaacgaattagctatataagaaaccaactagagttcgatgaaaacctgatttgattaattgtcgcaacatatgtaagcaaatgagcagagccataaaatgattatccaattttgataagcaagaactaagaacactactgatttgattaatttatagactgcattttgagaattacaagaaacttcaggaattcgagcagaagaattttgttgaaactcactgaaattggactggttcttgtgaaagttttgtaaaattgctatgttttaaaagaatcttaatttggactaacttacaaattattcaaaaagaaactctgctatgactgcatgtgttgttctatagctatatatctctatgccacaatctctagaagctaagccatctctactctttttttaacagatacatgcagtcacaaagagttcctttttaataatttataagttagcctgagccaatattcctttaaacaatagcaattttatagaactttcacgagaaccagtccaattttagtgaattttcacaaaattcctctgctcgatcgaatgccttagggcctcatggttttccctggttttaaagttgattttgatgttttcaatgtagttttttttcaatattataagtcgctaagaacacatacaaaaagaatttatttttttcaattatttttttatcactaacaaaagttttacttttaaattattttttatcacaaataagctgttaggatccataagcaaaccttaactttctagtaattaacaaaatgtgaaggacggatcgaagacaggaagtctgtcggcactcggctgtcgttaaagaaagtgctggtctttttcaaatgtcacctcggctacctccaaatctactttcactgagctcgcggtgtgatgcacatgctacagtagatgaatcttaaaatatgtacctcagatcgcaggacacagaaacctacgttatcaacaaggttggaggagtcttccgatcgagcgcccaatacccccaaaaaaaaatcgatcgatcaaatgtttcagttaaccaatgagtgaaacatcaagttatatggtgaaacgaaaaactaccaactgaaacatttaaaaattttatgaaacatggtgaagatacacgttgaaacatgttcctatcacatatgaaacaacaaatgttaacggattgaaacatatgtttttctttcatcaaaatataatcatacgatatcttgttgtaaagatttaattacaacaaatacaacggtgtgatcggatcgtagattggataattagtttaggagaaaaatcattttgaagctcgctaaaatacatgcatgcatgcatcgatgaggtggagagagaggagagagtagt

SEQ ID NO: 4558 - DNA, 28307 bp, Oryza sativa
ctgaaatccaagcctcaattccggacgatctggcaaacaccattactccatccgtgtcccttgagcaacatcaattcaagctggagaaggccaagcaacggatagccgatcggcgagagcggaaggacattgaaaccactatccaagccaatcgacagcttgtgcatgaagagaaggctaaattagatcaactctctgttggaccgattcagtcgaatatagatcggcttgaagctcgcaaaattgatttactagctcaactcgaagagtgcaacgccgagttggattttgaaaaacaaaagctagccaatcttccaagtgtgttgatgaaaaacacgaggcctgggagatctgcttaactccagtgcaggtcgaaagctcgccttcgggtgtgttagcgtgccagttgatttgatcctgcaatcaacaagaaaatagagacagagagaccgcggttaaatctataaatgatagccaatcggctatgtgccgatgacatatcatttatctttgagccgatgtcatacgtgaatcgatcggcgggtataaataaataataaagaactaaacctactcgatcggctgtagatattaccaatatatagttcttatatcgatatatatttaaatcaagtgattgggatagatcggtcgccatgctgagacagtataaatcacttagatcgaaatatatattaataataggactatatatgtttatagcatagccgatcagatagatctagcatatatcggctaatactccgatactactctatatcaggatattaaaacaggtatgatatatcaaacaaaagcttaatatacttagatgcaacaatatcttggcataaaagacggatttaacatctcaatgaagcatatagagcgaatatagttaaatcagataagatcggctgaaacttcgatgctaccctgatcagcaaccaaaaggcaagctagagattgacattctaagcacgacttaatagatcaaatccaactagtgcagcattaagtatgaaaagaagaacaatatctagacaatcaagccgctggaagtttcatagagtggtagatatcttatataatctaaaccaatgtcgatatttaacctaattggctaccttctatcaacggatgttagccgattgcaggttagatggcgatattgctagagattatgtaagatatatgataactcgacgaattacataaacaagattagagtatcataaagatggaagcactaatcccgagaacacaagccgtcataacaagttttacctcttgttgaagatcaaaaccgatgcagctcaacctgaaagcaagaactcgtcgaaataaaactaaagcaaaaaggtggcgatgcgccgaaattgtattgaacgtgtgttagaaattacatatggctcggggtctatttatacccgagaattacaagatatgtccctaccggacacgactattatctctaacaaactctaaaataccataagtctttgcggcagacttttgcccatatttatctctaaggaatttacataaaatatcttaattaatagatacaattgccttcccaggactctatccgtatatggcaatcatcttgaagtacgtcgactcaaacccgatatcggatacaagtcgtattatcggaatcggctgtatcacttaacccagtctgactcggacttagccgatcctaatcgtagctgatccgaacctcagccgattcttactctgtttctgcgataatcctcatctttgattctgcttcaatccaatcttgtttctgatgcaactattaccaaatttggtcgttaacaaagtgccgttgaagaacagtagtccagattgagatcagctatcaagaacgtggctgacatgactaagtctctcaaggtcatccctggaaccgacgcccaagacatccaagctatcgaggaagtagatcaaattagacaacgggccgtgtcggctatccaacgctatctgtctcaatgacattttgtgtaatagaccctaagaatttttgtaatcggctaagaaactttggctaatttttataatcagctgcaaactttggctctttgtttactccatcttgatgtgccgattagtataactccatattttgctaaaaaaattgcaaatttttcatatatgtgcccccctaaatttacaatgtcaaaagcattgataaaattataacttgaactaagggcgatataacaatatcggccattgtacatcggcaaaccacaaccgattacaattaaaacaactaagggcgatataacaatatcggccattgtacatcggcaaatcacaaccgatcacaattaaaacaactaagggcgatataacaatatcggccatcatgtaccggcaacactagccgatcatgcattaacccagacacttgggtaatatttctttaaatacttgccatttagcgctcgtccatagacttctccatcgagtccttgcaacatgtaagctcccttagacacaactttgtagatctgaaacggtccttcccaattcggtgaccacttgccgaatttggtatcccgagtcccaatcggcaaaatcaacttccatacaagttcaccttctgaaaaagtcttgggcaccactttcttgttgtaatgtcgagcaacccattccttatcattggtaacctttgcaagggcccttaatctagactgaaccaagtcttccctttcatcggccatgagattataatactcatcggctgtcaaatcattttgcaactccgttctccttgagccgattctaacctcccatggtaaaacagcttcatgtccataaacaagcttataaggagggacttggatcgatccatgacaagccatccgataagaccacaatgcttcggccaatcgagtatgccactgccaaggatgatcagaaatcttcctcttaatcaatttgatcaaactcttgttagatgcctcggcctgcccattagcttgcgcataatatggtgaagaattcaacaatttgatacccatgctatcggcaaactaaacaaactcatcggacacgaaggttgaaccttgatcggtcgtaatgttttgaggaataccaaatcgatagattatatgccctttacttgatggtggattaatcatatcgatcatatcaattccccatcctctaaatgaccatggtttaatgataggattcaaagccgatgccggtgctctctgtattgctccaaatttctgacaatcttgacatcccttgtaatacttgaaacaatcttccagcattgtcggccaaaaataccctgcacgaccaagcaaccacttcatcttatgagccgattgatgagtaccacaaattccttcgtgaacctcaccgattgcaaccttagcttgattggcactcaaacacttaagcaacaccccatcaatcgttcgataataaagctcatcatccaacaaagtatactttaacgtattgtaacgcaatttccgagaagccgattgagatggattctgtaaatattgatgtacatcatatctccaatgatcggctgttaatgcagcaacttcaaccctaatgtatttgatcatcggcttataccctggtgccccttgggccaaatcattagcttcaatattttgttctcgagacacatgtttcaaagtcaccagccgaaactccatcagttcttggcacttctcattataaaccagtaatgtatcatttttgcactcatactcccctgccaattgactgatcactagcaaagaatcccccataatttcaatagcatcggcttcaacttccttgagtaactgcaatcctttgagaactgcctcatactcagcttgattgttggttgcataaggtttaatggtataagcaaactcaaaacatgctccccaaggggaaattctaactaagccgataccacaaccatgagtacatactgatccatcaaagaataaagtccatggcacaatctcaaccgagccgattgaattatcacgatgatcaacaatgaaattgactatagcttgccccttgactgccttcggggactcataccgaagatcaaactctgttaaggaaaatatccactttccaacccttcctttcaaaattggagccgataacatgtacttgacgacattggctttgcatatgacagtgcattcgttggacaatagataatgcctaaaccttgtacatgaaaaatataaacacaagcacaacttctccacaggggaatatatagtttctgcatctaagagctgacgacttagataaaatacaaccctttcctttccttccagctcctgaatcaggaccgagccgattgacttcccactggctgacagatataatctaaaagttacccctttcgatggaggaatcaaaattggaggagagctaagatattccttaatactatccaaagccttctgttgctctgccccccaagtaaacttttgatcggctttcaatcttaataatggtgtaaaaggctctaaccttccagacaagttagaaataaaccttcgaacaaaatttatcttgccgatctctcttgcaattctgtcatattctctggaggctgaattttcttgattgcattaatactcctttgagttaactcaatccccctctcacgaacaagaaatcctaagaactggccagccgatacgccaaaagcacactttgtcgggttcatcttcaggccatacttcctagttctctcaaaaaccttcctcagatcgactatgtggtcctctatctctttagacttaacaaccacatcatcaatgtagacctcaactaaccaaccgatcagatcatgatatatataattcatagctctctgatatgtagctccggcgcttttcaagccgaaagtcattacaacccactcaaacaagccgattgcaccaggacacctaaaagctgtcttatggatatcttcttcggccatgaagatctgattgtatcccgcatttccatccataaaactcaatatcttgtgccctgaagcagcatcaaccagctgatcggctactggcattggatactcatcctttggggtagctttgtttaaatccctgaaatcaatgcacaccctgaccttgtcgttcttcttgataacaggaactatactagaaactcactcagcatatcggcaaggacgaataaaaccagcatcatatagacgttgaatctcagctttgacaggttcaagcatatgaactttgcatcttttcggaggttgttggtgtggtctaagccctggtttgataggtagccgatgttcaacaattgatcggctgagtcctggcatctcataatactcccaagcaaagcaatctatgaattcctttaacagctctatcaacttggttctaaattctgaagataaattcttactaataaatgtcggccttggtcgatcacctggacctatgtcaatttcttccaaatcgtcggccgacatgaaaccctgtccttgcttgtcatcgagatcatctactgtgtccttggtgtaaacgtttgaaccctccacgacaccctcaaaataatagcttgggctctccgtcttcaattggctgtatatcagaatcggacacttttagaaaatctccatcccaaacttttccagataagcaatcgagaccatccatctcccaaagagctaaatcggcactagcaacattaactaacctgtcagttggaacaatttcaatcttctgccttgccactgaatcaagcattgatgcatggttgaaggaatgcaacaattagcatgaatccaatcgcttccaagcaacaagttgtaggaacccttcccatcgatgacaaagaatgttgtagggatagttttgctgccaactgtcagctccacatttaaaactcctttggtttccgatggattgccaccaaaatctttgagcaccatgtttgtattgatgagatcctcagcatttctgcccaacttcctaaatgtagcataaggcatcaaattcactgcagccccaccatcgaccatcatcttggacatcggcttcccattgacatagccatttatatacaatggtttaagatgccgattctctgtcccttcaggcttctcaaagactgcttgttctggtgataaaaccaacttagccgattcttcttcaacttcatcgacatcggcttgcttgaccccaaactcagcaggcaacgtgaaaaccatgttaaccgacgcagtcacaacacttttccctttagccaatctctttgcttcatcgactgtggcttcatcggctataggagcttgattcttaacacgccactcctgcttcggcttcgtcttctttaaccgatgattgatttcttgctcaacttcttgaaagcgctccctgttcctcaacctttgaaccctcctcttctaatttttcgtaaaaataccagaaggacaccattgagtcttcctgccttcattgtcctcttggttacaatattggttcaccgggcccaatctttgatgagcaggaactcttgcttgccatagccgattgcttctattgaacgatcgacttgaattttctgcaacattactgcacccaggatagtcttgaatagatggcagcctcataccttcattccagcaaaatctaaagaactcacagccccaatgaggatcaaaaccgccatcatcttcttcataatacctctccagctgtttgtcatacttcttctgatacttattgataattttagccgaattcacctgaaaacctcttgcacgacctccatcgactgttcggccagctgtatgcaccatattgacaggaaaaggattgccatcaaccttcatcggcctcttagaatcatcaaatttgattttgcctccctcaatagctgcctggatctgttgcctgaagaccttgcaatcattagtagaatgagacccagaattatgcaagcttctggatcttagctttaacagagccatctttaccagtcgaagacggcgatgctgttgtgattctgacttctaatcggtcccactgggcgtgccaaaaacgtgtttatgtgaaaacacgaggcctgggagatctgcttaactccagtgcagttccaaaactcgcattcgggtaagctagcatgctagttgatttgatcctgcaatcaacaagaaacaaagacaaagaaaccgcggttaaatccataaacgatagccgatcggctaggtgccgatgacatatcatttacctttgagccaatgtcatatatgcatcgatcggcagtcattaataaataagacagaactaaatctactcgatcggctgtagatattaacggtatataatccttatatcgatatatacttaaatcaagtgattgggatagatcggtcgccatgccgagccagtataaatcacttagatcgaaatatatattaataatgagactatatatattcatagcatagccgatcagatagatctagcatgtatcggctaatactccgataccactctatactaagatatcaaagcaagtaaaatatatcaaacaaaagcctaatatacttaaatgcgacaagatcttaacataaagggcagatttaacatatcaatgaagcatataaggtaaacatagttaaatcaggtaagatcggctgaaaccccgatactaccctaatcggcaaccaagaaacaggctagagattgatattctaatcatgactcataagatcaaactcaactgatacagctataagtatgaaagaaggacaatatctagacaatcaagccattggaagtttcatagagtggtggatatcctatataatctaagccaacgtcattatttaacctaatcggctgccctccactgacagatgttagccgattataggttagatagcgatattgccagagattatgtaagatatatgataactcaacgaattacataaacaagattagagtatcataaggatggaagcactaatcccaagaacgcaagccgccataacaagttttacctcttgctgaagatcgaaaacgatgcagctcaacccgaaagcaagaactcgtcgaaacaaaacgaaagcaaaaagggtggcgatgcgccgagattgtattgaacgtgtgttgtttgattacatggggctcgggtctatttatactcaagaattacaagatatgtccatatcggacacgactcttatctctaacaaactctaagataccataagtctttgcggcagacttttgcccaaacatatctctaaggaaattacataaaatatcctaattaatagatacaattgcctcctcagaactctatccatgcgtggcaatcatcatgaagcacatcaacctaaaccgacaacgtatgctgtgtcatattgtcggattcggctcaatcggctaaccccgtctgactcgaactctgccgatcttagccatagccaattcggactccagccgattctcactctgtttccgggacgatttccatctcgatttcttctccatcttcgatccttggattaccaaatttgttcattaacatacccacatgttagtgggccccacttcctcacctcatcccctctcttctatatgtatcctatcccctctctcttctatgagagcagggttgagcggagagcggcggcagacggagcaggcgggggtggagcggcggcgcgcctgggccatctccattgcaccacctctctccactggccgagcgcgctgccgaggtgaggcgaggggatggcacggttggcagctagagggggttgggcagcgatcggagaggaccgacggtaagaaggcccccaaggctacgagagttgaaaggattgaataaggagaggatagaggcgaggagaggggaggggagtcggtgagctcgagctctctatcctactcacccatcctcgccgaccaccacctgcaaccacttgctctgccgcctcgacgtcgacccccctcatgcatggcaccagcgcgtccaccgctaccccgacgccgagccatggctccgctaggacaggcacgggccttgctgcgaggtgcgacgatgaagactgtgtgaccgcctcgcccaccattaataggtttaatcttgttgattaagtgttcctatcatgtgagtgcgtgtagtagagctgtactcagtcatgtgtgtaagtgagaggtgtatgtgtgagttagttggatcggtgatagctatgacctgcatgcaagtgattacacagtgcacattgccttggaggagcggccaagtcaagtgaagtgagagtcatggtgtgtgtgtgcattagccgctggtgtgcagccacacagaaatttacttgtgtgtgcatccagtgcttgtgtgtaaaagttcttgtgttcatctgttagccatttcttcagcgtataaacaactacgtgagtgtgtgatcttgtgagctagtgccaacagtggtatcagagctaggttcgagagatgccgaagatcggcgacggcagcaaggctattgccggtgacgacgacaacagcaagctagtggtgcagcaagtgaaggatgcgggggtgacactatgttaccccatgctcggagggaacaactatggtgtttgggcggtgaaaatgaaaattttcatgcgtgcacaaggtgtgtgggctgccgtggagggcgatgtgtgggctgccgtggaaggcgacgcggccgatgagaagatggaccaaatggctctcgtcaccattgtccaagctgtgccatatccgagaaggagaaggcgaaggaggtgtgggatgccctcaaacagatgaacatgggtgaagagcgtgtcaagaaggctcgagtacaaaccctcaagaggggagcttgatggtatgtacatgagtaattctgagaaaattaacgatttcgctttaaaggttaccacgaaaatttcatagagtatgttagttaatgaagaatttaagaaactaacttggaccatgatttattaagaaatatttattcccttgtttacttcattactttaattaatttgcacattattttaaattctaaaacaagctaagtaatttttaaattcttacaaactcaatacaattgaaacacttgatttgaaagaaaaataaaaaagacacttatgatgaaccaacattgtcatgaacttacgatgtttgtgggttgatctcttatgacaaaacaacaattgtcatgataagccgtgggattagttaatgatgatttgtccttaattttgtgacgaacatcttattttcgtcattaggccacaccgccctccaccaaacgtcataaatgaaatggtataatgacgaacaactccgatgtcacgagaaaattgtcatagaaggtcacatgtgttgtattgcgcctttccctcttctcctccgcctccccccttccaataaatgttcccatacactcgttttgactttggtcaaagtcaagtttaactaagttatagacaaatataataatatttataatactaacttagcttcatcaaatcaataattgaatatattttcataataaatttgtcttgggttgaaaatattactactttttctataaacttgatcaaacttaaaacttaaagtagtttgactaaaacggagggtgtatataatataaaatgagccacttaaataaatgttcactgcaaatgacacgccaaaaattcctgaaaattttactgaaaattagttcgccttgtagcctgtcccataaaattttcatcaatgcaggagtcaatcagtcctcactcctcagtttgaaaaatgaaatacagtgtagtataactatacatctcattttcatatcaacaaaatttaaggacgaggtcttactgtagatggccataaggcccgaggcccgaaggcctggcccacagtacgtcattttgtcttggcccaagtagcccggcccgactgccggactgtgcctgggcctccccaccggcacactgggatggcccggcacgatcgggccagcccggcacgatgggccggcaggctaggcccgacacacaaagtatagggactaaaaatagacatattaatatcacggtccaaagaatagggacgtaaaatagacttattttagctatttatatatcacaacccaaaaaagaggcgaaatccctaatacacgattagtcgcgcgccccctccccgtgacatcccggcccaataaggattaggcctgtgtggcccatgtgagctgtgtgcacatgtttagtaccaccttgcaagtttagcacgagtggaaccgacttataaggcatcttccctccaaccatatcactcccgggttaacccttttacacgaaacgaggacgaaagtgtaaatggggtggtatgtgtaagtgggcccgcttgtcgattggtctgggctacacggttctggagagagggctgttacactcccccgcgcgcggagatggggccgcaggcgacgtgttttttttctttccgtatctttttctttttttggttttttaatacatatgtatacaaactttgtatacacgtatataaattttgtatgtgagtacctttttatatatagatgtacaaactttgtatatatacatacataaagttggtatattttgtatacatacatatacaaattgtatatacgacgtatacaaactttgtatatgcgtatataatttttatacatatatacatattagaaatatacgtatgtatatactttatgtatataaagtatatatgtatatacatgacgtgttttttttctttccgtatctttttctttttttggttttttaatacatacgtatacaaactttgtatacacgtatataaattttgtatatgagtacctttttatatatagatgtacaaactttgtatatatacgtacataaagttggtatattttgtatacatacataaacaaactttatatacgacgtatacaaactctgtatacgcgtatataatttttatacataatacatattagaaatatatgtatgtatatactttatatatatacgtataaactttataagtatatatgtatatacatgtataaagtttatacgtatgtatataaagtatatctctactacttaaaaaatcggtagtggtggtcttgattcctaacacagcagacgcatttgacagacacacgtaatctcaaccatccgattgccatatccaactgcctcgatctcctccccaccgcgcatcgctcctctccccttctctcggatcgatctcctctccctccccacgccgcgtccttcgccctcctccctgcgtcgcctccttgccccgccgccgcgtcgcctcatcaccagacccgcgatcaccgccgccctctccaatctaccgcaccgccatcgccgctccctctctctccccgcgtcacgccaacccccaatccgtcgccgtccccacaccgcgccgccgcccctcgcctctccaccacgccggtctcctctgcgagcgctgcccacgattcgccgccgtcgctcacaactcgtcgccgccggctcctcgcctctccgccgccgtgacaccgatgcccgccgctctacccttactctcgttcgcgacgccaccgatctttgtatgcccgcctccgtgccgccagatcgccgtcgcctggagtcttcggggaacagcctcaacgaaaatccgagcaccgtcgtcgacggccatctccgcccagcgtgcctgatccctggaacagcctcgcgcggtgccaaaaccacctccgccgccgtcttgaagctggccgtcctctcgccaggtgccgtcatttgcccctgatgtatggtttagatacccacggacaaaatcccacatgtactagctcactgcatcagcaccagctccgaagctccgatctggcggcgtcgccggcatccaggcaagacatcaagcctacgctgcaccaagtaagctacccgatctcttatttttctctttaatttgctttcttcagctcctgttttgccatctttgtaagaataagaaatcattaggggtggctgcagtggtgcaggggatcgatgtgatccatgctgtcgcaatcaggttactaattaatatctagctcgctgaccaaacaaatttgtgtttttgtgtatcaggcttgtgctgtggagtttaaacatgctaaaagtgtttcattgattctttgattgcaccaatgtgatgtccctgagttatttgtggcatgggtttcattttttctactgcaacaatctgttggaatatatggaaaacggtcccatttcaatgccattttttaagatgcagaatggcgtaatgtagtatctttattgcaaggaatgaatcacactcttacagtattttgaaaagataagaatgttctcttcttgctgccttaattttggcctgcatatttgtgtccacatgtatcccattattaaatggtgttatgattcctgaattcctccgtctagcatatccgttgacaaattggtcaaatttaggcatgattttgcatgtttcagaccttcagtatatatagtacggttaatctgatgcagaatagtcgctggatttaaaaccaagttctatcctaagtttacatcaaatagtggttatttagagaagcgggtagactgaaacaatacaatcaatatatcttacttgcaaatttgacctccctttatagcatttgcttgattgtggcaacatttttagctgtagaagtactgggaagtatggcagattgccaagtggataagcggactgcagattgtttttttgcttctgcgtagcaggctgaaaaattgagcatctcgcaggttaggggactctgcagccttggtgctgcaatttgttgatcaaggagcagctgagtatgcaggttaaggcaatgtatcctctgttcctagatcctcaaacaagttaataaagattttattgccaaatttgatttggatcttttactgtaaatctatgaagttgagcatactctgcataagatgagaggaaggcacaggggagggaggctgaaaatgaagctcgacgttaagaaaatggactttgatgagaggacgatgtggaaaatggactttgatgatagggtgatgctgaaaatcgactttgatgttaaagaaaatggttgaaaatgataggatttcaaatggttcaaaatgataggatttctctgcatacactgcattttgatggagttatatttacaaaggattaggatgaaaaagcattcgcactttatttccttcgatgagataaaatagctaactgtactttatttcagacatttgcatatgggttcaatttgtgttggagcaaagctgctagatcgtgtgaatcaccctggtaaatctggagctttattttcagatgtatttactctacaaaaactgtcaaagaactaactcaactatcgattttaataacaagatgctttcagttttatcatgggttattatgttttgttatatttctaactacaggtcagcatcacttagttggtgcaagcaccgtggaacatatttattgagttgaaccctaatttaattctaatccgattgattgcaaaattatgtttttttcctcgacggtagggtgcgggtgcactatttatgccgcctgagagcatatgctgctccataatggaatcaacattcttgtaattgtatccagttaattcttcctaaatttaattggcgccaccagttagtactattttctacctacacatagtggcacgaaccagcactaaccacggctgaagataattcttcaggttatatatatatatatatatatatatatatatatatatatatatatatatatatatatgtgtgtgtgtgtgtgtgtgtggatattccctaatggcagatccaagggctgtgtttggtgctgaatgaatcagttcttttttataaaaggtgtaagaaagtctgtaaaaaagttgtaccagaactgactgagcttccttttgggtgaaattggtttgctaccacaagtccttactttaacaaaaatgatatttcctatgccaacctatctcattctatagttagttgttaccacatcttattttgactatttaatatgttttacgacatgttaccgtagcgttagcacgggcatgctactagtacatacgtatatacatgtagtagagaggagagactaaagggtcagaaactgaccgcgcgccacgccaggggcgcgactgatcgccccttaggggccccaagtagagggaggtaaaatagactttttttacctatatatgacacagcccaagagagaggaaaataagacttattctgaggaaaagcacgatgggccgtcgtgccttcgggccggcccgacacagcccaagtcgtgttgagccgtgcctgggccatgtgtgcggcccgtgggctggcacggcacggcccggtgcatcggccgggccccgacaagcctcggcccaggcacggccggtcctgggccgggccgtgccgggcggcccagatggccatctataggccttacattccagacacgtaactgtacatcgatcaggagaaagtgaaatggtttggctgcaccacaacttatggtagttatagatagtcttttccgtcggaggatatagatagcatcaatcagcgccctttgtcctggcaatgcagaaagcctggaggctcatgaagaggatgagcagggccatcgtgatgcacgccacgagctccctagagccaagaacccgcgccttcaagaacctgttgatcctcaccttccagcagctgtcgtgatgccgattcaggtcgtcgatcaccctgtccaacgccggcaccctcgtcagcctcaccgacctcgtcatcccattccacagctccgccacctccctgtcgctcttgaggtggttcaggatcacccccgactccctcagcagccgggcgtcctcgtcggtgtcgatgatcccgttcatcagctcgacgtacctcgccagcaccagcgctctgcgccctgttgacgcctcgaaggcgaccatgttccgcagcacgacctcgctgttcacgtcgacccggatcaccgggaggcgcagcgtcgcggcttccgcgcagaactcgatcgtggagatgccgccgttcgccgggacgaacctgacgccggagtaagctagctcggcaacacaaggcaccgcgatctcctcgagaagcggcgatacgcagctcttgttgttctgaaaatccttaatgggttgttgtccttgtgttggctgtgaattcagttgttgcgcgatcattgagaggcatggtattctggtgaggagcttcagtatgatcctaacaccgagatcaaccagcactgaaagaaacttggtgacacgcttgatgagcaggtctgttaatgaacgcagagtactcttcatgtgatgcttcgattgatcatcatcatcatcatcatctgcttgttctgtggcatcatccaaatccaatccttcgacatagcatggagccatgttagagtagaggaaatcaagaaggtgggcgtgtcgtgtcgtgtcggtgcacggagagcccgtggccacgagggaggagacctcctgaaagaacccggacaggacggagctcaggacagattccgctgtcgcacgcgacgagcctcgcatttccgtcgccttgaggagcagaaacagagggatctggttctccagcatgacaacgtcgtgcagcaccatggtgtgagaggatgtcctccgagatggatcaaccaaatgcgacatccttgacgggatcctctgcagcgctgcccgctggctactgtcctggctaaacgtctgcaagaactcgagaaggaacgacacgtcgatggccatcatccatgctagtgcgtcattgctgaggcctagatgcctagagaaaaaaaagaaattaacaggtacttccttcgtcccaaaataaacgcagccatcagtttccaatgtccaatttcgatcattcatcttatttgaaaattttctgaaaaagctaaaaaaaatataagtgacgcataaagtactattcatgttttataatctaataataacaaaattactaatcataaaaacatttcaaataagacgaacgatcaagattagacacgaaaacttatggttgtgcttattttgagacggagtgagtatattgatagggatggaatatgaagttagtcgaatcctttcttttacatgcaaactgacctgtggtagtaagctcgaatctcgaattctagcgtagcgaagacagccacgagctgttggaagctcatacctgggaggtggcgttgggctctcctggcagcagagagcttgtacatctccatgtcacggagctcttcgcgacaatggtggtaagggccaagcgcaaccagctgaggggtgtaggcttcaggtttggtgcatagtaggggctttgggacatcaaagatggagatgggttggctgtcatggacttcgatctcctcatcaagaatacgtttgatgcgaatgatccattgtgcttcgtcgaattggagatttggacaaatccccattaattgttgaatcgtgttaaacggatcggaagattgatttaagatgatatgtagtaagaacgagatgagcatgcaaatcttgttcagttttgtcaccaaagaaaccaaacctagcggagacagcaacataaggggaaaaaaatatgttgactgttactgcatttttttcctgtagttaattaatagtgtaaccatgacaccagcagattaaagcttcaattatggctgaccggttaacgttacactagaagtaccatccgtgcgttgctatggatctaacaagtaatttatttgggaacaaagagaacatttttttaaaaaaaacactatacaagttggaactgattttccgaattagattccagatggttgtatattttctgtgaatacatatgcttctgcatacccaataagccattcttatatatttattttagtaagaggaagaaaattatgtctatatttatagctaataataaaaaaaatacataaagcttccggtttttgttggttcatccttttttttttttttgccttttttctgattttttttttgcacgtggaaggtttttttttcgcacacgcgttaagtccgttttttatctcgtctggtctgatccgcacatgtgcgcagcacgcctccagccaccggtgggccgaaccctatcgccatcgccacatcgatctacttcaccgtatgtttcctcctttaatttattgcaaatattaattctccactcctccatcattatttttccataattcccctttcaattcggctttaattcacggaatttaatctctatttaacagtttcgtgtttgcagctggatgagccaccgctccactcgtgaagccaccgtctcgccccaccttatgccaggtggagaggaacttcagtgagctacaatctgtgcccctagtgacgcagacgaggtgttcagggtgcgctgccgcggtgctagagatgaaacacatatcattgccgccaacgccacaatggaaaaagagaaaggaaaaaaaaaagagacaagagaaatgaaaagggagcggatgagaaggaaaaaaaacaaaagaagaaaaaaaaggaaaataaaatgttttaggtgggtcccacttgtcagtcaatgtaaagttagtgttggtgtcacatcagcatccaagtggcatgccatgtcagcaccaagtaacatcccagagggcttcgtagcaatatcagaccagaatgacacactttaacatgttttaagatctttttttttttgcattttgggagtttgacctacatgacaccgacgcacaagtttagagattaattgtgcactttacttttttattattgtaatacatgattttttttattaagataagtctttgactaataatggctttatctcatagtactagcgtgaccgtgcattgcaacggcctatatagagatgggctgcatgggcatattggtttacttaaacgctgtgggaatgcttggaatttatagcgccacgtcatgcgattttttcagaaaaaccctcctgctttcgtaaaataatgcccacatccgagtttgtgttcaccgtacgatcgccgtgaggctcgatccgaccatccgtgtggctcagctggcggatgtttcactgccctcggatcggtgatttgggaatgaacggcttagatatcatgctttcaccctcccccacaaaaccctagcgctgcccagccgcccccaacctcgcgccccacccccacgcccgatggctggtgccgccgcctcgccctctcgctgcaagacgatggtggcgccgtctcctttcactcgccctctctccgcgggatagcggaagcgccatctcattccccggccgcgccctctcgccgcaggcaatgtctccgttcccttcccctgacagtttgggtgtcgccgaatctcactgggattagttcgccaccgtagggagttgccgggactggttcgtcacctctgcgacctggcgacctgacgatctgctaccacgcattctactcctccccaggtcaactttacactccctttgcctaatcctcttaatcaatatatatgatcgatccagcctgcttgcttgcgctgattccatatttgttgttctactcctctgctgaagccatcagcagacacaatttggtacactactacttaaatccctattatatgcatatatacatatctgttctagcccctgatctctattcttgacttgctgctcattatgagtttcacatgattggtaggaaggaaagaaaaaagggagtgcaggctagaatgctagattattcagtactaaagtttaaacatcaccgtccaggtacagatcaaatcctctccttctgtcctgtatatattgtattggaatttaatatatgttttcaggttgctgacatcattctgttgattgctattatgtctacaaaagtttaaggattactgcagctgcctatatgatatgattaagatcttttgcactgtaatagttgacagattttcttggtcatctgtatatgttttttttacactatatgaatgtcgtgctaaatcaaaatagctttatataggagcagcaaaattttactatgaaaatattattatagaaaatggatttgaaatgtatattattatgggttctcaaccatcttctcctaacagcatttgtgcccctcaccaatagcctgctacgatggcccactagatgccatggccgcatgtgttgttcatgctggtggcagcgatggtggcatccaggcccacatcaaggcctgcgccacgctgggagcaatctgctcctccgttgtcaccgcacataacaccatagtcgttcaggtatgctgctgaatttcttccttttcagtttgctctcttcggctgatcggctcctatgcgggcttctgagataaggaggagaagaaatgattaggctgacgccagtaaaatttctctctttaacaaaagcgttctatgtgcttggtaaaatttttagtggcaaatctaagtttattctcaaatacatttgttcctgcaacttttttaattataatgtcgtataacttttatgccagctaacttctgcgtaaaaaacttttcactaataatgataaaatattgaagatgacagtgcaccatctatgtcaactaccagaaatgtacaggttaaagatgtgtacatcatccttcataatgaaatcctgatgtacatcggtacatatatatgccaattgtttctggaatcttaacaaattggtctacaagaatatatacttaaaaaaacctttttttattattatcaattacgctcattcaggattgtagataaatgtatatgatatagtactacatggcagatgtgattttttccccaagatatatacttcaaaaatataaaaagttagttggagagttcaagttttgatgttctttgcttagttgtcattttcctgtaaatgttaatgagtgaattctgaagtaatgtcagtattccttcattgtacaatactggtaataatattttgtgggcatgtcaatgagttttcttgctgtcacctttctatgcttctgtttttaggtatggatgttttcttattgtcttcttttgatgatatatgtggtcttcatatttcttatcagataatttaggtttagttccacgatagcatatcatgtttatgctatcagaaggttttgcctcaatttccttcctctccaacaaatcatattttatttgttaattcgtcgtgcgctaattcagtacacataatggtaacatacgcatttgcattgatggtattctttgtcgacaatcttatattggctattgtgatgcatacatcatcagaaattcactgtaagcctgacaatcttggcatattacccttatatttggatcatgcagttaattttctatgagacaaacctcagggtctttacggctcagtatagacagataattgtgccgatattaaggtaatgatatgatttcatggtgcaggtcttttagcctcctatctggaggaagctccattattctacgaatcatattgtaaccaatacattgggtcaatattgggtctataagtcaaggcagtaatcacagattatgttgtacatctagcgaacaaatatttatttggttcgattgaagatttcagtatttgtgaactttactagaccgcaattactacatttttaaaatcagtgctggccctatgtatgttagctaacatttttcttgtgctatagtcatttctatatctgctactattgtttaatatttaatggaacattgatttcataggttagcgttgtttgcagggtgtttcagtgacactgaaaccatggttgcctgagaggattaaagccacaggtacttctgagttgtaacctgcatagttccattctcggttgatctgtgtagtccataccgattaacaatacatatgtgctattccaaagaatccaacccttagtatctctagctatacgtactgtgttattctcttttctgctttgatcataaagtattatttcaatttatttgtgtgtgacgaagtgacatgcacttcaaacaattttacatgagacatgtcatatgttccaatagggcacactggggtgtaattttttcttgacaagcattattcctactttcatttttttttcagcgctgcattgttttggaattttctaataacccatccttccaattgaattttttctttgcaaatatacttatagagttttcattataagctgacttcaaaatatgattttataacttttttaattcatgaaatgttatgtttgccccttctccaaagctacagagatatttcaacacggtttcttatatgagtatttgtactacctactatatactcattgtgtagcaatatatggatgacatccaaacatgccctgtattctataggggatacctcaaaattctgtgccattatgcaaaggaggtaccaatcgtctactaatctgttgtaagtgatgtactgttgtttttattaagctaaagcactaaatttttctttgtgctgcagtgctatagatgagaaaagattcaattagttcatgacgaaggtatctatgagaaaatgctgcaattctcatatcacctaatgattgttgttttttctaacctatactccacattatgtaagatccattctcctctgtcattgctacttttttgtaagtgtacatgattgtacaaacaattatttgagcaaacagattgtattcacatttaaatcttggtgatagtcacaatgtgtacatgcatatgtgggtatgcttctgacataaagttcttttagacaatgtttatatataattcttaaaagttacaactgtagatactgtggctgtgttcgtttgggtgtgttgggaaccaatctcctgaccacagaaaacggagtggtccattagcacgtgattaattaagtatttattattattttttgaaaaatagatcaatatgatttttaaatcaactttcgtatagaaatttttttgcaaaaaatataccgtttagtagtttgaaaagcgggcacgtgaaaaatgattgagttgagttgagaaagttgggaaaagaagtcacctgtgttgttttgatcttaataacacagcttgaaacatttatacccatgcacgcagcgtagcgcgtgattcttgctagtatatattgaaataatctagccggttatttttttaaccatcaactttttttttatgattctccttttaaccaacagcatgaatttttcagagggcggtgcttgcacacatgagtagggatatgacgacgcactaccggacaatgcctaatctctcctggttcgcacctttgtagtcccggttggatgtttttccttttttttttccattttttccctcttaatttttagtcacggttggtgttcccaacatggaataaaaagagtagagggatggacactttttcaaccgggactaaaaatgatcaccaaccaggactaaagatcataaaaaggctatgggctttccaaccggggctaaaggtgatttttagtcccagttcttttttgaaccggggctattgtggttttgggtcgacctaataaagatcagttctccagtagtgacgcctgcgcatttattgttgtagagatatgtgataaaaacataatcataagtaaatacttttgaatagggatttaataacataaattttgtgtcaggtagatttatatcctaatagagtaatttttagtcaaaatctcgtcctaaagaaacaaaatacatctttatttttttttcaaaccaacgagtaattgcaactaagggcacttgatcggtcgataacatactcccttccatagtagaaaaaaaagaagggaaccagaggtaagcggttaggtttccttgacatgcaatcgaaccgctttgagccggctgcaccggccgggtttttggcgaactggaccggcagccatactaacgggccacaaatgtgctgtctaatggcccatttgttaacaactagtgcagctggtggttttttttttggcaaaaatagatggaaaaggtgcactaggtggaaatcgaactttggtcctctggtccaggagttgaaagagcaaagtcctatagccatcatactatccaacaacatataacataagggaatatgtaatatatatacatgtagactgtgaccacggtttgaccgcccgggtcaccggtcggaccggcggaccacttaaccgagaaatcgaccggatcacccaccagttgcattagtatggctgcttgtccaactagttccagtttaatgtctggtttgccaaaaaattggccggttaagtcggctcaaagctattcgattgaatgtctggtctttgaaggaaaacaaaccgtgcttacctctggttctggttttttcgttcgaaccatcggtccggtccggtttttctactatgctgcagatctaggtacttccatggagacccagccagagttgaagattgaaaaggaataaaaagaaacagagagagaaaaggataaaaggttgttattttagtatcactccaggttcctataagtttatgatgaaacaagacattaatagagttgttggaataggtgtttctgtggtagtgatgtatttgataagcaagtatgtagtgtgtgattgattattagccacattttgtcataaccaaggttagataagttgtggtagtcacaaaaatatagtggataaattgctaatcacaaagtgtgacaaagttagcaagaaaattgagtctatgacacgtgattaacaaactgtggtagccaaaagtatagtgtggcaaagtgtggccataaaccaaacacccctataggacaacatcatgcacatgagcagctatacatgatgcatgatacatgagagaaaaatataaatattcaccatacgatactttgacattattgtgagcaatttccataacaatgtgtgacaaactagataatatgttgctctcattatatttcttctactcccacgtgttgtatcggatgtagataaagatctctttttctagagacggtcacgctaaattgctcctccatgtccatcccatcatgtgttacaccgtgagggagatgccaatcaaagtggtatagaagagcagtgagagccaactctattgttgcatgtgcaaatgtcatgcctaggcacatcctccgtcctgccccaaatgatataaactcaaaatgtgtacccttaaaatcaatggttgtgtcctcgaaacgctctggtataaacacttctgcgtcatcccaatatctatggtctctgccaatagtccatacattcacgatcaagattgttccctttggaatatcatatccaaggattttacatgactcttgacactttcttgggacaagtagagatgctagagggtgcaacctcatggtttccttgatgatgttctttgggtactttagattaatcaagtcatcttcagttaccctagactttccttgcaaagcatgtcgtatctccgcttgtgccttctgcatcacttcagggcccattcgagtgttgttgatgttgtttcacttccacccgcaaacatgtcctgatgcatgtcatacgtacatacatacatacatacatacatatatacatatatatgtatatatatatatgtatatatatatatgtatatatatatatgtatgtatgtgtgtgtatatcacatcattgtaagaatagtaagatttattttatccactttatgaatggtggcaggaaataacaagatgataaaaaaatcaatatacaaatatactctctttattctcaaatagattgtgtttagaataatgtagtgccactgctggagaaaccatctttgttgggttcgccaaaaacaacattattcctggttccaataagaaccgggactaaacattatttttttgtcccggttgaaaagccaacgtcacttttacaccaatcaggactaaaaatcatttttagtcccggttcaaaaagtgaccggggccccttactatctttagtcccggttggtattgccgaccgggactaaaattcaacacgtcgtatataatccctcgcacttatcctcccctcctagatcacaaacactcccccctccctttcatcctctctccactctctctttcctctctctcttattctctccttttctttttctctcttattctctccttttctttttctctcttatcctctccttcactttttcttgtagcaatagagggagcgagtggcggcggccccatgcggcgacggcgacggtgaggcagtggagggaggcggcgcgagaagacggggtcccggtagattaaagtgttagatttggttgatttatctgtgaatttgttcatttgtgatgcatttggatctgtaaatttgtgatatggatgatttttgtgaccgtggatgattttgtgatgtttatgtgaatgttgatgattttattatggagtttggctagaaattaatatgcaaacaacaaaaaacaatgaaaaaatgactaaagatggtagcacctgccacgtgacactaccactaaagatgggcatctttagtgacactatcactaaagatgggcatctttagttccggctatttcaatcaggactaaagatgggcatctttagtcccggattcggggtcccggctatgtacgcgggattaaaggggttacgaaccggaagtgaagatgggttttccaccagtgtgctccttaaaatcataacacgctgcatgaataaatactaagatttgatatttcaaaatgacattacttggctgtcgtagaaatatttccattttttatgccaaaatgatcacattagtacataaaactactttcatcttgttataatatcaaaattttcaggaatatgtgattcaaaatggcaataatcaaatatgtgcaccagaaaccaaaatatatatgcgttgatcccctaaaggtcaagtaaaaaggaccaagaattgacctagctatatggcttcaactagattttgtttgttgcagaagtaacaatatgtgaagtagaaagggaaaaatgttgccatcagcaagatattctagtggcagaggtgatgcaaagagggagacaatgctttactttcaggagatccttttgggccgaaagaggtagatgaatggcatgtgattagttcgctgattaattaccaacctaaggcccaacgatgatcctgacaatttgatgtgtcaccggaaaggctaacgcgcggttgatcgctggcagcgatcgttttcttttcttatttttttctctgttagtaagtttatacacctaaagtttacatatctaaagtttatccacctaaagtttgtaaagagaatgtttataagtcaaaagtttatatacccaattcaaattcaaattcaaattttttatattttcctcttttagtaagtttatacacctaaagtttacacatctaaagtttatccacctaaagtttgtagagcgaatgtttataagtcaaaactttatatacctgattcaaattcaaattcgaattcaaatattttatatttttctcttttagtaggttgatacacctaaagtttacacatctaaagtttatccacctaagtttgtagagcgaatgtttataagtcaaaagtttatatacccgattcaaattcatattcgaattcaaatattttatattttcctcttttagtaagttgatacacctaaagtttacacatctaaagtttatccacctaaagtttgtagagcgaatgtttataagtcaaaagcttatatacccaattcaaattcatattcgaattcaaatattttatattttcctcttttagtaagtttatatacctaaattttacacatctaaagtttgtagagcgaatatttataagtcaaaagtttatatacccgattcaaattcaaatttggattcaaatattttatatataaaatatttctatacacaaagtttatgcgtgtaaagtttacggtataaagtctgtgcacacaaatgagagtattagaatttttttctcctaattttcttttacgattttttttgaaatttatgatgtaatagaaaagtaaaaaaagagagatgaaagaggaggtttagggggga

SEQ ID NO: 4559 - DNA, 17648 bp, Oryza sativa
  unsure (1)..(17648): unsure at all n locations
agcgaccccctaattattggcgccggccactcggccagggcatccgcgatcctcgtcggcaggcactgcatgccactctccccaccgtctcacatcacatgcctctccaacctgtcgtcgtggcgcgctcgccaccgaccgccgttgccaccgcacgccacgctttgactctacctacgtgcccaaacacagcacacaccgtcccccccggccacatttgccgttgttttattacgcgcgcgatggtccagctgatgcgtgtcgtaggcgtacgtgccactgttcgccgtggtgcgtttcgatcacgagccagtaattaaccacggcttctagccagtcttcgtctatcgtcgtcgtcgtcgcatgtgcagggtggattaggtttgccagtcgctggcatatgcatcgagctatcggtttggtcttggggataaaatgtcagcagcgtgtcactagttttttttttcttttctgtttgttcttcccgttgtttttagatttgcgtggtcaaagtggcagcagttggtgactgtaccgaatactgacatcgatcggcgtggtggtggtggtgatggtactgttcttttgttatccacggtggcagtcaaatcagctgctcgtccaatcatgcatgcgttcaaagctggattagttgagagctcagtagttcaaagtagttttttttttccctagggttcatctccacttgtcatttgctgcttctcatcgggacactttcatactgcatgctgaaaggacagaacactaattatagtagtactttcttctgaacctcatacgctcccaatggaaatggaaacgagccgttaatttctcgtgaacttctttgcaaaaacgccacaacgtacgatttccctgcgaaacttcaccggaattctgacaagcaccaattctactagggctctaggcatagcgtctttccgtgagaacgcagttaattaaccaattaaccatgccggaaaactggaccctttcgatcgggaaacccgggaagccaccggactgaaacgaactgaaacgaagtagagtagctcgcagcctctcagctactactacgttgtgaccaggaaacgcataggttttgacctgaccaccaccctcattcaaagctcgcactggcctggacggcgctctgcctgctgggctagctagtctctctccgtttacggtagtttctgatagctgcagcttctcttaaaacctctcgctgttagaaactctttcaaatagtctagattttcacttagattttgataaggggtgtgtttagttcacgccaaaataaaaagtttggttgagatttgaacgatgtgacggaaaagttggaagtttatgtgtgtagaaaagttttgatgtgatgaaaaagttgaaagtttgaaaaaaagtttagaaataaactcggccaagatgtatttgtagaattcagaaaatgcattagaagtcggaagctaggtttttcatttttttcatattctcacgtactacttcttagaatcttaacctacaaacagtacctcgatcactctctgtactgcaaccaagcaaagccctgtggccaccggcctgtgccaatggacgcgctgcacagtagttgatgctactcctcctcgatctgcttgaccaagcctcacaagagacaaggaataatgtgaccaaaggtaacaagaatcacacacgattttcgccactagacactatagttagacagtgccatggaaaaacagcactcgacaaaattcagatcatgtacagtatcagcggacagctagtagctcagctcaaacactagccaaatttgacagatctcgtgttgtttctcatcagtcatctttatcctggagctcgaggctaaaagcaccagattcctcgcttctttgattcgattggatttgcttaattcagggatcaaagacagagaataaaaaatatagtcctccatttaacaaccagtagcagcaacaaacaaatgggtgcctacctggaacaaaaaaaattgcacacactgatcggtgcgcctgaatgattgagagttgcatcctcttctttccgttattctttctccaaatagaatatgttcgggaacaagatttaacatgctggatgccattattatcgaacaggaatgcaaggatcatgtggtggggccatggatgccgtggagaggcaaatacaaagacagcctatgtcgcatcccacattgaccagaatagggacctcaatcatcaagtgtcgatctctcgggcttaatagtagtagggagtattatccaatgtaaagccaacgagtaaggtacggcaagtggagtatcttctgctaatctcagctttcatagtaggagtactcgctttgagattctatattaattgacattttggacaagattgaagttaaatttttataactttgaccattaataactaaaaatatttagtttaaagaaactagaaaaacatatacatttatttattgtatatattataatagaaaaataaggtcaaaggtatatcttatggaacgtgtaattgtccaaagcgttaattaaaatgaaaccggagggagtacgttttttagggtatatatttgatttttaaaacacggcatttgtactaggttttattcttcaatgagtactccagataaaaacaatagcaaggtgcctaggtcataataaaaaaaatgaaaacaaaatatatgttggtgaaattataagtgcatgacttcacccactggaatacaaatacaacatcgatgaatattcggttttactatattacttgcggcagtttttaggcgtaaaaactttcaaattgtggaccgttagacaggattcgtacagaccggatgataagaaattgcataaagcgcgcgggagaaaagagcaaacgtatgacctccccgtttatgactgaacagagctaaccgattggacgaatttggattttcgtttaattacataccaattccatatttgttacatactagttacggtaaccctaactcattgtaactacattataatttaggcataaagatttttatatgtttttaataattgcatatgttatattatagttataatatagttacggtggaattatattacagctatacaatatactacagttagatctaaaagttttccacataaaaaatttgcagcagttttttaatagtcccaaaatattagttatacgcggttgcaaatggtgggtgtacgtagaggtgagcgggcgtgcctaaacactaagggtgtgtttggatagagggatttaagtggataggacatggcggcccatttttgtgggtgtttggttcctgggcggaggtgggatagggcggtccggagggaaatattccgcccagatgtaggatggagggatccggtcgattcggccgaatgcagctgcccgagcgctcgagcgagcgggggcgagcgacgagtgggtcgcgtcacccctctcaccacgacacgagctcggcggcggctacggcgagcggcgacacgagctcggtggcgaccaagccacgcgacgagagaggaggcaagctcggcggccggcgcgggcgacgagcacggcggcagtgggacgcgagctcggcggcggcggcagaggaggcgcggcggtgaccggtgagagaggaggcgggaagaggacgcgccgacgacgaccaggacgacgacgaccggatctggggcggcgtggcacgccggcgagagaggaggcatggcggcggcaggggagagaggagacgggctcagcggtggccatgggggaggcttggcggcgggattgccggtgagagagaaggcgaggggcgatcggggaagataggaggcgagggacggccggcgattttgagaaggaagattttttctttttttttgtttttctccttccccttttatttctttatgctttttttatttatatttagatttttttagtatattgatattttttttggtttggagaatttggaggggtatactcactatctctaatgaaaggatgattgcaaccacttattcatcccactcccccaaccaaaaaaaaattagatcaccatatccactttcatccctgcaaccaaacaaaaaactggatcgccatatttactccaccatacaaaaaaccgaatcgccatatccagtaaaatatggaccgccatatcccatctaaccttgaccgggaaccaatcgcaccctaacagtaccatgcgatcatacttaacagaactactccgagcagtagtggtgagagggagtagtagggactatcatttctgaaagcacgaatagtacgtaactggatgaaggagtaatgggcaaacgatgtgctagtccagccagcagccatacatcaacatcaataagcaacaaatgttctcaggggcttgggcttttttgtccagcttgggatctagcccaggtccatatggaacaggagcggaaaaagtacattgaaggtccctcaacttgttacaaaatcatcccccaaccatgaactcagatattcgacgtcccttaactaatcaaaataggtccttaactaatcaacatgtgagacccacatgggtcccacgttgactcagccgccatgtaggacaaaaccagggtcaaaaccaccgaaagacctattttgattggttttgattagttaagagacgtcggatatctgattttatggttgggggatgattttgtaactcgatgacaagttgagggaccttcggtgtacttttaccaacaggagccaccacaaaagaaaggaaatatcaaatataggccggagtgaacctgctactgggctaggcggctagcaaatgttaacacaaaaaggctaaggtggtgtttacttccagagacttaactttagtccctgtctttagacactaatttagagtattaaatatagactacttacaaaactaattatataaataaaagctaattcacgagacaaattttttaagcctaattaatctataattagagaatgtttactgtagcatcacataggctaatcatggattaattaggctcattagattcgtctcgcaaattagtccaagattatggatgggttttattaatagtctacgtttaatatttataattaattttcaaacatccgatgtgataggaacttaaaagttttagtcccatctaaacagggtctaactagatcccgcgttgcaaatactgtactctcttcatccaaaagttttaaaacgtattttagtttttgggttttccaaataaaatgattatatttgttttatccatgcataaaaaaagtaaatgaagaaaaatgtctcttcgtttagaagcagattattaattactcattgcatgcattctctttctttgttgcacgaggagtaaagatggatgagttaatttctccttatttttttggtgaataaagaaatacatcttagacttttgaatggagtgagtaaaatttaacaaaactggcattgtcgtatgatacaatttcatttttctttctaaaccaatcctaagtttccaaccaagaggcaagcaaacgtctaaagttgttcgaagtttttaacgctatctagtttgttatggcttattattcggtttggaggaatagaaacgcatgcacacttttaatcgtaggaattcccaataggtttgagtggatgaaaaatttcttatatcaacttgtatataaaaaaagaacttcctttagttttcctgtacttatatttctacaaaccaaatgtcgttcgtaagaattagtctttacaaatccaaatcttatgcgcccgcccccccccccccccccccccaaaatttggatactttagcactgagaaaagttgctgttttgaagatgacttgtctgcaaacaaatcaattaccgattaatagcacgcacgcacctacgttccgctcataccttgaacgggaatgtgaactcatcatgaccataataaacccatacttcctccgttccaaaataaatatatttgagattgacattttctaatataataaatccagaagagatttatttagattcattgtaatagaaaatgtcgcatattttttttcgaacgcgcaaaaggattgcatgtcaatatattagaagaaaatagtatttgttacacaacgcaatcagttagactgacttatgccaagaaaggagggaaacaaaagaccaaagaaaaaaaaactaggttattatgactccaaacagcgggaagggggcagagcccactactctccccataaaaccccaaaattagcaatgccagctaacggctatagatgaccctctgagaggatggactgaaggacctccaagactgaagataatatagagtcgaaaaccctagagtccactgttgccaggagaccaggagaatcagagaatcgaagccggcacggagatgctcaggcaaagcatgccctagacgatggccaccaatcctggaggcagctaccacggggaggagagagggcagcccaaccaagaggtgacaacacacggagccagacctgtcgagcgaacacacaatcgaggaggatgtggtttgccatctaaagctcttgagtgtaaaaggggcagaccgagtgactatcaatgctgcgcttctgggggagatcgggcgtgcaacaacatcgttgaaatgcaaactagaggaagaatttgtatttagcaggacccttcgcgtgctacagaagatcagcacaagcaaatgagggctggccataaaagaacatctggtacgccgaacgtgttgagtagcgttggtcactcgtctaacactgcaacaccaaacaagacgatccccgaaacctggcgagagctgaaagtgaagcaccaaatcccaaaataagaagaaattgggagatgaattgatttttttggatggaaaaaagtacgtactcaattactcatatgcatggtcgttttaactgctctgttctgccgacacgaagcatgctagctagtagcgtgtacattatcaagcagctcgtcttctatacttctataaaatcaaaggcaaagggaagggacttgatgatggcgcatcgatcgatccccattccatatctgccgtgaacttaaagccttcacaaaccaaggtggacactgataaggtcgtagtaatccagaacctctgcctgcctccatcagcgccggccggccggccggtctgctcattactagcagcacacagtttaaactctactttggtgtagtacttctcgtacacgttgttgcttgttgccattatcacgcgtagtttattcggagtagttctagtctggagctttggaagggggccggccgcttgtccagacatgcgcaggcccagcttgcaacttgccgcgtactactgccccgatgctcgctgttggttggtgccacatcccacgctgccatgccatgcacgtatgtgcacgcacacgcgacgtacaacaacgtcgcgttccggtggccattggtccgtgcgctcactgcgtcctgcatgtgtgtgtgggcgtgtcgggggtctcgaccgccgtgcgcgctcgggccgtgccggcacgagatgccacggttcacatgaggcgcaacgcacgcagcgcatctgcgcatgtcccccactcggttggtggtggtggtggtagctttggggcgtttggctcggggctcgcacgcgacgcgaccgagacaagcaagcgcggtctgcctagcttgtctccttgcgcgacttgtagatagatagatagatagatagaaatagaacggcagacggtgcagcagtagctggaaactcgcgcgcgcgcgcgagcggcgggcggcttttccgtgttcggtgtttcggtgcggcggccatatatacgcgcgcgcgctcgcgtactacgtgcagacgacggactagtgcgtgcgtgcgtgacgcgagaggctgagaggagcattttggcccttggtttctttcggttcttctgctcttttttgctggcgatggggtggtcgtcgtcaagggctatgctcgtggcgcgcgctgtggccttggcggtggtgttcctcgcggcggaggctcagctgtcgccggggtactacaacgcgacgtgccccggggtggtgtccatcgtgcgccgcggcatggcgcaggcagtgcagaaggagtcgcgcatgggcgcctccatcctccgcctcttcttccacgactgcttcgtcaacgtaactacgcgaaatggatctcttgctcggccaatgtacttcgccttgttgagtttaatggccgcgtgcgtgtgtgcaggggtgcgacgcctccatcttgctcgacgacacggcgaacttcaccggggagaagaacgccgggccgaacgccaactcggtgcgcgggtacgaggtcatcgacgccatcaaggcgcagctcgaggcctcctgcaaggccaccgtctcctgcgccgacatcatcacgctcgccgcgcgcgacgccgtcaacctggtcagtatctgcctcgtgtttttctgcacccatgtaatgctggcattaatggcggggcgcgtgcagctcgggggcccgaactggacggtgccgctggggcggcgtgacgcgcgcacgacgagccagagcgcggcgaacaccaacctgccgccgcccggcgcgagcctcgcgtcgctcctgtcgatgttcagcgccaagggcctcgacgcgcgggacctcaccgcgctgtcgggcgcgcacaccgtcgggtgggcgcgctgctccaccttccgcacgcacatctacaacgacaccggcgtgaacgccaccttcgcctcgcagctgcgcaccaagtcctgcccgaccaccggcggcgacggcaacctcgcgccgctcgagctgcaggcgcccaacaccttcgacaacgcctacttcacggacctcctcagccgccgcgtcctgctgcgctccgaccaggagctcttcggcagcggcgccggcaatggcaccacggacgcgttcgtgcgcgcgtacgccgccaacgcgacgacgttcgcggcggacttcgccgccgcgatggtgaggctgggcaacctgagcccgctcaccgggaagaacggcgaggtacggatcaactgccggcgagtgaactcatcatgaacatgaaatggattcttgatgtacgcttcgtgaacgccataaacttattatcaaatcttgtttttaccaaaagcaaatggaaaaaatgctgttcttgcactgatttttctccaaatttcgatcgaagcgagcagcacacacaaaactctgccatgaaccgattcatggcggagtggggttttagtccggaacagatctcagccgctgattactagatcgacgatgcgatcagaacagggaatctgctgggcccgtggaccagtggaacactgcagatgtggcagcccaggatggcaatgtttgattggctgactgccagattatcgctgtcttttccaacgagctaagcagtttgtcagttgtcacatgagttaactctgaattttcaatcattttcaagtcttgaaccatgctttagatatactattaattaacgcaatttgttggctttctcaactctataaaaccgtgtgacagtggaatcatctctctttctgagataataataaagatctaattaagcacattaagcaaaacaaagcatccggtttccagcgatgaatgcatcattgaataaaaaataaacataaaatctagcactgaatgtctgctaaaagtcctgaaaacccatggctctttcatcatcacacattggcatttgcattgacgcgcagacacttcacgctagccgacttcgtcggtgctgtttatcggcgactcgtcagtcagtacactgtgaatctgtgatccatagctactgatgattgagcaaagcccctgcggcgacgaagccggcaaagtagccacaggttgggccacagcccacatggaacggacgggctcacatgctgtgatgagcctgtgacactgtgtcccgatctgtgtaccttttctctttctggtttttacaggctaatcatcatctcactctgctcacccatcattgcagattaagcatcacaggaatgagaaagaaagtaagtataacactcgctttacacggctgaatcctgatcagaaaaatgcccagctggcaggtgtgtctgagaagttgttcccctttgcatcctgctagaaaagtcttttgctacaggttgccacgcccatctgttcgagtccgcggcggcgccaaaatcgctttggtgcgctgcagaaaaaagcgtcgcacaccacagtcacaccatgcccgccctccatgcaacgcggcgccagcgcacggggaattcgcgagagaaaaccgcggcccataatacaacatggcacgaacgcgtacacgcgcgagcgcggcaatgcgatgcgtcacgcgtcggcgcgacggcgcgtattagtattatcctccgcacggggcgtttgctgatgagacgcacgcgccgccggacgcacgtccacggggatgacaaaacgcaggagtcaggacgagacggagacgacgtgtatgcgtggttgtgtgcagggcatcgcgccgcgccgcgcgcggcatatgctgcatgcgccctgtgcgcgcgggggcagttgatccgcggcgttttggaatggagaagggagaggcgcccgagctggcagcctctgcgtcgtgcgcgcgctgccctcgcggccacggcagccgcgcgcgcgctcggtcacgcagagcagaggcaggcgtacgtgaacccgccgtgcacccaccatgtggcccatgctggtgctgcggctgcagtagcgtggtgtacacacaggacgatctacaatggcacgaaacaatggagcatcgcattcgcaccgcatggcggctagatagatatagtattcttttgtcttgtagatcctctggtcctcgacatcctcaagagtctcggaacctcatcaggattcaggacaaggggaagcgaaggtaaacatgaaaacatggtgttggaagtggaactgtaacaccaggtctgtgacgagggagggaccatggaattgcctgcatctgcggcggggataaaaaaaaagcggtatattctctctattctaaaaaaaattaacctcatactacgacgtgacacatactactacaatgaatctggacatagagtatgtctatatcgtggtgccacatcctagtactaggttttttttagaacggtggaagtagcatttgtccacttcagtttttccagagatgctgacagagtaaagctgaacaaaacctgcgactctggggcagggcatactccattattgagagcggctgagatgggagcatactatgatggataatggcagcaattttgactcttttactaaacttgttcgaaaactagatgtcgacaaaaatataaccaaaaatatatctttatcccgtcaaaaaaaaagctctttaccttactagatcttagcactaaggcccaacatctcaacgccaagctcatcagtgataaatttggaacaaaattatcgaggctctatatatgtaaattatctaattattaactaatataaattaatatgatataatttagttagaatttgaataatctacaacgtaggtacgtccctgagacccattgatgcggacctcgtggaatacactataaaacgttgatagatccaaatacacatgaaaacttgcatagtgatcagtgactagagatggcccccaccgaaaaatgcatccctatccctacccccgtgagacaaaactttcccgtgcccgcaaaatacaacgggaaataagattatcatttatcaaagaggatcacccttgcccccacgaacctgacaggggcatgacttctcccattataattcccttatgaagaatcaactatagccatttccgtccctaataaaagaattcctcgtaggaaaagggaaaacggggctcattgccatatctagtagtggcgtagtgtagtggtaaatggtgtttgtatcaccatgaagaacatggttcaaatcacgaccactaaaatatttttaaaaggtgaaggcacaacaaagaaaaaaaaaagggaggggaggggtccgaagtggcaaaaaagaaaaacaatgatcacgaaatgggcttcaaactagcaccttctgttataataagggagtatcttaccactagactactagatacatcttgataagaaaacaacttatagtatttattaatttgtattatattactctgcgctaaactatatgatgctaattttttaatcttaacactaaggccaaagcccatgaggttgaggtagaggcctaatgttggttatagttcttctggtctatttatagaatacgttttatgaaaaggttaaaatgtcaatatttcggggataatggagtagcaagaagggtaatacagctcatgagagatttggagcaaggtgcagcctaattagtgcacatcaagcgatgccgagctccataatgttatcgacgaagtcatgcggatgcagatgactagatgaggcgctccctgttcgtcagattatctcggttaaacaaatgccggagcggttttaccggccgtaagcgcctcttcttaccttggacggtgacgccggggacgtggccggggtgcggtgccggcgacccggcgaccatggacccaggacatggcggtgcctgtcgctttgatacgcggcggcgacggcggcgagagcccgccagcccggcattcgcgggagactacggagtggccgtgtggggacagaagtcttgcatcgttagcgtggcgaggtctcgccgtctcggtgcaccagcccacgatggcccaagtaaagcccaaaccgtcctattttggatcgccaccattggtagcggcccatagggaagggacgtatgaccttttcatttggatcccggttttgagggaagctctgcaaatggtagagatcttaaacatttctgcatctagattttaggcccctatttttaattgtcctcaccaattgcggtccttttctgtgcttagttggcggctcatttggctgatgcagaaatgaaagctttgctgtgaccgagttgctcatcaactatccactagtagtagtaatagtagcttaattcgtacctgttccagtaattgcatcttgatgtaggagcgtgctcctcataaaagaacatgcattaacttgtgtcgactgaagaatcgaagtgcactacatgaatgccatgatagtccatttccagttcacatcagaaacatcccaggtttatcatgcataagaaagtacagcagagctggataccaaagttaacgcgcccacgcatcaagcaaagggacacagaacaccaagtttgggcattgagggtttaatcaggttacgaatcaaaatggaaacatgcagcgcagcaccagcaaactacactgacaacgatcagaaactacggctatcaatcagtagatgaagtggccgaaactacagtgcaaaacacttggcaagactaggtttcatgagcatcaagcgagatcgtcttcttcttaatcatcaatggaacaatcagcagggaccttgctcttgagtctacgtgctctcgctctttggagcagcgacttccttgtcgagacgggaaacctctgaatggcactgatatgtaactaatcccagcaatgaaaccgtgataatttggaaccacccgagctgctttagtccagcctcaactttctcaatccttctgagttgatgatccataaccttagccacttggcaatcctccacatacttgtattcctgcagaaacacactacgtcatgtggtctgaaattgagagcaataaggatcactcaacagcatgcatctaggggcttgacagaaacaaactcagggtattctcaaaagaaacataagtcagggttggcagaatggtccactccagttctagcttcaggaacgtttggattttcaagaatgaccagggctagctatgtttacctacagttagctgatcccacacccatgggcttcctgctgcagttggacaatgagctgatggtgacatggagctgttattttgcaggttattagctatgcacagaatgtagcaacttgcacggctgagttcaactcacttttagcaatttttcaatttttaagtgttgatttagaaatacttaataaatgtaactatatggcctggaccactggaagcagttagaagacaagagagaaggttagcagcctctgcatgatgccacgatatactccttccgatcacaaaagaacatcgttttagagtgcgagtcaacacacgttaactttgaccataaatatcatttacgatataggttttgaacatatgaaaatgatatatcctagtttctcataacacatgtaatatcatattgattttgaagagttcaaaacaactttcttttgtgactggagggagtacaccagatactatgaggataagcagcaacaagaaaaacttgtgatggcacatgggcacagcactatcacacctaaatagtgaacaatgtggaccaaacactgaaaaaggtaatcattgattcagtatgagctggatgttatagaaaccttctttgcatggaaaatgcaagcctataccggactgttctttgcttctaattgccaggtgttcaacaaaatagcagaaagggattatctgagtgcatgccatgtatgatggatgttcaagagaccaagaaactcatagataaatttgaaatagtggggggaggattttcagtggtctcctttgtttagaagtaaaatatgacaattttctcgttaataacattattcatggcttccaaaaatggcctaaccgaaaccatacaaaccaagtacaacaattttaacacataccgcaaggcgattgtatccacacacaatcccatttccataagccatccgttccaaattaatggcaggtagaaccatggtcgtctgactgacgcctctgggctctggtggttcatgcttaaggccaatggcatcagacaagctccaatatgcatattttagttgggtttgtggagattggtgcttgctcctttttttaaccaagtgcatgcatcggtctatcactcaacatgcatggtgattgcaaattctatgcaaaccacacgtttattggcattagtttccaacacatattataaaatcactggctttggatcaaatgtaacaagcggtggctaattacgcccaaacagcttttcctacaaggactaacactaagacaaaaagcacaggcttggatggatctgtggttacctgaccagaagaatacccatcagaagaatactcatcagaagaatactcctcagaagaatacacacggcggcggcggggcacaaagaggggaagtggagatgcacggtgaagggcagggacgccagcggcaggggtggcggtagcagtggctccctgtaagcggaacatttctcggttaattagcggcttcagaattcagtcaatatgtagaacacacctcagaattcagtgagtagtggcactaaatgtggccaccttgaaaccttaccgtggtggagccgtagcggcgtaccagagagggtacctggagcggggaggcgccgcgagcagggcgcacggcggcgtatcctccctgcgaaaaagtgcaatttcggtcagcaagcaagcagcagcggagcaagcttacgtaaggtgaaacggcgaagaggtcgaggtcgatgcttaccccggcggagcagtagcggcggacaacggagggcgcctggatcgacggagcgggcgcaccgcgcgtggcggcgtgaagggtgaagncgcccccaccgccctgggagcaagaaatttttagggggggttggggaggggttttggtcgggtgatcaccgcgaaacccnacncaagtaggcggcggggggnatggctcataccttggcgcagggtccaggggacgagtacggcaggaggcgggccaccgncnaatagtcggcgtgncgncgncgaaggacggcncggagcgcgacgaccatggcgtcgccgcgagggttttgggtttgctcgcgtctcgtctccacccactccggtgaagcgtacgaagnaagcgtctgtggactgcgtgtagtgcaatgaatggaagaaggcaataagccaagggagtctttatgggccgggccgggcctggctcagtgttggaaatgtaaagaaaagccactgaaagcaaaatgctttcagtttttttttttttggagaaacaaaatgctttcatgtttgtgtgccattactagaaacttatattgctcatctaataaagtttatacaaaatgctttcttgtatttgggttgatgaaccccctggctatattctaaatcatctggtaaatgatgtaacaattttatcatatcaataaagctagccgaatggcattcctccctcccaaaaaaaaagtttatatggaatcatgcagcactaatcatgggattgctattatatcaaaaaaaatcatgagattttcagtgtaagaatgcagtttgcatttgaccgaagagctaagctagaatacataatttcagattggagaacccagattaatacgccagaaattggaaaattgtttttggacattagtagtgtcggtcacactcttcatttttacgctatattttgatattttcccgatctctgtgttggatctgacgtgtaacactaaatctcggacatacactttcttccctatccattttccctcttatatatcatgaggtattacgggcattgcaaaattgtttatcagatattgaagttttcttttgtatagttgtgccaaccaatattaataacatcaatcagaacaattcccgtatcatttttctaagcttttagatcatttcatcgtggcttgcatgcaacactacgaaaaagtagttgctgtgattgtccaaattatgaggcttaaggtcgtgtgtttggaaaaattaaggagattgggttaattacttgtatttacactcaacaagaattgccccatggactcttggagggttgaaatgagaatttgacaattggaattatttcttcatctacgtacgttccaggagatcagtgaccttgttgaaactaaaagggcactgtttttgtttattggactccagtcgcaagttcgataatatataacatacgttttatttgacgatctctctcgagttaaaatcacatatgagcacgcgtgccacatgtacacaccaaataatggaagaaaattttaatgcttttccatgctgaattgagagaattattcctgaacaatgaaagagagcgatggcgcgtgtttatatttcgctatgtagtcaggactgtgttgcttttatgttgctcaaactcagtacattttctgcttcaaaaaacaaaaatgttgtggccatcacaagagtttaaatagtaccagtacatacaggtggcatctagcaaacatgccagtaagtggttcccaccaaccattttcctacgtggaggatagcaacaacgtgcccgtaaagtgttgaaaatgtcatactgcaccgactttccagtccaactcagcgcagacaaattcagaaaca

SEQ ID NO: 4560 - DNA, 28409 bp, Oryza sativa
  unsure (1)..(28409): unsure at all n locations
acaaactaagagccatgaagcagtttgatagtatccacgcaaccaaatccatcggtttcaaattgggtaaaccttatgatcaaagtcaaaaaacgcgagatcgaagcagcctctctctaccaaacccgacgaaaaactaagcatccgcagatcagctacggtccaatcaaatcatcaaccgcgccttggattccaactaacacgagcgagagagagaagcgagccaaccacggggaaggaatcgaaaaacaacaagagaaacagaaaaaaaaaagcgagagaagaggaggactcaccgtagaggccgggagaagaagcgtacactcctctagggaggaagacgcccctcgagtacgaactccgaaggaagacgcggcgccggcaaccttgcaagtcacttcctccacacctgacgtcgtcgtcgtcccctttccttcaccttcaacttcagtcggtcacccaggtcggcgcagtctggcgccggacgctaccccgtctccaccggcgccggcttgccgccgtattcgccggaccagcgggggaagaagaggaggaggaggcggcgccgcggcggcaatggcgagagagcagagaagacacaacacaaaaaaaaatatttctgtaattttccacgccttcctcaaaatctccggctcaatttatttcgggggggaattcaattcaatgcacccagggtggtgtaccgaaattgccctccccgcccgttccgggtttccggccttccacgccacgtggcacgcgatggacgagggtggagcacacggcaggaagcgatttcctcgttctttctctctctctctctctttttcctatatatgtttttaagctggtaggagtacatttttttattcagaaaatctattagacggcgtttctgaatctttagaaataaattttaaaactgaaccgtctattcccacatcttccaaacacgtttctcaaatttctattgaaaattagggccttatctttttattttttgacttatgtttatgcttatcatccaaaatttaaattttcaatattaaatttagagctaattttgaggtttttttcatcaatgtttatttttagtattacttttagaatactaaaaacacgtatataaaagttttatttataaattattttttatttataaatatgctataaacaatggctcctttaatctactttttattttttttaagtatacttaattaattagatgttaatttgttgctcctttttagagcgaagggttcttaaccccaaatgaacacaagctaaaacgtcactgtttttgtttcggccgtgccatccttcttgtggtgccagagaaatgttactgtacgttatttgtgttgttccactgtgtcatattgaagatctgatcttacatcactcaaatcattgtatcatggacagttgttctaaggcactgtttatagcatgacaccatgctaatggctgaaacatctatttctctgtaagaaaaagaacaatcaaagttgtttgaaggtttagtttgattttttttactggaaaaatattcaagaaataatcacgtttggcctcaattgttccaagcaaatttatcatttatgccatgtggtgatcgctgcagagaagaggatgacgagtacttgtcattgctgtgatgttgtgttgcctggtttacacacacatttgcttctgatacaagtatcaccgaggaaaaagaaaatcaaacctccatactcatcaatttgaccagatcagttgttgagtactccaactccttttctttttctagaccagtgcttcttaagcatgtgctttctcgtttctcctttctacctgcttgctgctgctgcatgagagttgagatagtaataattatggagtcctagcagtaattaacttaaccaatgggtctttttttaaaaaaaacaactgggctgttttggtcattccattttacgttacggcctgaccgcaatgtggtccatcagtggacgaaagctggtggtaaaccaccagccacttttatattgcactcctacctcacttttgacggtgatagtacgtactactcctatatcaatacatattactgacatgtgggaccggataggttgtgtccaccttcaagtaacagtactatcgactgttacttgttgaaagtcatgtaacactggtctcacatcatcacattgtctggagtacgaccgtggagaaaaatgtgggttcgttcccaacatgcacgattattttccggtccctgttttaatagtactcttttttgtcgtattaaaatacatgaatctcaagccagcattaatctactcgatattacgatctatttagagtatattttaagaatcagctgatgagttcggagaagatagggaaatcagattctgacttctaatttattttctaaatgttataactatatttttttaaaatctaaatgcaaagcaaaaatgtttgtgaaaagatctgattataaaagaagatgcaaccgctagaagcttcctttaacctacttccaagacattttccataatcatactccaaaccaaagagatgtgactaatacaaagaaaataactttaagataatacctgtatggttgtatcaagtttgcgtttagagttcaaaacaaccatccatatgagaaacaactcaatactactctgtcaaaaaaaaaaataaatcctagctacaaatctaaacataaatcaaaatatgtatatgttaagattcataattagtattgaattgcgaaaagacctgtagcctactggttacaacagcctcagtagcacctgagatcctgggttcgactccctatgggagcaaatttttcccgacttaacggcgttgtgcttgtccagatagacgacgtacccttggacaactagacgtctgtggttatttcgtcaatctctccagaatttaccggccctgtcttcgaagatgttcatagggatagggtttgcgtgcgtgtgttcataggcccagtcttcgaagatgctcatagggatagggtttgcgtgcgtatgtttataggggtgagtgcgtgtgcgttgtgagtatctgcgttgtactgtgtaattctaaaaaaaataattagtattgaattatttatgggtagtactgtgtaattctaaaaaaaataattagtattgaattatttatgggtagggtttacgtacgtgtgttcataggcccagtcttcgaagatgctcatagagatagggtttgcgtgcgtgtgtttataggggtgagtgcgcgtgtgttgtgagtgtctgcgttgtactgtgtaattcttaaaaaaataattagtattgaattatttatgggacgaaggaggtaagtgtaaaagaaaatgagagggagaaacacgagacattgtgtcacagtcctcgaatcagagttcgtactgccaaactggactgttgaacctatgacctcccaaaacgggaacgacggggtcactttgctggaagtacggggtcccaagatttaagattcttggcttaatcttcccctgtttagctgcttctcacctaactaattttgtttggcacttgtagaagaaagacaagacccaaaaaaaaaaaaaaggaaagcagaacggcgatacgcatgcaggagttggaaacatgatgcggtgtgtaagactgacagtgtggcaccgtcgtctcttctcttgtggtggtcgctttcgtgctttgacatgcacgcgtccgccattgaagggatccaaccgggaagaatacttcctgtctgttgctggctgatatatagcctgatactgatgctgatatgatacacccagcttccccgacatattttcttttcaaatacaacacggggattttctgaggttcgatttcagtcgttgtgttacattttgttaactttaaagaagtactacagtattttcacacagggacggatctagaataggatagaggaggactatcttcttcttcctccttttccctccctccttcaatacccacgctatatccgtccctgatttcacgtgaagaattaagccattgccttgtccggcatcaaaccaaattaacatggacgcttgtatttgtaatgtgttttttagaaaataattttgatagcatgtttgatttacaacacggaaatggattttgtggtgcagcttcactttgcttgttatcttattcactgtaaccagattttaaattttaattttaggtttgattttaaggtactttttatcgtatttataaatattaaaattgtgtcggttgttttgttttttaataatagaaataacctacatcttcggtctaagtcaacaaagaccaataaaccaagaaaagttatgaaagaatgcaaaccagtggcgcactgtcgctcatatcagtgatggggacctaaacgtgcgagcttgtcttgtgcgattttggcagcctttcgtcgagttcctccccgtgcgtgcaactgcaactgcaaggagcttgccaggtgaagcgccattgatggatcatggatgcatgccattggtcgttggtcaccttttgatgagctatctcggcaccttcatgcatcttgcaatgcaatgctccttcaaaagaatcaaaaaggggcaaacccctcagcatgcatgccagcatgccatcgattcattcaccaaactgttcatcagccaggtgtgctcatgatcatacccaagatggcaaaagactgacggctgagtttgattcagatacttggttgagcgactccatatcggcggaacatatcctatgcatataagtttctagtacaaactctgtacacaccaactaccaaatgttatagaaaattccagaaaaaggatacatatttttaatagtactgcacctacgtatgaaatcttatcttcaattcattatattttagccgtaacaataaaacaaaataccagcagattattactcttaaaattgtcagatttttcacttttttgttacgtctagaatataatgaattgaagataagatttcatactaggtgtagtactattgaaaatatgtgtctattttttctagaattttctgtaacatttgatagttggtgtgcactagaaacttgtgtgcataggatatcttcctcttcatggggtcaagaaagtatgcctctcaaactaataaatgatatattttacatttaaagtttttaaaacaaaattatataaatttatttttcatgtttaaaatagttactagtaatacttaatgaataattcatgatctgtctctttttgcgtgaagcaaattagccaagccaaacggacagttcaaacgcaccgactcatcattcacactcacactgaccaacaaactccctgaatatcctaggctcctagcgtgaatcttgtgaattgtgaggttacattagtggagtatccaacattatctaaactctaaaccaatgcaaagcccccctttttttttcttttcattcgtgtttctttagagagggcatgcatgttcatcttcacctacctctacccctacctttctttgtctttgtagccaatcaagcttaaaagccatggataaatggagaaaaataaaaaagataaacccagcatgatggcctacgagatgacctgcaaggtgggtcctcccaaggtgagtgcacttgagaatatctcaaagcggggctctcctacgtgtgggcccaccccataaaatgtggtactttgccttttgggagcctgtcatgtggggccccgacctacctctcgatcatgaccagctagcttaagactaaaaagcaatcaaaaacatatttttttaaaaaaacacttggaatccgatcaaatcattccatgcatgggctttttcatgggtgagtgtgtaggtgtttttacatttggtcactcatttcgcttgcgattcattcatcacaaccggctgctttccgttgaagtttctcggagccaaaccagttttaagctttaggtgaacagaacgaacatttgtgtacacatcaacacagctgtgttgcttacttgctttgatgggagctagccgccatgtgttaattaattaatttcttgaaagcaatactccctcgtcctgtaaaaaaaaagatacattctaatacaacaaatctaaagagagttatgtccatattattaaattggttttttatatgacggatgatctaaagagagtcatgtccagattactagattggttttttatatggtggatggagtacgtagcattgtgtgtacaaaagaaagattagagatggtgttttttatatgttgattaactagaacgtgttgtgatcatcgtcttcgaggtcgtgagctttctgatgtgtaaatacagctcgttgtgtcaaagatacagtatttttcatgcattgacaatcactaccttttagattagtagatttattggaaaggatcacattaaggtagctcgatcatgaacttgcaagcgacaccgtaactaatccaagaggacgaaacagttaaagcctaaatttgttgtagtcggcaaagcaactttgtcataactgttgtagtatttgtgtctatatatatacagctccaaccacaaaacaaatatgcaactttgtaaatcaaaatgtctgcatcgatcgtgattaaagggaaagcacacaattccttcctgttttattaatgcgggatacttttatctcttttgtctgacatggactgaaagcgagaaatgagtgtgactctcgtgcaactagatggaaaaagattaaattatttaactagctagtttctttgtgattgataacttctgataattttattttcttaacaaacgtgtactccatatactataatctaaaccctttaaaagtaatgcagtaataatatatttaatataatgtatacttgtaaaaggagaaagaactcttgctcagtgtgcctgccaatcgttagctcagagaaaaagttgtgcgcaaattaattttagttcattcccaatcttgaaacagatcacaacttagttaatatttataatgcatttgctttcagtacgtataatcatgttcttgttcttttttgaaataataataataatcatgttcatcatgtgacggcgtgtgtcgcattttagtttaagtactagtactaaccagtagggggcacttcgaattattagtcggtccagtggtttacaccatgattacctccgtaagagcagggctaagagacaggattaattagcctattatatatgctttgactgcaaggtacgtgatcttggagaattatgtgcatgaatctcacatctgtgtggctgatcgatctcgtcgagcatatcacgcaacaaccagctgctaccaacctccccatgattaggtcagagcaaatcatggcttccattcagattggatatatagattcaggcaaaaagagtttgcagttttgtcacatttgattttgtctgatgacatgcatatgcaaagcggccggctccatgttttgattaattcgatgtatggctttatcagcaataactgattgttaatctctctattgttacatcatatattcagctggcaacgagctacgaagaacaagctgtcatagtcgtaaccaacaacatttttagttttgaacagatacatacataaacaattatgaagaacgtcgaacatcataaatataatacatcataaatgtaagacatcatagtgaggtggctagccggtgagactagcaggaacagctacccaggatcgtctggaaatcaggacactaacttgcaaagtctctaagctcaggattatgccattttctttttttttttaaaaaaaggattcaattaataatacataaaagataccctagtttgcccgagagaaaaatcgaaggactaaacggtatgaaagttgagaggaattatagccgcatttgagtcgtcaatcatgaacagatggtccaaacaaggggagaactgaaaatgtgatgagaaaagctggctcctgcctagttccctgtcctgcgttttccactttgtatgtgtgctcttttttttttctcttttaagaatttgcatgtgtaattggttgtcctaagcccaaaaatggcacacgctctctttgctctcatgcatgaaaagcgttgcaatggtacaatcacgtcccaagccatccgtgcatcttgccattgtcggaaaaatggtctaggaagcttattggttgttcatgctctctggtaagtaaaaaggtttattagaaaataaaaattaatttatagataaaacttttatatatttatttgtagcgatttaaaagctaatataaaaagaaattacattgaaaatatcttaaaatcaacttcaggttcaaaaatttgaattttagcttttgctttggcttattaggccaacctatgggctctaaattcacggcacaatcttgaaaagtgttgcaacggtacaatctctggtaattactttctccgttccattttaaacgtagtcatgagttttatttgaaattttttttatgattagtttttttattgttattagatgataaaacaaaattaatattttatacgtgactgatgttttttatttttttcaaacaattttcaaacaatgcgtataattaaagttgaacacagaagctcgtgactgcgtttaaaatgggacggatgtgtacatgacattgtcgcagaaatggtctaaattcacggtgacttctcaactaacctttgattggcaccgttccaacttccaaacaccgggtatggaggttagctcttttgacgagaagttcgttgccttcgtaaaatttgattgagacaaaaaaatattaagggttttttattctttacagatgtgttgatagactgtcctcacttcagtttttccacaagaacaagtgaacaacctacgtcgtttaatagtctttcaagacgcacactcaggcatgcactgctaaagtatcacaccatagaacacacattacatatgcgaaaaacgtagaaataggaaaaacgtaggattttaataggaatgcaagtgtaaaatagaggattgaaaaacgcaggaaaaacacaggaatgaccgttttattgaaccacaggaaaaacacaggaattgggtgagagagatagactcaaaggaaagttagcaagaggttgaagctcttgctaaatttcctccaaaatatttataggattatccattccataggaatttcaaaggattggatagaattgaatcctttgtttcaaagggcttcataggaaattttcctataggattgaaatcctctaaaaattcttatgtttttcctccaaatcaaaggggcctttaacatgcttgaaattacccccgttgtccattcaaaaaaaaacatgcttgaaattacttgaaagattttgagatagagcccaatagcgattattagtcaattgctccctacatcctactagctatttgttgagtttaaattaattgaaaaaatatagttattctccatatacacacactctcatctcaaccaatctaatcattcaccatttaattttacatgctaatttcatagtttcttataaaaacctctacttcctccgtttcacaatgtaagttattttaccattttctgtatttatcttgatgttagtgaatctagacatatataattatctagattcattaacatcaatatgaatgtgggaaatactataatgacttatattgtaaataggaggaagtactttttttatatttttggacggagcagtacatacctgattacatgcggcacaatgcgacaactaaaatagacaaggctcaaacgagggcccacctgctagggtcaaaaaattttggggggcatcatgtattcatgtcccctaatccggggcgtttaacctaacctaacctaacctacgtggctgtctctttatgacacatggggcccgcgctctgaccgtcctggcggcactaggcggcccatgtgcaaatgcaccgctctgacccatcacgtgtgggcctgacccggggggtccacctcccaactcgtgggccagcgttcccaccgcccctgcccaaaatgatccagctcagcgcctctaggagtggatgacccacggagagatatgtgtgtgccccacctgtcagacgggattaagggcctcgctctgtagtgtaatctgccaatgggattactctgtataataattaatttatgtgaaaactaatgttttcttataatacaatataagcgtatattatcacgtgtgcatattcatctatacgaacgtataccctacttatatgaacatctctaaaagactgagccggctatcttgagattaacgaaactaccacggacatttcattatcctaaatgctccatgtaaaggtaaataaagtctagctatgagtatgagtatgagtatggttctttccttcctttaaaatttgaaaggcatgtagtgtcgttttttgaaaaagtaaaacttgtactggtatttaccgccgtagaacttcctgtcttcgacgatcagaggaaaagaaaaaaatttcttgcacggcacgatacgggtgacgtggccgccaccgggacccacgtggcatgggctttgtgggcccacggacagagttggtcgaagcatatccatccggtagcccacagggtggcgatcccaaattgagtttaacacttgagtgggtcccagagtgcagggcccgatcatcatcttcatccgttattacatgctactccctccgtcccacgatataaaggattttcagtttttgccataatataagtaatttttagtttttgcttgcaacatttgaccactcgtcttattcaaattttttttacaaatataaaaaacgaaaagttgtgcttaaagtactgtagataataaagtaagtcacaaataaaataattaataatttcaaaattttttaaataagacgagtgatcaaatattgtaagcaaaaacttaaaatctcttatattatgggacggagggagtattaattagtaaagcctatagattgagttggacagatcatacgattcatccaaagtcatcatgctaatctcctccaatgtcatcatacaaatgaattgattattaccatgcaaagtttgggttaattacatgttcctcttgagtttgttaatcctacctcagtcctttttctcctaactacgctatatagctcgtaatcttcctcgagacggttcgttttctgtaacctaacacaaggacggacacgcaggtctcactctagtacgtatcatgtcaatgtagtagaatccaatcgagttgtgacgttggtgtctgtctctctctacctagaatccaaattcctctttccctgattgctctgccgttttgctgccgtcttaaggcaccatctcgacgatcgacgacgatgatgacagatcgtgttcgttcataagtagtaaaccggcgagattaggatcggtgtttaggtaggattaacatggcgtaatcatgggaagacatgatcatggcaaacggaaaggagaggagaactggagaagaggctcgatcacacactgtcgtgctgacaaagcttgtcttgtagaacacgcagtgtacatgccgatcgaactttcagaggaggagaaaagattaaatacgagacggcaagatcatacttctgctgctggtatagtagtagtagagctttacttacgttgtactcatctgctttacttgttggcgaccagagagcggctatcaaaccagatataggatgcaaaagttattaacagatgactgtttgtttttaactttctacatgaggttgacctggtatgtcatggatgatggaccatgcagctgacaggtgatgtacagtgcatgtgtcagggaaaacaagcaaagcatcccatgaactagtacacgtgtacacgtactaggctacaatgcccatacctgaatctgaccacacggcgaagtgacaaaggcacggccgcacgggtgcctggatgcatacagcctacagtacaaacttcacaagccatgtcgttgccatactcatccagcagcatcttcagaattcatacagaattctgaaaaatgggtagtagtaccagtacaaaatcacacaggatatgtacagcaagtgagcttctgaattctgaaacatgctggtctgtttacttgaatcaattaatactacagttgcctgggagcttggcacggtagctttagccagggcaacaacagatactccttcctgaataactctgtcagataagcgagaaggcttataccttcttgaagaatgacataatgttgccttgcttggttccagccttggcaggtttcttgttgccggctgttttactcgaagcattgcttttttcggtctttgctactggctgcggcttgcttgagagagttgccctgacagaaaatgcaaggagaacaatagttatcagcaggtccaatcggatcaggtacgttggttttgtgagggagttctgttaaaaatgacacgctagctgaagttgcctagtcgtctcacaaactaattaagatagagacatcaaatcaggaaaaatgttgaaatcagattagatggcatacttgcatgcaccaacacagctagtacttaggacttgaagagaacaaatcaatcagatgtctatttttacatccgatgctagtttttagatttccactacatatatggtttgcaatacatattttccccagctgtgcaaagagatcaggaaagcaggctgaacaatatttcacaaacaaattggattgctattgtagataagatataggatgtaaaagggtttaaggtaccaatcagcaggatggtgattagatgactacattttctcctactactctatggccagctccataccatacctacagcttcatactggacagattatttatggctacagggccaaacatttccacaaaacggaagaagacctagggattaggtaatactccatgcccatagtggcaaatatagtcagaaccacgttgtctttaattcaatggagattaatacatgaaaactaatcaggtcgttagtggtacaaaaatataaaagaaactgacgctgaatgtggtgaaactataatgagctatcaaatttcatcaaacacggcagaagacattacctgtttgcagcaccagtatcgctcacattcttctcagccttatcacctgcagaagcttcaccctcccagacaacctcggttactgaaacagaaaagcaagtaagaaaatcaatgtctccaattaatacggatgtaaagcagaccagggaattaaactaagatgcatgttacaataatattctgacaatacatggtaacacatatcagtgccaccttaatattctgtaggcattgtgagcatgcagcactgcagccatgcacccaaagtaatacccaaagtaatacggaaaaaagcaccatttccatgatttccttacatgagcttaaaactagaagattgactataaataaatctggacatactaaacgtcactatagtgtaaactatttcgttcgtctatattagactaaactacacttttctgtactatccttactatttcaaaagaactgcatactgcctttattcccttgttatataggacaacatgtcaacacaacataaccatgctttccataaaaaagacacaaactagccacaatacaggaaaaataattttttttactgcatttgtattattatagttttgcctttgtttttgcggtagccagtaaacataagtaaacaatattggcatattagaaacatgtgtaatatactttatgggattagagtataatgcttaccttctcttccccgctcatctattcgtgtcttcaaaactttccttcttttaggtgagttggaagcagtctcagcagcatgatcctgcttattgtcattaggtggtggaccattgttcttttcttttaaggtgatcccagaatggctgacagtgttgctacttttggttttacactcaggagactctgtccttcctatgcaacatttcacatccttctcaacctcttgtttattttccaagttttcttgtttggggttactttcttgagcaacctcatcaataggatttgtaatgcactgttccggtggctcaggagatgcaatggctacaacattgtcatcttcatcatcatctgaaagatcaaagactgctcttctctttctgttatttgcactagagccacgcttgtagtgtacagcttgttcatcatcactactatcagcatttgcttcttcctttgcacatatttgtgcatcagctgtaactgaaaacagcaacaagatgagaacttcagaagtatgcttaacttgacatatctgattttacatgattaggtatgcatttgaattaacatgcaagaaaatataacaaagaaaagaaacatgaatgtttgtatgcaataccagcaacacttggtaaaactgtaggattagtggtagctggagtcttgggtttagctgatgcacgtccccacatcgtagcaagtgatccaccattactgggcagcgccttcccattctgagccttgtttttgtttccctgcagagcaattgatggttctttgacaacaggagcattggtggctttatccaagaccgaggaaatatccttctcagccttattacttgttcctttctttggactggatgatccaggtagaccttgctgttgacccttagcagattgttcttttggagcactactagttttcaacggtgcagctgcagcaacactatttataggctttggcggaaatgaactcacaagcttcccattagcagttcgcttgacaaaagaattcaaaacaccacaaaacctgcagaagagaagatactgaattcataatcctgatgagggaaataagtggcaaacattgggatacttgtaaattttttttttttgcaccatatagttcttatttatatttttgctgtttaatataagtatattacatccctccctcccactctgacccattctgtactgctcctatctaattatgtcttctcttgattttgggggctaagcaaggtgactaagaagaacaatacctattatctctcaaacaattttcttcatcaaatggccggttaaaaagctcctctgcctgtacaaattcaggattccaaagtacagcagtatcttttggaatacaagcctggatactgtacacttgaactgaacaagaatctttaaattcttgccttgcttctgcatcataaagaaaaaaaaaacaaatgctccacttttcagtcaaattcaacatttatcagaaaagggtatactgtaaattgggaaactatactatgataaacctgaggcaagacattaccttcaagtttatggcctgaagtgagttttacacaataatttgtggggttcttctttaaccatccagacacactgtaaatcactttaagatcagccccatgtttgttgacgaactcctgaagcaacctaaaaagaattagtaactagttagttgtggttaggatgtttcatttatccaatgattaagggaaatatccataaaagggaaacctttacctctttgaatcattggatgatactgagaagttcctgctgagccatttgtatgaaatctgtcaaaaacatacataccaattgttgaaacactgtctgccaggcaaataaatccaacaactccaatggatcaaccactaaacaagtaacaaaaatattaagagaaaggacaggcaactggttcatcctatggccatgtggagctgcagtatcacacttggttaatcattatgtgaataaacacatgatatacagcaatctaattggatactccaccatcacatctatgtcgtgtttcccaagctacacaaactaccagcttcaaaattgttgaatttgacaaagaggctgaggcaaatcttaatcctccaccaaatgattggagtaaatctaagtttgtcatggaaaaatggaaacacttttactccctacatacacatgaataggcaccgagccatcaacaaagaaaagcagacgtgtcaactcagaacagtaaatccaccgcgaactggcacatttgttgcttgtttctttttgcttttctaagcttaccgcaaaatatgaacattgatagccaaaacaaaacccagcaaccctaagtttcacctcaaacgaaacgcaaaccctaactggcaagaacagtaagacaagtcgcacgagaaaccgagaaatcgtctcgccccccccccccccccttcccccaaatatttccttctttcgaatgccttgaaccgagaaacagataaagcttgtttggtaacacgagagaaggggaccagtttatacgaaggaattgatgatgagattaagatgggaatttgatttttaatcccaatatcttgtttagtagaggtgatggaaattgatagggagtttagttggagattaaaacggatggctgagatttgtttagacaaaataaaggagaaattctctcctaattacctgccactacccaagtattgaaaatgagggagttccttccttaattcctcatcccaatcttaccaaaattctcatgtctcccaaccaaaccaaacacttaataacctcatccctctgaactaccaatccctcctaaaaactccctccaaccaaacgggccgtaacgcggtagagcctcgcaagagcaagacaacgcgaaatcagacgatagagtcgtactaatcaggatggggattatttccgctatcactcaccacacggagcggatcggcgaagagggcgtggatctggggaatcaggtcgagcagggccgggtccgcggcggcggccgccatgagggtggtgcttggcgagagctccttctcccgtttccagaagattctagagccctcgcgcctcgctagggtttggggaattggggggaggagaagaattggggaattggggaattggcgggaatcgcttggggggataatgaccaagcggcggttttcccgcctccctcctttttcctctaggcggcagcccgagagaccgggacgcaggggtaggccccacctgctctagatacatccatgtcactgacagtgggacccacgctggagcggtccggttaacccgatgggccacatatggcgcgcacatcacactcaggttctggcctgttccggcccaaaacgcattgccgtcccaacgtaagtcgtatgaccgttccggcccatcatatatcaacattcctattttaggaggaaaaagttgaatttaacttggctttctcagatagacctgattcgtatctctcaacactaaaaccggatatatggatccctctaactattaaaatcatatataatgactccctcgattgattggggagtgattttggctaacgtgacattcatgttgcagtccagtcactaggagaattaaaagtagacatgaaacccacatgtaagtaacaagaaaagcaattgtgaagccaatatgtcagcgcctactcatatcctttcccatctttcttttctctttcttcccccggacccaccccaagctttgaggttgctagccaatgtgccggtggccgacgagcccctcagagcgggcagcgagggtgacggaccagtttagtggaggctggcccagtgcaacgcgaggtggtcaacaagagagcggagtccgcgcaagggtcgatcttgtcccgggcgacatcgtccaccttttcctagtggcggtagaaggggcaacctaggagctccaccgccctcacagtcggatgtccggtccactctccgctcgcaacggtgacagtcgtggtaggggttaggggaccgatccttatggctgtggtaggggctaggtgacggatcacagcggcggttgcgcatgcgggtttgcaacgaggaccaggattgacggcattgtagggagggggtagttgcttctgcttccgcccttcgttgaggaaactctgaaagaatttgtctctttcaaccacttcccttaccaggctagcaaccccaaggaaatctaggtttcaagcaaccacctaggattagcaagtctccaaacgactcaagatccaaatatggatgatgagcgctgatccaccggtgaagcttgctataacatgcaatctcctagaaaatagtttggtttccactaaattacctctttccttgcggaggtgagggaaaccttcacaaacttggaagttcaccgaataacgctctgctaactagaaagcttaacctctaagagtaacaaacacaatcgaagatttgcttgctatgaatccaagtgctcaaagattggagtaaagctcactagctcttaacttctcttctcaaccactcaacccccaaactcttctcttttcaaatcccttctcaacttctaactcacaacacaaaggtataatattggggagtggttctttttgattttggatggatatactcttgcacaaagtcagcaaccatggatggagagggtggtactctttcattggttttgcctatcgggaagaacaatatgcatatcagcacaaagtcatcaaccatggatggagggtgttggtttattcagtgtaacaacctgcatacacttaagtgtatgagcagtccctaaaacttgtgagagtgtcatctaagtctctgaaatctcaaaatatacttttttttgtctccgaacttgtcgtgagtgtcatatagatctaaataagttccaaccctccatgtgcggacgtggcacaccacgttgatgcctacgtgtcggtggaccaaagtgctagtcataaaaaaattaaattaaaagagaggataaaaaataaaaataaaggagagagagagagaggagaaaaagatggttatttatttattttttactaatatgtgggtcccactaacatatatgcaccgctgtgctatgccacatcaacacatgaagtaagttgaaacttgtttagtcatatacgacacaaataataaattcgaggacgcaaaaatacatcttagaaatttaaaacctagatgacatgtccgtacaaatttaaaaattgcctgtacacttcactccttacgagagtgaacatcgggtgcttacaaatattccccttgtccttaaccttgtttatccatggactttcttttgccttatttatccatggactttcttttgcgcgagtcaacatcgggattcgagtgcaggctgccggacatatacacacacaaaggaatatggttccagtgcagttgtaatagagactgcaactttgcagttgtaatcatttttcaccgttggattaagacgatcaacggtttaaatctatgccacgtcgtttcaaacagtaactgctacagtgctcgctacgggaaatacgcagctacagcatttgtcaaatatgcccagtaatatcttggccattacttcccaatccaacggtgcttatatgactgctcaagttgcagtggctatagcaagtgcagtatgcaggtgatctcaattccacacaaagtgaacggacaaaggtttttaagtacaacgatctatacatcctaacaatttttgccttgtccttaacctttttgtacatggatttatctgcacgagccaacatcgactgccagatagctgagggggaactgtacagggagttcatgcacaaaggtcccttcgttgaaagtgtaacggtctatgcaaggtttaccttttcgtttacaaaatgaaaaccactccccactggtataacgaaaaccgaccaaaagatgataaaaactaacgactttaagtcaaccccgtaaaaaaccgctggccgttggtttgtgaatcttccacgggccacatgattgatagtcggagcaaagtcggggagacatcgaaaacacaagccactttggtccttgttgattggtcagttaaccccgtcccacacgataatactccattagtaagcttcctatagccatatccatcaatgtgactcattgccggcctgaacactctgtcaaggaaaacaaacaaggaattagaactcacagatgacagataaagcaatgctgcagattgcagtactttaatcttcaaaatacaagcatgaaaatctagctgcaccctattgtctgtaccaggcatggccatggctcctgtaagcttcctcctcatcttcttcctcaccaccgctggtctcaccctccaaacctgctgtttcgacagcccaggacactccgcgaacctgtccaccatctggacctgcacttccccaacaaccgatgttctcgtcgctaaccctctactcagccggcccgtaccagacaatcacaaccttcattttgctgcaggcttctacaattaccccctggttaacacctacatctttggagtctacactgttactgacgccggtgaatttgcagacatgacctcttggcgcccagaacccgtggcagatgtatggtcggccaacagggaccagttgatccggcagaactccaccctaagcttcacggctgagggggacctggttcttcagcatccggatggcagccttgtctggtctaccaacacttccggccagtctgttgcaggaatgaccctcacagagtccggcaacctggtgctgtataatcacaacaacttaccggtctggcagtcattcgaccacccaacggattccttgctccctggacagagattggtgcaaggaatgagattgaagcctaacgcattggcagtaaatctgattgccagcgacctgtattatttaactgttcattcggatgggctctatgcatttgcaggatctagcaactcccagccctactatgagttcacagtgtcaactggaaacaagtcacagaatcctccagcgtatttaactctggcgaacaggagcttggacatatttgttccatcctcttcatctgcaaatctggaacacttgtcccttcaatcaccggctctgtctctccagtacattagatttgaatctgatgggcaactcacgttgtatgaatggcaagcagaccaaaatggtagatggctatatgtgcaggacgttttcccatttcagtactgtgattacccaactgtctgcggggagtatgggatctgcttgaatggactgtgctcctgtccaactgcaactgaaagtcacattcgatacttcagaccggtcgatgacaggagaccacatcttggctgcacactggagaccccgatctcctgccagtttgtacaagatcaccaactcatatctctacctaatgtttcatacttatactacgatagctccagagtttcagaactaactgatgaggagagctgtaagcaagcatgcttgaccacttgctcttgcaaggctgccttgttttggtatgttgataataaatcagctggagactgtaccttggtatcacaagtcctctcacttaagacaagttatccaggatacgattctttagcattcctgaaggtccagatcacaccttcacctcacctggaaaaacatagattagtacctttggttcctgtgcttgtaggagttgcttctttctttgtcatgctcaccattgtcttggtagttgtccaaatacgggcgtcagcaagacaaagatggcgaagacgagtttgctgagctacctggcatgccaacaaggtttagttttcagatgttaaaacttgcaaccaaggatttcagcaacaaactaggtgaaggaggatttggttcagttttcagtggacagttaggtgaggagaagattgcagtgaagtgtttggatcaagcaagtcaaggaaaaagggaattctttgcagaagtcgagacaattggaagaattcatcacatcaatttggtcaggttgattggcttctgtctagagaaatcacacaggctcctagtgtatgagtttatgcccaagggatcactagaccaatggatctactacaaagacagcaatgatactcttgactggcgcacacggcgcaatatcatcaccgacattgctagggcccttgcttatcttcatgaggagtgcacacataagattgctcatctggatatcaaaccacaaaatatcctcttagatgataacttcaatgccaaagtttgtgattttggattgtctaggctgatacatagggaccagagtcacgtgacaaccagaatgagaggaacacctggatatttgtcccctgaatggttaacatctcatatcaccgagaaggttgatgtctatagttatggagttgtgatgattgaaatcatcaatggaaggccaaaccttgaccattccaatcttggagggggtattcagctccttaaattactgcaagagaaggcacagaacagtcacctggaagatatgattgacaggaagtgcaatgacatgtccttacaccaacaggatgtgataaagataatgaagcttgcaatgtggtgcttgcagagtgattgcaacagaaggccttccatgtcattggtgatgaaggtccttgaaggagaaagtgatgttgaagccaacttgaactataacttctttgatnnnnnnnnnnnnnnnnnnnnnnnnnnnnnnnnnnnnnccatgagattcatggttgcattacttatagcttccttatttgtagacaaagcggattcggaattgtctttccttccaaggataacttgtatccatgcgcttcagattattagcctgttaagtcctgcgaattatgttcccgttgacccattcaagatgtcactgcatggctccatgcctccacctgaagcaaatgcagatgtagaaaaccatttttgtgaactgtattactgcaatcatatcattgatatcacacatcgatcagtgcatacccaagttaatctgtgtattgactagaaatggtagtactgtttcagttcagttattttgtgtcttttgttgcaccattttgttggttgcccctagctaacaggtttaacttctgctgatcgtcatttatccatctcgcaatgatattaagatgattatgtcaataaaagcactgcagtgattcaaattttgaatgtacgtaagatgtaggttggaaatagggaactcttttagcatgtgaaatagacatctgtgttatttggatggtgaatatagtcgtcacgcgtcagtagtatgtaaattatatccactgtgcccccaggttaattgacaaacctcatgttttaagtacgagttataaacgttcacatctcaggctagaaattagcagcaatgtgtagggggagcgcacatggaggaaggagaacaagatattagagattaattatccttgctgatctttattcatacgcacagcaatacttaaattgaccgactaattaacaagtcctacaacttatttctactgcagttaaatcaactattgtaatcctaagccaactaacttgcgaccaatgtggtggcctgcactggctatgtataggtgtgctcaactcaactgcatattcgtgaaaagataggatggctaatatgtcatataatcataggttttcttcctcacagtaaagagaacgaggcacagatgacttcttcaacattacctcttccagaatttcggtatagtatttcactaatcttgtgctaaacattttaatttcttgctgttacttagatcaaaacattcttgaaatagatgttccctatttttcgccattccaagagatattttgatctgatatctactccctccattccacattataagacgttttggcctctacatccttcgtctagattcactaacatctttattaatttggatgcatatataaagcacaaacatagatctatgcatgcatatgttcataacccaaaacgtcttagaatgtgaaacagaggaaatatgtactaattgtataattcattagatggatcataccatcatgatctaaatccaatctgtgttcaatgtcatgtgccacctttaattccaaaatttgaatataaaaattagaaaagtgtagctgaggcatatttttattttactttatttaaactgctgtaactctaaatattaccaacatattgtgattaatattttaatgtttataataatagcccatgctatgcaggggttaaagactagttcttaacatcagatgtggaaacatatttattctagtctacatcgatatctgttactcaatttaatgttttgaaaacaatctgtattttatctgttccactagttctgtttcttgactaagaatattcaaagtcaatgctgagataaaccaacatgtgatatggacaaggaactgaaatgtacctggctctcattgctttcctctgtcctctttaaagacgttgcctttagaccaatacttctatcatacggcacacgacagtcgacagcaatacaactgggttagtgcaatggtcatctgaccttagatagttgtacaattttgaaagaagaaaaacacaagtccttataaaaaaaagaatcagcagcatccagagaattgcagtcctcttcttagttcttatacgctaattggggggttaaggaaaaaaaggagtgggatttgcgtgcacatggttgttgctgtgtacgagaatggctcttccaggccgcctcctcctcctctttctcactgccgcacatgcagccctgcaaacatgcggtggtgaccaaacccctggccccgttgcaaatgtatccagggtctggagcagcaatacctctagagacgtgctcctctgctctgtcccaggcaatggcaacgagaaactgtccttcgctgccggcttctactgctcctccccttgcgacgccatcctcttcgccgtctacatcacctcaggctccggcgatatccctgtggtcgtgtggtctgccaaccgtgaccttgcggcacaccagaacgccaccctgagcttcaccgccagtggtgatttggttcttgcaaatgcagatggcagcgttgtctggtccaccggcacctcagggcagtttgtcattggaatgaccatcaccaactctggcaacctggtgctatttaatgatgcctacatgccggtgtggcagtcgttcgaaaatccaacagattctttgctccctgggcagatgctagcggagggaatgatgttaaggcccaacagctctgccaccaactggactacaagcagacagttatatttcactgttcggtctgatgggctctatgcgtttgccggatctgaccaacctcaaccatactatcggtttgagttttattcgtcatatctggttaaaaatgaaagcatcacacagtatcagtacaaaccaacctttgtgactctggtgaatgggagcctatcaatccctggatctgatccactggagaccaaattgccacctgcacactcacttcagtacttgaggtttgagtcagatgggcatctcaggctatatgaatgggaagagttcaaacaacgctgggtgatagcaaaggacatctttgagttaaactactgtcaatacccaactgtttgtggggagtacggcatctgcttaagtgagggctgctccactgagggcatggactgctcgactacggagtgctcctgtcccaataccacatacttcaagccaattgacaacatgagacctactcttggttgtgcggtggaaactgagatttcctgccaagctatgcaagatcaccaactcgtagcaattcctaatgttacatacttccatctctggggcgatagccgtggtgcaccaatgaccgatgaagagagttgcaagaaagactgcttgagcaactgctcctgtaaagctgccttgtttagtttgtatctcaaccaaactcaggctttgctctatccggatctatctctttctatgtcatatctgaatacgtgttacttgctaccagaagtcctttcactgcaagcatatcttgatccaggctactactcaaaagatccggtaaacgctaggtcaacattgtacgtcaaggtgcagagtacacacctgcttcctccatcaaagaaaaaaaacacttttggttatgcaattggagcaaccgccgctgcactagtgacactcaccattatctcaatggtcatcaggaagaggtgtaatcgacaaagagctgatgaaagcgattttgcagacctgcctggaacaataacgaggttcaccttcaagatgctgaaagcagcaaccaatgatttcagtagcaagcttggggaaggaggatttggttcagtttttctaggaaaattaggcaatgagatggttgcagtaaaactgctggatcgagcaggtcaaggaaagaaggacttcttagcagaagttcagacaattggcaacattcatcacatcaatctggtaaagctgataggtttttgtgtggagagatcacacaggctcctggtttatgagtatatgcctagaggatcactagacaagtggatttattacttgcatagcaatgctccactagattggggcacgcggaagaggataatcaccaatgtcgccaggggtctgtcttatcttcatgacgagtgtaggcagagaattgttcatttggacattaaaccacataacattctcttagatgacagcttcaatgcgaaagttgctgactttggtctatcaaagctgatcgagagggagataagcaaagttgtgacaagaatgaaagggacacctggatacatggcacctgaatggctgacttcacaaatcacagagaaggttgatgtatatagctttggtgttgtggtcatggaaatcatcagtggaagaaagaacattgactactctcagtcagaggagaatgttcagctcattactttactgcaagagaaggcaaagaaaggccagcttgaagatctggttgacaagaatagtgatgaaatgcacttacacaaggaggaagtgattgaggtgatgaagcttgccatgtggtgtttgcagagcgatagcagtagaagaccatccatgtccgtggtggtgaagaccatggaaggagaaagggcggtagatgacaatttgggttataacttctttgatttgagccctgcaatatctgttccagttgagcagctcaacagttcattgcaccctgaagcatcaattttatctgcccctaggtgaaatcataggtaaaaaaaggtccagtgttcaacagtagtgttgtttctaattatcctatgatgaagtttgatttagttcgtgattgtcatgtatgtttcagcaatgtagctttaaaatgtctttgtctaagttaaaatctgaaataacatgcatatatgcattatatatactgagattttaaaatggcccttgaaaaacagcgatgtactgaacatatggccactcagttttaataaattgtacatggggcttaaggccctgatattattatggttattatagttattgttgttattactgttattgttgttattcttgttattaaatatttgattagtttgagtatttcattgcatcagacaatcaggttgatgccacatatagccaacagtgctgatttatgagctaatttgttttttatctgttgccattcagggtgtgaggaatattttgaaatatgtcttcacagatgatatttgtttgagatttttcccctgttagtattcagggtagttggcaaatatcatgtcaacagatgattattgccctcccttctgacacaagatcattctcttcctctatactccctccattccataatataaggcacgaccacttttttttagagacttagatgttccataatataaggcatgcatgcaagtatgcaattaattataacatcttctctattaaattattactttttaaaattcttcactctcatgttatctaatcctattggacgcatgcattatatttattaggatgatccaaagttccaaactacaagatgataataattatttcttggtctttgggttaagggtggttgtgccttatattttggaatggagggagtatatgttatatatttgagtgatgagtgcatgcagacattatttatgtttgtacagtacattttgcatgctacctgtgtcattagtatcatcaggagagaagtacctcagaacccatatgacgccttggggagattgtaatggcttcactggtgctcagatcatctcatggagatgtccacgaggagaagctcgtaggaggcgttgaatccctatccgtaaggctggctccatgaagatattcccaactagaaggggggaaatttcagaatagattagaaccacgaagagcaagagaatttcaagggaggttggatacctcactaatgtctcctcgagagatcggcaagct

SEQ ID NO: 4561 - DNA, 30530 bp, Oryza sativa
gtgtctagctagccatcgcgatagcggttagggcagccacaatgattgttatatatatatatatatatatatatatatatatatatatatatatatatatatatataaaagagatgtatgtcagcatattttcctacttaaaaggtattaaatgaagagagagagcaaaactatctactaacttagagatagtctatagagaaaaacgaggcaatgtatgagagagctatagatactaatgtagacatacttactatcaatcgagtctattgctgagatgtacatattttatagagagcaccttactttactattgcgggtgctcttagccggccttattgttcgattttaggattcaagacacgttccaacgtttaaaaagatctttaaatatggtctgatattgatgtcccgtgtttctctttttttcggtcgttcagatgatgtccggacatgttcatatattgagggcatttcggtaccgcatatcacacctttgggtaaaatcatggaaaactacagaataaagacgatgactataagataaagaaaaaaagacaaaactttcactaagcgatgaagttaactcataatttattttcatgatacactctgttaaaaatgttgtaataattttctcaaaaaaacgctaataagttttttaaaacatttacctcgtattttaaaaatatttgaaagaggatgtgtcgatatacaactgtagttatcatgcacttaatattttcctcgtgtaataacaaggagtcaccgactgtcaccaaaacaatgtagtggcaaccggcagcacatgaataagaaaaaaaatcacctctaatatatcgatgtatttgtatcatgctgaaataaaaagtagttactactaaattgaatatataggcactaatttatgccgaatatgttcaatcgcacttttagaaatgaggattatcacggaatatgttatttcggtaactttgtgttaataaagacattactacttaaccatgattgagatataaaaattaagcatctataaaattcatagtatcacacctatattctgttctcaaccccaatttttttatcatgatcattaatattacacactccttctaaataaataaattcaagattttcacatgacttagtttatatttcaaacaaatcctctaaaactgaaaatgtttcccacgataaatctattagtatcagtgaatcatcttgtccgatggtttgtttagagagatcaaattagtggataatatctctgcaatctaaaacagtagcatcaattgcataaaaatcatagataagtagcatcagtagccttaaaaaagcaactaatacgatgaaacatataaaactgcttgttaattaaaacattgctatgcaaccgtgattgaaatatacaaattaagcatccataaaattcatgctaaagacttaccgcatctttaatcttcttagtttcttttggccctagttttttttaatctagatacaacaaaaaaaaacaacaattataatgaaacgaatacaatcacattttaataaaaatatcgctatgtaacatgactaaaatatacaacttaagcatccatacaatttattctaaaaatgtaccacatctatattcttcttgactactttcaaccctaacattttatcctgatacaaccttaagaaagcaacaatcacgatgaaacggataaaaccacatgttaataaaaaattactacgtaaccgtcgttgaactatacagattaagcatccataaatttcatgctaaagacgtaccacatttctattcctcctgactattttcagccccaactttttatcctgatacaaccttaagaaagaaacaatcatgatgaaacagataaaaccacatgttaatataaatattactatgtaaccgttgttgaaatataccaactaagcatctataaaattcatgctaaagatgtactacatctctattcttctttatttattccggcccaactttttatcctgatacaatcttaagaaagcaacaattacgatgaaacggacaaaatcacgtgttaacaaaaatatttctacgtaaccgtcattgaaatatacaaattaagcatttataaaaatcatgctaaagacgtaccgtatagttgtttctttctgtcccaaccttttatcgtaatacaacctaaagaaagcaacaatcacgatgaaacggataaaaacataaaaccatatgttaataaaaatatttctacttaacagtcattgaaatatacaaatgaagcattcataaaattcatgctaaagatgtacaacatctctattcttcttgacttattctagcccgagctttttatcccgatacaaccttaagaaagcaacaattacgatgaaaccgataaaaaccgtacgatgataaaaaatatttctatataaccgccatttgaacatacaaattaagcatcaacaaaattcatgccaaagacgtaccacatctccattcgtcatccatacccaattctttatcctaatcaataccaccaaagactccttctaaactaagaaactcaagattttcaccttggttcatctctcatgcaaatcctctaaaattcctcctataaaacatcccagttcatgaaagaaaacccttcaaaaatatcatactgagcacagttattagctggaggagtcagcacagttatcggtaaaaccacttccccatctgtccaaactccaaagccggcctcaccggcagcagccacaccacaccacaccacaacaccccgcagccttgctgcctcccctccctgaccggtcaaaagcacaccaccaccatccccccgcaaagccaagcaccaacgctcagcagcagcagccgcctccctccccagctcagctcagctcccccccgcatggaggcgccgccggggccggagcccatggagctggacgcgccaccgccccccgccgccgtggcggcggcggcggcgaccgccggcatcagcgagaaggtaacccgtggggaggggggtgtccagatctggggtgtcggggtggatctgggctggggctcggtgccgatctgctggtttcggtggtcgttgggctaatgctggttttctctccggtgtctcgcggcgccgtttttttttttttttttttttttttggttggaggtgctgcaaaaaaaggaggagggcgggggcgaccccgtgacgggtcacatcatctccaccaccatcggcggcaagaacggcgagccgaagcgggtgagcttttttcggggtctttttggtttctgttcttctttgtgtacagtggaatgtgctagttttggcgcccttcgcttgcttccttgctcgtaacaatcacttggttcgctaaggatttgtgctctcttaagccgtttctaagctgttggtagtgttcggctgatcaagttagctatctatgtgctgattcgtcggggaatcgcaattttgtgggtttggggctgactagatacagttgtcgttttgatttgtaaacaatttagcatttgactgataaaattacgtagtgtattcctcaattaaatgtttggttattcaattacttgaggataatgtacattttaggaagcatgattttctttttctgtccgctatttcatagtctatcctgttgtttctagggggtaataaatgcttcacttctaattttagttagtcatgataagctggaactctgatgcacaacatagaatccgtcaatcttgagatattgtgcgcgatttctcatgcgatttttttcttaccttaactgcagacaattagttatatggcggagcgagttgtaggaactggttctttcgggattgtgttccaggtacgatgcttggtcttatggaaatgcatgcttaccgtgtattgtacattttttgatatgtttgaatcaaactgatttagttttcacatttaggctaagtgcttggagacgggggaaacggtggccatcaagaaggtgttgcaggaccggcgttacaagaaccgtgaactgcagcttatgcgcgcaatggaacaccccaatgtcatctgcctgaagcactgcttcttctcaaccacaagcagggatgagctgttcctgaatcttgttatggagtacgtccctgagacactctaccgtgtgctcaagcactacagcaatgctaaccagcggatgccattgatctatgtgaagctttacatctatcaggtttgtcagccaccatgttaacacctctctgattgccactatgcttctcattgcttctctaaagatacttttgctatgcttgcagcttttcagagggttagcttatattcatactgttccaggagtctgccacagggatgtgaaaccacaaaatgttttggtatgacttatgtgaacaaggctacattacttctcttgcttggttgtttgttttgaactggtctctaattgcttgctgatacaggttgatcctctcactcatcaagtcaagctatgtgactttggaagtgcaaaggttctggtatgttgatttccacccttaagagtaatttctcagtggtttgatgtatgctgaaattattctagtggtaggctagtcataatgttgacagcataagtggtttatttcgtcatgttgcttttacgtgtagatatgctgcttttgcctttcatgattgatttgtgatagaagttaaaatttgcactgtgctgggatagacttttttagatagctcaatagttaataaaagaaattgcctatcatgatcaatatttccaaattggttttatcatgtgctgttattatgtcgaaggattgttaagtttattaagttggatgcaaagttgctgagctaggactataatgatgaattcctgagcttggattataactgttggcctctcttccctagttctgttatttcttcattttgctattttaacaaatagattgatgatctccttgtactattccaccaggttcctggtgaaccgaacatatcatacatttgctctcgctattatcgtgctcctgagctcatatttggtgcaaccgagtatacaacttcaattgacatatggtcagctggatgcgttcttgcagagttacttcttggtcaggttagtcactatatctttatctaaggaactgcaacattcaggttccttgattagattatgctgtgatgttattctgattatatttcataatgtgtatttgtcagccactgtttcctggagagagtgctgttgaccagctagtagagataatcaaggtattgcatgatgttgtgcaagctacatttttttttttgccacgggtatttcttgtgttaacttgatattatggcaggttcttggtactccaacccgtgaggaaatacgatgcatgaaccccaactatactgagttcaaatttcctcagattaaggctcatccttggcacaaggtagccatgttttcttatattggatcaccttcctcataccattttacttgcagggcattgtaggccacttcaaaaccagtttctgcatcatgtttaatttgaaataaaaaaaatgtatctgcagctgcttaactgatccatctgttgttctttcgcttaccaccagattttccacaagagaatgcctccagaagccatagaccttgcttcccgtcttctccaatattcaccaagtctacgctgcactgctgtgagttttctttcgtttgcttagttttatattatctataaatctattgttttcgctaagcgctaggataatgattatttacatggatttgcttattttagcatttcatttcaagtgttgttagctgttacagtcaaatattcatagaccgtgtgtcaagaacaataaacgaaatgtttctgttgaggtcccttatggaagtagattgatggatccctggtcctgcatggtcattgtaattataatatccagtggtccaaaaccaaattggtgtgttggctggtgaagagtgagtgcaactttcatacagtcgcatgtgcctgttaaatatagttgttagtgctccacttgaaaaagttgctgttaattgtttaaagcttatgctttagctggaaaacagtataatctctaaagcagcatgctggacattttcaaagagcttagcatttggttgattatatgcagcttgacgcatgtgcacattccttctttgatgagctacgagagcccaatgcacgcctgccaaatggtcgtccattccctcctctgttcaacttcaagcatgaagtaagtaaacgagaacattttcaaacagtcgctttttatggtacatttatatttacctgtcatggatgcttatcaatgctcatttctggtatgcagctagccagcgcctctccagaactcatccacaggctcataccggatcatatcagacggcaacatggcctcaactttgcgcatgctgggagctaaagggcaccgcgacgccaccgttttgttcgtttatttttccatgagctggacattgcaatcctagatgactccattgtcctggacttggactccatctcagattgcaccatccatgttccatgatccatccatccgtcaagccatttccgcaaggactcagtaccagagaagaagtacaattatgtaaattatctaaccatggagaaatgcgtgctgctgctgctggtgttaagtacgtgacggggcatgctggttgagtagtaggtaaggttaaggataaatgtagttggtggagactgagagacatgttaagctagggaaccctgctttccttcttttttttttctcctttcattttggtttcttcccattttgtgatccttagcattgccctacagtagtgtagctgctccctgtttttgtttgctctttcatcatgtaaatgccaatcccaatcgcaatgaaccctctttccttcacatcctggtctactccctgtcttgattttgcagctttgtttgttgatgatcaagtagtgaacctgaacatctctgcaattcagtgcaagaacacaagaattcagcagaatcatgtgatacaaatcatgcaatcctgcgaggatacatttgcagcgcaccaatcttgatgcagcggaagcatacacgatacaacatacggtaaggtagactacagcagcggccgtggcggcggcggcggaggctcgtcggtggcgtggtccttcaccttggcccagagctccggccaaatcgccttcctggtctcggccacgatctccccgtcccatcccctcgccgcgagcgcctccgtctcccggacggcggcggtcaccacgtcgtcgacgccgccgtcgacggccgcgtacacgatgccccgccgcagggcgtcggccgccgtcatcttgttgccccggaggactagatccctcctgttcacggcgtcggggaccttctgccggatcagcttggcgaagaagtcgacgatcttgaggccggcgtccacctcgctcatgtacaagaagccgcgggaggcgcgcatgaccacggcgtcgtgcgcgagcgccagcgcgcacccggcggccgcggcgtggccggtgacggcggcgacggtgggcaccgggagagcgaggaggtcggcgacgaggccccggaaggcgccgcccatggaggcgtgcagctcggcgggcacggtgcgcgcccagtccaggtcgaacccgttggagaagtacttgccctcgccggcaatcaccagcgcgccgccggcgccccggcggcggcggcgcggacggcggcgacggcggagcggagcgcggacaggaggggcgggccgaggcggtgctcgccggcgccggtgagggtgatgacgtggacggcgccgcgcttctccacggtgcacaagctcgccgtgtccatttggggatttcggcgatgaatgccgtcaagacctggatgtctggactcctttggcgtttcagttcacgtttatcttttcgacatgagcttcccagcatcttcgttttgtttaatcagctgtcaagagcaagttcaatagtatagtccactactagctccaatttatctatagctaatctaatagccaattaatataatagttgcttactatactattagcatatggtcccactgtcatacacacattgcgtcttgtagtccgtgctgcagctggctacagatttgtaacccgctgctcttctctctcatcttttatctcattaaaatatgtttgcagctagcttatagcaggtacaatagcaggctacaaacaagctgcaaacatattttaaggagataaataaggaaagagaaggacaacgggttacagatttatagccagctgtagcacggactccaagacacaatatgtgtatgacatgtgggaccatgtattaatagtgtagtatgtaactattatatgaataagctattaaattggctatagatgaattggagctagtagttagctatactattgaacttgctcttagtgtgctaatcgtcgatttgattccaagtccagtagctcatgagtcatgacgcgttaccggccaatcgtactggatagtactttttttaaaacattttgtaaacgactcttgcgtcgaagatcaacattacaatcacatttatcttgcaaacaaattgtagactgaccggttttggaaaagataagcaccgtgacggaatgagaagaaatttacaaggtaaacatcatcgtacaattcgcctaggcttggagggcaagattatagatttatttttacaggaacgagttcccaacttccgtatccgcttggagcacacggattttttttaaaaaatacgttgtgatttcacatgaaagtgcacgattaccatggggattcctggtattctactaaattgccagaagggtttgaactttctgagttacatttattggatcattgccaaagaaacatctgtagtgacattttctttttctaaaccattctcttttcattttatcaacattgacagcagttcgtagcatatgtcaaatcatatatctatctctgctaagagagtaaatagatctgagcattaagatgaaagtacataccaccaaaactgatccaactcaaagttgacaaaataacaaaacatctttagttttaagaagcatacaaatccaacatccaaataactcaagttctaaagagaactaggcactagtgacgcttaggaggtgttggcttgggccttgttgaggatgacaccctcgtacttgacctggaaccacttcatggcatcctccttggtgaccctgtgctggataccaacacgggacttgcacctacggcgccgcgcaacacggtacccagcacgctcaagaacgacgtagaagtccataccgtaaataccagtggatgggtcatacctgaaaggcaacagataggtcaatttacttgtgaatacataacttcattcaatgatgatgatggggtgatattgaggggttagtgtgcagtcaacaaaaaaaacagacaatgtgtcagcaggtctatgtacatcaaggaactactatcaatagaacaatgtgccttgacaaatactgtgaatataattagttaacatgggattccaagaacatatcaaacaataacaatacaatgatacattagctggaaaacactagcaaacattttgcaacagtgcacgagagcatatcgtactaaaagcaagagcatatcgtagtaaaagaagatactcaataacctgctacgagtccaagaggctagcacactagtgcaacattggatgatcaactacgtcgcatgaaacatacactgaacaaaatttaggaaccaatgcatagcacgactgtttctgttatacatcaaacattacaaatgttgaaagatgagtagcatttgagatttgaagtgaggattttgatacagaaacaacaaatgtagtaaatacacagatcaaactgattttaaaaactacatttcacccaaataaaaatctacgcatgaagaaaagtaactacatttgggcgttgaaaaggaagtttagtaacaaatgctctacattgaaataatacaagattatgggattatataatcttacttgatgccaagatcaatgtgctcctggataccaaaaccaaagcatccagtctcactgaagttcctcctcagcagctcgtactccttcaccttcaggccactctccaggagctgcattgccttctcaccacgcactgtcacgtagcacgcgatcttctcattacgccggatgccgaacgacctcacagtgtacctcgctgcaatatcgcatcatcgtcactccaagtctgaaagccagcaataaaccacataccactgataataacaggccagacttcagaatttacccttggagaacaccggtgactgcccactcagctgctccagcacctaacagaacaaacagcagaatttacatacatttgagtatggacgatcgaaaacatgatgcataaaactcaaagtcaaaacaaaatgttcatttgaggccaatgaggctggactaatcatgcccaatctacaaattcgacaaatggaataaattgaaagtccaaaccagcttctaatcgtaatggcttcatgctagcagcatcagtaacacaactttataaaccatccacgagcaaccagacaacagctagattggacacacatcaatcaaagaataaaaatgcccagaaccaaacaatagctagccgctacacaatccggactggaaagctcaccattgcactcagcctatctgaaaccaacaaaccgtacagctctacatgactaaaccaagccgaatctgacatgacatgaacaggtgcatcgtgattattaccttcgaggcgcgggtgaggcgatctccgctctcgccgacggagatgttgaggacaagcttctgcaccttgatctcccgcatcgggttcgcctgcttcttctccgacgcctgcgagcacagaaaccaaccaaaagaaaacgcatcaaaaccacgcgcgcccgagcggacagaagaacgaatcgaggagaagacgtcgccgacggcaaggcggcgcgcctctcaccatggcgagatctgggaggcggcggcggcgagggggaggcgggagcggcggagatggggggtttagtgttgctcgggcggcggcggggaaggagctttgtaggagtaggggaggaaaccctaaaattgttgtgctgggtgtttgtatggtgacaattactatattgccccggtggaatggaaaagaaagggaggggcatttacgtaatttcagttaataaaagggattagaaaaaaatttccgttgccgggactcgaacccgggtctctcgggtgagagccgagtatcctaaccagctagactacaacggaagcttggtttctctgtaattctaattttatgtatatgttttgtatatgtagcaatttacaaaaaaaatgtctaatcttctgtttgcttgttcattggaagattcgacctgattatcacaagccgtataaatcgatgaattcttgtcgtatatctgtcatatatgggaagaaccgaagaagcccaacttttcttggcacaaataatatcatctctgtgttgctgtctgataaacttcattttatcggttattagtattactgtttgtaatcatgtattaggagtaacagtttttaactactttttatagtttggtgaatgagccaagacaattactcgggacttggtttcagagatcctaaaacatttcaatgcaacagatggccttaaaaaaaacttatcatagacaggggctgaccataagaaggtgcattacatgtattctacatttctacagctttcaacaagtgaaagagggtttcagagtgaacaaaaactcaagaggtactcttagaaagtcagagattgctgtaaaaactgctataacaattcagtcactgtcagcaaagttgctggtagtagcctggttatctgcaagactgcaactgcgtgattcttggtcttggccaggacttgacaatcagacacccttcagacgatcaatcagctcactcttcttcagcctcgagtaacctttcatccttctcgccctcgccaattctctcagctcagccaccttcatatcattcagatccagcgcctttggctccccatctgcatgttcctccgaaacatcagctatgcctagcttgtcaacaagaagcagatgatcagttctgggatgtcaaacagcctgcatttgtttgatgtgttcttggaacagcaataaccagttctttttctgaaatacaacagttcaatccacagtgaacagcatcagttctgtacatgcagaaacgagtgcaagttctacgttttcttttttcacttaccgtatgactgcttcctcctctcaacctcttcgaacgggtcagatgattgcttcctcgtcctcctcgaagttcttggcgattcctcggcaatggaggtctggatgcttttgaagaactcaatgagctcttctttgctacgcctattaaccgttcttggcaacggagatccatttgcttctgacctgatgctccccaacgatgagcatgagaagctattccgtggaggacaaagcagaatcccatttgcaaagtctgcaactaattgaaaagatcagttacttaacaagaagtttcttagttcatttcgccatgatttgcagttttagctaactgcagtttcaaaccaggtgttataaaagcagaaagagaaatgatggcatgctgcaaaatcatagttaattacttatgtttatgtatgtaaattaaggcatgtgtgtaaatttcagaatgaactgattcactgtcacctttgtggagagcaaatgatcctgggaaggcagcctttgcgagataatttggagagatttggtgatgctgcaagagaattcctcccattttctccattttttcttgctccaccacacaacaggtgaagaactccctgtcctccaatggagccaaaagtttgttccttctgctctctgcttcaatccactcacagccacatgaagaaaaaatgagaactgatactcagggaaaattttcattgataccctcaaagtaatattgaaattttttaggcatcattttggaactagtacagtagtactacaacacaaatgcgtgatgtccttttcatgaaattttcttaaatgtgaggcgtgaaatgggaaactttgcaacccaatccagaaagctatccatttcaaccaagcgaagccgcggcaacatcgcgggatttcgcggcaaaatttgaactccccttcttcttcttcttcctcctgctcccatggcgacgcctccactcacctccgtttccagccacctccgagcccctcctccatggccgcctcccaagaacagcagcccaagaacaagggttaggtgcgacgtcctcgcggcgtccggtcatatcctggaggcggcctctgctccgaggggcgccaagaattcgcggagtcgggcaccgagaaccgatgtggacgtgcagattgagaggctctgtcgggcgggtgagttagaggaggcgttgaggttgctcggctcggatggcgtcgacgcccggagctacggcgcggtcgtccagctctgctcggatctgagatctttggaggccgggaagagagcccatttcttggttcgcgcatctggtgttggaaaagatggaatggatagtgttctcggaaggaaattggtgctgatgtatgtgaaatgtggggatttggagaatgcaaggaaggtgtttgatgaaatgcctcaagtgagtgacgtgcgagtttggacttcactgatgagcggttacgcgaaagctggtgagttccaagacggcgttttgctgtttaggcagatgcactgttctggggttaggccggatgcacatgctatttcgtgtgtcttgaaatgcattgccggtttgggcagtattgcagatggtgaagtagttcatgggtaccttgagaagttgggtttgggggtgcaatgtgcggttggaaatgcgcttatagcactgtactctaggtgtggccatgttgatggttcactacaggtgtttgatgggatgcctcaccgggatgtcatttcttggaattctgtgattagcgggtgcttttcgaatggatggcatggtaagtctattgagcttttcgccaaaatgtggtctgaaggcctcgagatcaatccagtgacgatgcttggcgttttgcctgcttgtgctgaattaggatacaatcttgtcggaagggtgcttcatggatactcagttaaaaccggactactttgggaatttgaatctttggagaatgggatagatgaaaatctgggatccaaactggtgttcatgtatgttaaatgtggtgaattgggctatgcaaggaaggtttttgatgcaatgtcatcgaaaagcaatttacatgcatggaatctaatgatgggtgggtatgcgaagcttggtaaatttcaagaaagcctcttgctgtttgagaaaatgcatgactgtggaattactcctgatgagcataccatttcttgcctcctaaagtgtatcactggtttgtctggtgtaatggatggtttggtggttcatgggtatcttgtgaagtacggttttggggcacagtgtgcagtttgcaatgcactgatatcattctatgcaaaatccaacaggattgaagacgcactcatggtgtttgatgaaatgcctcaacgtgacatcatttcttggaattctataattggtggatgtgcttccaatggtctatatgataaagctgttgagttgtttgtaagaatgtggttagaaggacaggagctggactctactacactgctaagtgttatgccggcttgtgtacagtcgcactattcatttataggaggagtggttcatgggtattctgtgagaactggattgattagtgagacatctcttggtaatgctcttcttgatatgtattcaaattgctcagattggcgtagcactaataagatattcaggaatatggaacagaaaaatgtggtgtcatggacagcaatgatcacaagttataccagggctgggcattttgacaaagtggctgggttatttcaggaaatgggattagaaggtatcagaccagatgtcttcgcaatcaccagtgctcttgatgcatttgctggcaacgaatcactgaaacatgggaaatctgtccatggatatgccatcagaaatggaattgaggaagttcttccagttgctaatgcactgatggaaatgtatgtgaaatgtgggtatatggaagaggcaagatttattttcgatcatgtgacaaaaaaggatacaatctcatggaatacactaataggaggttactccaggagcaatcttgccaatgaagccttcaccttattcaatgaaatgctactccaactccgacctaatgcggtaaccatggcctgcatccttccagctgcagcaagcctttcatcgctggagcgaggcagggagatgcatgcctacgcagtacggagagggtacttggaagataattttgtagccaatgcactcgtcgacatgtatgttaaatgtggtgcattactgctagcacgccgtttgtttgacatgttaaccaacaagaaccttatctcatggaccatcatgatagctggatatggcatgcatggtcgcggtagagatgccattgccctctttgagcagatgaagggaagtggcattcagcctgatgccggttctttcagtgccattctgtatgcttgtagccattcaggcctaagagatgagggatggagattcttcaatgcaatgcggaatgagcacagaatagagcctaaactgaagcactacgcctgcatggtcgatctactatgccacactgggaatctgaaggaagcttatgagttcatagagacaatgccgatcgaaccggattcgagcatctgggtctcattgcttcgtggatgtcgaattcacaggaatgtcaagcttgcagagaaggtagcagagatggtctttgagctggaacctgagaacacagggtactatgttcttcttgccaacatctatgctgaagctgagagatgggaggctgtcaggaagctcaagaacaaggttggtggccgtgggctccgtgagaacactggctgcagctggattgaagtgagaggaaaggcccatatcttcttcgcggaaaaccgaaatcatccacaaggaatgaggattgcagagttcctggatgatgttgccaggaggatgcaggaagaaggccatgatcctaagaaaaaatatgctctgatgggcgctgacgatgctgttcatgatgaggcgctctgtgggcatagttcaaagctcgccgtggcattcggtgttctgaatctgtcacaagggcggccaatccgtgtgaccaagaattcaagagtttgcagccattgccatgaggctgccaagttcatctccaagatgtgtggtagagagataattttgagggattcaaatagatttcaccattttgaagaaggtaggtgttcttgcagaggttattggtgagcaaaaaaaaaaaaaaaaaaacatgtttcattactcaggcatagttttgttcatagtagcgtacatatgtgctacatatagcaccatgtaagcttgaatattgactatgatttactcgttacattacatgaggaagaattgaagatgatgcgctacatcattgtggtattgtctttgtaagaaagaacagctaaaataacacaaaacataaatggatttcgccattagtacaaggaagctggttgcaagcacaaaaacacgctgactcttagagaacatacgttcatttcaccgtattaacaatcttgaactctcacttcacacaactagctgcagagaactaacaatcttgatttctcacgtcacacaacttgctgcagtgggcctagcttcatcattgtcaaaagactagtcaggaccaagctgacactgatggtcgggcacacaattttgtgctaaatgtcctcaagaaattgtcccatcgactggtacagggctgctcttgggcattgataatgccgcacattgtcagtctaaggtagattgtaaactttgaccaccttggatgtgtcacacacaatcaggttatctgaatcagtcggagtagtacacaaccagttcacctgtcaagatgtagatcaaaggttagcaattttacccaatcctaagaattcagtcacatccgttaacagcaaaattactatctagtagtacatcaagtaatggagtattatgtgcagatagatagccaaagtctgcagacaacatttcacagaatttaaggttgagtggctacctttttattaacctttatatccaacaccaattcagcactgttgtttgtttcagaggagaaccctttggaccaatcccataatttaattgatgaatcattgccaccagaaacaagaaacttccccttctcgccaaatgctgaaaatgtactgttaaagtattaagcagttagtaaaagggtaagatatgtaagaaattacagagaaacaacatagtgggacttacacgcaagaaacagatgaagtatgaccacccactgtgtaatcaaggtggatcctgttcccttgactttgactaccacatccatctcctaaatcagttcttttcgagcttaaactcaaatctgccatccgaggaagcccttttgattttgcaggggcaagttcatattctagatcaaccacatcaacagcaccatctcctcttgcaacagcacaaactttgtacgaccctcccaagatgccctcttcagaaactgctattgagtgaacaaaaggaggattgaaacattgcccacctgaacttccattctgcatttcaggtgatcctgacgtccaagagcaaaaaaaaaaaaaagttaatcaatgcatgctggagaaaatttatgcgaaaagaagggaatatacagcattgtggttaatcagcaaaacccaactttcccatttaatcttaaagatgtgaacccattaaagtaaccatacaagattcactaggaattgttagtatatgaccctgtcaaaaggtaaacacatacatagaagttggtgcaatgcatggattgtaagtttttcattcaaggaaaaaggaggtaccataatctatagaaaacagtgttcgccctttggagaaatcccacacagcaagctttgaatcaaggcctccagtaatagctgttagatgaaactgaactaattgtgaggataaaaaaattacaaattaaaataaaagaatccaaggagaatagctagtatttgcatcttacaagttgacaaaagaaaagtataagtcaaacaatgaagcatgaagtagcactgacctgtccaaggtctccaaggaatgaattgtacactgctgcaaatcttataaagataactaagggataactgatttacatgttgcagggaaattaaaaaaaaaatactaggatcataaaaagatgaaacatcagagttaaacatcccagtagcactacataaggatacacttgtgtgggcttccctcaatcttttgtacaggcttttttggatggtgttgataatctgcaaaagcaaaagcagaatttctctaagagtgaaaacatgagcaagttctgacttggaataaccttctattgcaccaaagcaaggtagttcagaaatctatttccaattcaaaaactattattttatctaaatgatacacaagcacacaaaatcagaaaatctcaacaagaaaactttctaacaacaaaccaattaaatgaagcaagtagtgtgaaaatatcaccataaattctctagctatataacttgttaataattgaaaaactagaaaaactgcaacataaatatttacagtcaatgttcatttacttaaatttaatggtaaactgcattgcttacagatttgccaactctttcaacattttcaagtgaagtcctctaagtctaaacagcactaccaatattttgatcacttaatatgttttaagataatagaagcatgcttgtcttcaacatttatgtcaacacaatattttaccttgacatccccactgtcatctgcagcagcaagaaaacctttagagctcacagcaatctgcatcaaatgtggccttttagattctctttttaatccaatcgcatttgcataaaagctttaggtaaaataataagagaacatccataaagtgaaagcatcatttcaggatgaaatagtgatcttttcatagagaatgagatggcaatatactccagggtacctgattgatttcatctctattgtagttataagtgtccaatggctttgcttgaggtccctaataagaaaaaagaatcatggtaaccatattacaagagagaaaccaagttaagcacataataaaaatagggatgctgaacttaccattcgaacatcgaaagataaaatttcatttccagcagaggcatacacaagatcttcatttcctaccaaaagagaggacattttagtgtgtgacattggcacgccccacatatttttgggacaaaactctggagtggtttggacaacggagggcatgctgacctgctttgaaacacacagaagaaattggttgatttgtcgcctccatggtgaaaagcacatccttcgtacgcaaatcaaaccagcaaagacatccatcctaatgtggtcaaataagaagggtcaagaattatgaatcatattctcaaggtagtgcgacacacggttagaattgtaactttgcagaaaaagggaaatgccctaaaagaagaaaacacctactggctgtaagatgatatcagcaaacggatgcacattcaccaagttcatagcaattcataacgttcttgcatgtacctagtgccaattttgtagtttttaccgatcgtatatgaaatcctagatgagatctctacaacatcttcatgctgggaaagttatggtgggacaattggtactgaattagtgaactcaagtgccatcaggaagcagcaaggacaaggtgaaatagggaactggatactaatctatggttatgcaggttgctactttcacaaagttaccagtgcattattgtacacagcagtggaatgattatctcagtttgccgtcagagatgcaagacctctatagatcggccacatgactattgcctactagtgccttatgaaccagctcaaccgcccccgctaacgcacaagcagccatctaaagcctccggcaatgaatttggctgccaatagtcatggctgcagatttctgcatcgcaggggaggaagcatgcgatgcgagcctacaagattgtgccactagctcagcagacagcgcccacgaggtgttcgaccgttgtcctcagcgaagggcacccctctcctcctcctcctgctgctgctgcagcaaggtgtctcccaccagagaggccacgcgttgctccggcagaggaagtcgcaaggccctggatggcgtcgcgcgccttcccctcggaagaaagacccacgcacgagcagaatcgcttacctcgccggaggaggcgacgacgcccgggcgggaggaggaggcgacgcagcaggtgacggcgcccttcttgtgcccccgcagccgcctcggcttccgaccctccgccgccgccgccgatgaatccgtctcggacatggcgtcgcagcgctgaaccccagcgaggccgacacggagccgcagaccgtgcgatcaaaatccgacggtctccgctgctatctcgagccggaactcaactccgacccggacaaacatagtccgactcgtaggccaacgcgtacagggaaaggcggagaccgcgcctataaataaatcaatcaaccaagacccaaagccaaaccgtcccctaattttttcctaaaaaaaaactagcgtaatcctccatccaaatcctcgattttgagatcgatggagcgcaaagacggcgagacgccggtggagaattccgccgtcggcgacgcgaaggaggaggagaaacagcctcggcaggagaagaagccgttcgggatagacgcttacttggagaagtggacggctgcggaacaggaagcggcgaaagccttcttgcgggcgttgatcgcggacgcgcaccagtacatggagatgacggaggaggaggtggtggaggagtaccgacgggcggggaagctgcacaggtatgatccggatacggagtggcagaagcgatatgcccgtgtcgctagggctcaccccccgcctccctgcgtcatggccctcatacctaagttggaacaatacctcaagctcctcgatgaggatgatgaacaagattacctcaagcttcttaatgaggatgatgaataagataaaaaataattgggcttgatgaggatgatgaataagagtagaagtaattgggcagaatgaacaatattagaagtaattgtgcttttttaaggcttattcagttttctcaaatacatttatggtttgttctctttggtttttattaagacaaagacatgttttatttaatcaagttcaaaatcctctatggccacgcgacttctcctcggcctccaccagcctactctggcacacggcgggcgacgcaggcacacttcagccacatgtacactcgcatcggttgcctcagacactacatgcacactcttgtggaggttatcgtctccatactttccatcgcatctcgaccgtcgtcgaccactcatgaacagttctggtctggtcctggggtaggacgggcagtgcgaccgccctggtgccctgagccatgtatatgttgggtagcttgtacaacgaagttgcttgctaattatcacaggcaacagattatgtatctaaagtagtgaaaatactaaagtttttcctcaccacattgcgccacgtcatcaagtaaatactgaccatctgatgaaaggaagatttattccaagccattggatctggatgagtcagagtaaaggaggctcagggtgcgtttggatccaaggctagcaggggcctagcctggcctggcaaggacagtcgtttggaatcagaaaaaaaatcctagcccatgggggcgagctagcccataggagcgagaaaaggctagctcacaagggagagccgaatcggctcgcctccgatggcaagctcctcgcgtgaaaaaagttgttgataaggatgaagcgatttttttcaaaagttgttaccttcttcaacaaccagccccccaatttcgtcctcctcctccactcttcgccaaagaatcaggcttgcagatctcgtcgctctcttcccccactcttggctgaactatagggctcacagatccagtcaatttgcaatcatcctcctccccttgctgaactttcaagcatcctcgattcatctgcagtaatcccgtgcccatatataaatgcagtagagcctccggcctccacgcagtaaatcggagagcaaggccaactcgatttgaggagagcatgttcttgcagaagattgctactggacacaagattgctcgtggtgagaactgagaagctcccaaatttgatttcttccgccgatggtgcctcgtctatctagatttgcaggtacgaggacttttttcttatattaaatctctccatcttcctgccatggatggatgtatacgagctgtctatgttgcttcatgtactatttccacatccagtaatcttgctttgggcctttggtgctggattctgattttgcattaatggagattgtcgatggtatgggcagtagtagctaggaactttctggccgtcggcaccaagcatgatggaagacaacttgtatttaaagaagtctatcatgaggaatgtgcaaagcaaattaatggcaagtatcacacaaacttcacaagtcgacaagtttatcacaagttgaaggctcagtggaaggtgattatggaggcaaagaatttgagcggggccaactttgatgatgttgagaaaaaaaatcctatatgatgagactgaagttgttcgaatgactaatgtgagtgttctaactattctttccttgcaaataactatcgtgtttacatataatatggatgtctatgtttctgacatttttcttgtcatgtgtaggccaaagataaaagggctaaattcattaacgtccccatacgttggtatgatgaaatggagtttatttttcaagacaagcatgcaacaggggaatttaatgttctgcaaacaccatatgaccatccaatgactgaagatgatgattttattggtgataaaaatggcagtcctggtgatgttgacccttcatcaaattatgactcagattgtcttccagatcaagagaataatactggaagtagctcatcttctaggcgtgcaaaaggtagaaaatctgataaaggtaaaagagttagaactgatgataatgtggtttatgagataacaggggctatggataatatgtctgaaaccatgtgtttcacacatatgacacatccaaatgaatccctattcaagataattgatgagatgacggaataccctgtcatggttcgacttgagctgcaaacttatctcgcgacccatgagaatatagctgccatgttgaagggtaggccattagattctattaaggaatatgtggcccaatggataatacaaaactatccagctgctatgtaatttctttgctgagatgtttgaataattactatgcattcaagctaaatagtttaagaatgaaacgtgcactttagatattatttaaataattgatatgctttggttcgaacttgtaataaagtagttcacaaagatgtttgattgtttccaggaattcttttagcatatagctttgccctttttactacttctatccgtattattcttgtggccaagttaactgtggaagaatctgtagtgttcttgtgacaaagccatcagttaaaaaaatttgatctgtgtgcaatattattttgctcaatatgaaaagaagcggcacaaaatactctaaagagcaagatgattcgttgaagcaaccaaacggctagccactaattcttgccatagaaagcacaccaatcaaacaaagggtatatggcgagcctggcaagctggcaacgagttggcttgcccttacccagctaggctagctgggcaatggaaccaaacagaccctcaggctcagtaaaataccactgtcgctcccatctctcagtcaagcaaaggagaggcttcaggaagcttcccccatctccccgtcactcccgtccttgccgctaggcgctagctcccaccggccattcctcccaatctcttctcccaccggccaccgtcaccgctgaatacagtgtcctagcaaaccattgccgacgcaaggagaagtggactcttctagaagcttctgacagaaggatctagagtttttgtcaaattcgatacgtagtacagttcttcaataggagaactatgcaactagcagaagagaattgagaaaattgacgaaaaaaaaacgcaacgcttccttgatcttcaccacaccaactcaccatctccctattgagaccaagtcagtgcaggcagcacaagatagaagccctcgatgcgttgccatgctgctggccgccgaaaactcatctttagaaaagatcgacgaaagggggctaggttgaggagatcactcctcactcctcagtgaagccagcctcatccttcagacattctcctccttttcagcgcaaatccacggtggcaaaggtcgagctacaggctacctatagcagagacgagggggacaagatgcggtcctactcgtggagtcgtggttggtctgtgtatcccagaacccagagtcagatgcaaaagggaaacaatgaagaaatgagtagggacgataacgatgaggactggacgattaatttttattttgactgtaggaaaacgtgtagggctggattggtttgaggtctaaattgatcttactaatttttataattttaataatatttagtgtttatttagtttgaaactaaattttagcatgtcttaaaaaaaaggccatttcaatagttaacttaggttattttgatttcgattcaaatacaactttagcttaccaaaatttggcatgacaaaaattgataaaacctcaaacagcccgtactgcatccatcatcagcatgtcttgtacatatgtgacctgttaaatgcagagaaaaaggctataggcaggatgtgtgttttaatatgcatatgtaaatagtgtagcaagtattcttttaaataatttagttaagtacttatatgcatatgtactaattactccctttattctaaaatgcacttagatatagtgttacctttttacacaatcttttaacattatactttttttagggaaattttaacattatactttaactactactaatttctttcgtttattatcgataactacgaaatcaacgttacataaaaagatttaaatagaaacctgacgacactcccttatcatagtcccttatcatatagtgatataaaaatcaaataaaaatcgacatacatagcactaatcatatactcctatacttttagtccattcattagtcaaatttttaagttttgattttcctcaaaataagaatgccatatatattttagaatagatagagaaacaagttagtatttatttatcatataataatgcactctcttttgtcataaatatatatcttttgtttttttaccgaacctttaaaattttgcccatcaacgagaactcaataacggggcactgttggcctcacccatatatacatatttttacatatctttcgaacgggtcttaaaagagccacgcaacgcgtggcttacgtggctagtagaagctgaaagcatgttaattaactccagccagagatgcatcggaagtccgttacagtccatacttttgcaccactgtccactgcttacgtaaaatcaacaccgtcgaagctgtctcgttaattcctcccgaagcgttgggggaggccgggagggtttggggattgggggtaggggatggatgttttacataaaaacctctacacttatcatgtttacagcgctactctttgaagcggaattttctctttttcacattgtatttcactgaaagacaaggtgttttcaggataaaacatgacgggttgttagtcggtttaaggatctctgtgatattttctataaacacgagtagttttttgcaaaaatagccaaccacgcttattctctctgaggagaaaaaaaattccataaagaaaacgagaaaattcgtatggttagaagagttattgattttagattatgacttcttatgagatgttaatgcgtaattagccaactaggctaagttcgttcccgctagttgggaactaatgtgcagtgcacgtaaaacggactaactcattagcgcataattaattaagtattagctttttaaaaaacacaggattaatatgatttttaaaagcaacttttgtgtaaaatttttttgcaaaaaacacaccgtttaaccgtttgggaagcttgcgcacggaaaacgcgggggagtgagttaggaagttggaggaacgaaaacagccttagagcaggtacaatagcagattgtaaaccagttgtaaacacatatcgaggagataaatgaagagagagaagagcagcgggctacagatttgtagccagctgcaacacaaactgcaagacgcaatgtatatatgacaagtgggactaggtattatactagtgtagtatatgtttataggtaactattgtttaaacttgccattaaatcgattatagattatttggagctagtagttggctataccattaaacttgctcttagtatcactacaacataatctttatgtcttatttactccatttgtagcattgcacaatttgcgctaatattcaacagaaggcgtgttttttttatttttaggagccatatcatctattatatactttgatgaattatttttatgctactacagtttactgttcaatcagcaattttattgtctaaaatagctcatgtttaatgatgtgttaatgttaatctttcatttctatttggaaacaaaacttttttctattatatatgtgctaacagtgtagtgcctctttttttttttaacttgcctggcccctgttgacgaaaaaatcgaacacaccggcttgggagatctgcttagctccagtgcaggtccaaatatgatgacatacaggcgtgccagtcagtttgatcctgcaactgacaagatatgtaaacaatagatcaaatagccgatcggctaacaagccgatggagtagttccagccgatagccgataatagacgatgccgatacctgccgatagcgatagggtttaatcaatcggctatatgtccaatgcagataatgatataaaggcaatcggctgatgatgatgtaacaaaataacaatataatccagtataaaccaatcggctaataatgatatgatagataagcatcgatctgaaggttaaatcatacatcggctggaatgaaatccacaagattagattaaacagtaaaacctttgttgtcatcggctaatccaacttatatgtatatgcaatccttatgagcagatgcaacgtccagataactcaccggctgaaaccccgatgaaacccttattggcaatcaagaagcaggctagagattatggttctaagcacgacttagtagatcaaacttaactgatgcagcactaagtatgaaaagaaacataatatctagacaatcaagccgttgactgagttttcagggtggtagatgtctaagctaatctaatatagcaacgcgatttagccgataccggcagaaaccctaaaacgagaagcagccgatagagctaaattgatatgctaaaactagattaacagagacatatgataaatatgtaggcaaatatattatctaaaccagagcaatccaagaggtcgaatgtactgatgcagccttgaatgacgccgacgtaaacgatacaattgcctgggccgacagaacattggacttaccccttcgccggagatcgaacaccgatgcagccccgcgtcaggtgccaagtcccgccggacgataacataaagtagaaaaggtaaaaggtggcgatgcgccgaattgtattgatcatgagattaattacatagaccccgggtgtacatatttatacccatgggttgatacaagtccttgttggacaagaaagaaactttcctatagataaaagaaaaagataaagtccttataggacactaaacacactttcctaaagataaaaggaaactaacaaactattcctaataaatagataacttgccatgccgcatcctctttgaactcggtctcttccggataagcttcctttagtagatcaatttccttaaccgaatatagcaagaatccgacaactgacgacttgacaactctcatcggctaatctcaggacttcgaagctgatgctgactataagccggtgactactccgggcttaccaaatttcactgttaacagcccctaagattataaaacgattgatcttgtcagtgaaaatcgatcttttgctagcataataaagctgtgtttagttcccttcaaacttccaatttttccttcacatcaaatgtttggacacatgtatgtgccattaaatgtaaattgcgagacgaatctgttgatcctaattacgccatgatttgacaatgtggtgctacagtaaacatttgctaatgatggattaattaggcttaatagattcgtctcgcagtttataggcggaatcttaatttgttttgttattagtctacatttaatacttcaaatgtgtgcccttatacgtcaaaaatttagtgccaaaacaactaaacacggcctaatacataaagccgcatacacatgcactagtatgatttgctgctgattttacttgtacatgtcatataaagcttgagtttcattgtggtttataatactcaagtaatcgaggaaaaacaaaacaaaaggtacaagaatcgaccaacaggacaggtaaactcaacgtactaagcagaacaaaacctgagctcgtttttattaaaaacaagaagaaacataacattatgatagaaataaactaaaaacatgcaaatttaaaaatcttgttcatcctcctcgtctagatacttaaagtattctttcatccggggcttacgggcaatgagggaatcaggcgaggggtgagccactgagccctggcgattgtccgggtcatacttgtgcagcttatgctacctttgcaagtggtgactattaagctttacaaacactgatctactgaaaatttctacttcagcaggagacaccacttgcaaatgaaacggtaatcccagttcagagtcaccgcatgaagcttgtagtactcgtagatcactctcagatgattccattaagaatgagattaatgacataatatatacgcgacccatttggctactcttcatcattatctaaaaaaaaatttggctactcttcatacagcattttttagacaaacgactgttacttttcacactgtttcgcaccgctagcattcgctccatccaatcgatgatatctcctcgtgctcaggctcgaagcctcaaatcatcgtgcctcgatgaggcctcgttgcatgtagaaaaagaaagaagggcgcgacataggaagtctcaagtgacaagcgggacgcgaagcctcgccttcccctggaagaaagacccaagcacgggcagagatcgaatcgcttacctcgccggaggaggcgacgtagcaggcgacggcttccgaccctccgccgccgccgccgccgatgaatccgtgtcggacatggcgtgcagcgccgaaccccagcgttgagccgcgcggagggtctccgctgctatctcgcgtaaccggaactcaactccgacccggaaaaacgaacagttggagtccgagacgtaggcgaacgcgtacgaactataaatctaccaagaagaagaagacccaagccacacgtaccgtatctgcggatttccagcggaaagcaaccagattaaactcgatcgggatggagaaggaagaagtggagcctgcgcgggagaagaagtggaggccgtcttcggccgcggagcgagcagcggggcaggccttcctccaggcggcggtggcggacgccttgcggtacacgaagatgacgtggcaggatatggtggaggagtaccggcgggcagggaagctgcacaagtatgatccgggcaaggagtggcagattcgttacgcgcgtgtcgccagggctcaccccccgcccgcttccctcctggctttgtgtgcctgagatacaacaatacctcaaattcctcgacgaccttgaagaggaggacgatcatg

SEQ ID NO: 4562 - DNA, 29290 bp, Oryza sativa
acctcctccccccatccctccccctcctcctcctcctcccgtcgccataccaacccaaacccccaccttctcacctcgccgcccgcctcgcccttgctctcgccgccgcggagaggaggagagaagcgtgaagcgagaagagatcacgcggaggcggaggcggaggagggggaggaggttgtgggtgggtagtggaggccgcagtggcgtgagctttgacaaagcaccgggggttgcctcgccaccgtattacccctcgatctccgcttatttacgcgcatgccaccaccgcggcgccgcgtctgctctaaccccgccaggggtagtctcgtcatttcgcaccaccaccccacaccactagccactagggtgtgcgtggggggcaccccccacgaagcgtgtctctctccctccgccggggtgggccccacccccctcggctcggtccacgtcaacgacgctgcacgtgggcacccatgcgcggtgggccccacgagcgggacacgtgaggagcctattgcttttgcgatcaacccacgcctctctgtttttttttcgctcggacgtcgagtactgtgctactgctccgtccagtattttaattttggcgcgtgcgattatttttattttttttcctccttccccacctcggcgtgcgagggtggggtggggccaggatgtcagtgacctccgtgctcgtgctcggcgggttggggtggcgtcgacacgtggtggatcgtggggcccacgtggaggtgacggggaaacgggggtgagggacagcggaacgcggttacggggcggcgtgcggcgtgcacgtgagcgtgggggcccggggcccacccccacccgaccccccgccgcacggagggccggcgattggtccgcgccacgcgcgatgtgggcttttttgccagttgccaccacgtgatccccggcggcccatggcccccacgagccgtgtagtgtaggaggagagacctcaacgaccctgataccctcatactggtggcttctggtctgggcatgtacgatgcaacgggtggtttggatagcatagtgctctctccgtatccaaatacaaatatttttttttaagatagttatagctattaagaaagtagttaaaaatgattataaaaatattgtgatatgttaaccagagaaagtagatgcacaattaaaaggaaaattgttgtgattgattaagagaataacgtaggtaaaaatagcttagtgctcgaacataatatacggggttaattaaagcatgcgtttacatatgcatgggtgacagcttagtggtggccctagttggggtgtcacctactggagagcgacttttcctggcatgagataattaagtgtgtaagcgtcgacggtttacgtggaattattttcgattaagatatagattttctctcgattttcattaacacgctatttaaactgctaaacgctactctttttgtcccataaaatacgaatctaaaatcggatgtgtcacatccggtattaagttgatttttatgggatagagggagtatgttgcaaaaaaattctagatataaatataaaagttgctttagaatataaatgaatttatttttcaagtttatagtaatataaaattaattaatcatgtgctaatatcttcattgaatcattgttttgcgcgccttaactttgtgatcatatcttcatcttcattaggccttattcggtttaaaggggattgaagaggtctcaccgggattaaccgaacaagaccttatagaagaacaccaacataatatagcgtggcagaaaatataagtttttatttatcctagcagcactccagataagttcaagggcaaaagccatctctatttatcgaaatctatgcaaattagcgtgcgattagcgaggccacgtggcgctgcgtggttcgtgtatacgctcttcccgcgaagggctaaaatgtaaaatatgatctagcgaaggagtaaaatgcaaaaaagttagcctctcgtcctctcctgaagggtcgatcgacctcatgcctcttccccttctaatcgatctcatctcgacgcctcccgctcccggtaacggcgccggcgagccaacgacagggatcccagcctacgacgtgacgtgaagcgtgcactggaggacgacgtggagcgcgaccgcgccgaggccgcagacgaggagggcgagcaggacgatggcattggtgttgaacgacacggcgactggaccgccgccgccatggccgttctcggcggtcagcagagcgcgcttatcggtcgtcgccatggccggtagtggtgagcaagctacagtgtaatgtttcttcaatttattttcctgaacgtgtggttgctgatttgtagtgcgaactgtgcattcatggtgttcgatgaaatgaccaagaaagaatatatcttgttctttcttagagttgcatttgatagcacagttaggactattttgttggatagtgtattaattgctctgttgctactatactacttctgcagaaatccaggagaaacacaactagaaattgcagaatttgatgctaagttatgaaactcttatatggattactaatcagttaagttatgtattactgattccatcgtagcagcaatcgaattatacatgagttagagctattagtatatatacagttagcataatttggaacagaaatattaatgcgctagaagaacataatcaggaatggttcttgacaaaactcaagtttgattttttttttctgaataccctttctaataacatttataatcatgaaaataattctgcattgatacatagttttttctttggtctcaatcctgctcagtagtttatttcgagagtacttctcctcctgacaaaagaaaatgatctataaaagtggcgcaatttactaacatttgcatcataattggttagtgtgctcattgcaacttgcaagtgttctattcaagggattgtcctgagtattacttcagaaattttgaagttgcgatcgattgcaactgttcatgatgaccacattcttaagttaatacatcatgagcttgttatatttctatccacattctctatatatggaaaaaatatagtgttatctgaacatgtatttttgcgattatctgacaaatatataaagataaaatatttcctaaagagattttttttctctgtatccctctcccccatcctttttgttttgttgggtggatgttgaatgcacccataataagaactaacaatagttttcctttagatctggaactgctgtttcaatctaaaaaaaatagtcatagttttactgccatgtctctgatagcttttgctgctgtgccactaacccaccagaacaatctggcttaaccttgtctcttgctattgatctccttctatagtcagtataggtccaactaatttgtgttcacctccttatatttctagggatatgcaagataccaaagatataaattgttgccacctacaaggtgctcgaaatcatgacctccggatttaaaatatgtgaaagactatggttctaaaaattttttgtgtaactacattgttgtgtttcttctttgtgccgtacctagaagctagaccggaaacgactgtattctttaaaaaaaaaagattgtatacaactgtggtagtatcagacttttttatcttagtgaattcatgtaaatatatatttatctatggttctgtccagtttttgatgattgttcttaaagtgtaatagttacttttttttagcataagtgccatggaagctaatttagcttaacttgttgcatcggttaataacaccattgaatatttcatttaccaaccttttatagacatgaattttggaaactacttagcaagtacacaagggctataatgagcgcgccacttggcgcgctaattttctagtattactgaattcaactccaccaggaaaaacagttcatttcacatgactctggaaaagtttcacggaacaaaattaattcaattcttttagaaaccagtacattttctctttttttcaagtttcaaacaggcagaatgagcttttagacccgaattaattttcccgtgattcgatagaagaggcaacgagaaaacatacttgcgtctttccctcaaaaagaggggaaaaaaaacgtcctacttgcgtacacaaaggatttctccagctgaatactctgccgccttgtcaacatgcacttctaattaatccaaccagccagcttaatagagggctccacttgatgatacaatttttttagaagcttgatggtagattgattacgatcaaaactgaaggattgtggacttttctacacttcttccaggagaataaaaaattacataacctgattctctgctgcatcagtgagatgcatgcatcacgctcctgtgattcaacctttcaaaacgttcaaatagcatgctttctgacatgatcaatcttgcttaactgaagtactactacttgacttattatgtgagagaagttaacaagaagacctatgctattagattactagtggcaggcactaccatgcaagcggcaaaccgggggagagaagaaaagcaatcgctgaccggacaaatgtgaaagaggctccgagtttcagccgaagtttaaaatcaagcaagcagccatcagcacgagacgacgacttgaatactttgatcatcaacacgaggccagaagaatccatcaaaactgaactgtccaagagattagggaaaagaaaccaaaaggaaaaaaaaacagagtagagagtagagcatcacttccgtagaagattcagttctcatcaggcggcaatatggaagggttcacattatcacatagatgaagtgacctaccgacctcgcctcaggagaccagctatcctggattattctacaagagaggtgccatgcagagaagcagtccagttagtctgaagccaaactgttcctctccctgcacaacacaccaaagatcagtgtttccagtcagtctgaaaacgaactcttgatcctgtcgactacatcactacgtgacaatggttgctaaagacccagtgttccatggttggacaagaatacagcacaagaatctccatcatatgaaggagaagaaaagctcgtggctacaaggtaaaggtagaaagtgacggggcattggtctgaaaagggcctccctttttctactgcatcatattttaccaagttagcatgcgctgataggataaggggatccatgccaattggagcttcaggggcacatgaaccatagtgcttcgaatataatatggccaacaaaacctgaaggcagatgcattgccggctaagggcatacattggctgatctttttctaatcacgaaaggaacaggttattaaagaaagagtaagagttagattgagtgataggggtacggtaccttgtccaaactaaatggtttacagctagctaaacaacatcacatggggagtctgactgatgcaagattcctgggtgaaccactgcatcttagcttcagcgcatctgcttctgcggtgcaatcaggttgagttgcttaagtgcaaaaaacaagtaatcagatggtatgtgatacatgtgttggaatgtggaagcgttggtgatgtttaaagaaaaaaggatatcatggtacggcgttatgtaaacttttacgagttcacagcaaaataacaaatcacaggaaacaggaaacaagatatccttatgttttccttgatataaggtcattgaaacaatggcttcataaatatttataaggtcattgaaacagacaatggcttctgaaagcaaaggagcttagaaaaatctatggagtatctctcgtcaagctgacacaagatacttaagagacaaggaacctcataaatatgcagaactgacttaaaggaatcaaataatgtattcaaacagtatgagcttggcagtttacagctatcgtcaattgctactcagtcaggttcacatacccctgcctcaacagaagttacacacaatataaatatgcgaggtcagcgctctaaccttcaggtagtatttgcaaacaaaatatgagcttcatccatttgatccaaataaatttggtcacctctctggcaaaagcaccagaaaaaaaaacatgttataattatgttttagaccttgtcacatagtatcaagtaaataaaatgtacgaaacatgaatgcttgtctacctggtatacttcaagtaccttctacagttacaaatgatctgcttagtaattattggcttaggtttatggtgtccttgacaagcttgcaaatgctagctttcaattcaggagtaaccttgagttgctgaggacatgtatccaggacgaataaagtaagaattctcatagtatctgacaggatcactttatcatgcctagatacttcctggttaacaaactggcatgaatttctcatcttacaagagccgcatatctgaaggaggacaacgagcaaaacgttaacctcaagcatgttttgacagaagtaattctcgcataggattaaattgacaattacatgatacctactttagcttcctggattttaaagaaagctcgtagtctttttgatgcaaaaactgttcttcgctcaacagatggacaaccaaacaacgcaaccttcttcaagtcacttccagataaccatctacagtgcacacacaaggttcagcttcaacagcggagaaattgggtgataaagatagttcttcaatgttattttcaacttatttttttgccttacatactactaccaaagaatattaaaatcaaacataaaagaccaaaggaactgttcaacaaaatatcaagcatggccagctcatgtagcatatgcagggacagggagcatgatcagtgttgttcacaaggatgtattatgcctggaatcactattaatcttgaaacacagcatttcagagcacggaaagttaaatggaagagtttcagataagtaaacggttaattcatgattttttttagtatagttttgtgttcaacctataaaatctgctcaggactgatagctcccccactgtaggtggcaattaaccagtttccaaagtgtaagaggaaaaaaaaaggaatgcagttcattgttagaatccactgcaaaacatacagcagcatcagcacaatgcatacggcataccacaatccagaaagtcaagatttgaaacaaggaagcagaaccaattacatggtaaaactcattgccacaaactaagctcttcatttccaaattgaagaagacctagacattggtaattccccagggtagctgttcacttgttctcttctataaggccacattaccacatcttctcccaggttaacgaaatcagaaacgcaatgaattcacccaccatatccagagtttagaccaaacttgctaccaacatactccctccgttttatattgtaagactttttggacttatctagatgtatccgttgatcactatatatgttttgtatatgtgtccagatttattagcatctatatgaatttaggtaatgctagaaagtcttacattgtgaaatatggaggaagtacattatttgaaactaatgtacgtgtaagaaatgttagtcctatttttatttattgagataattgacggtcgaaatcgatacttaacgaccgtcatacttccactgtcgacatattgttcagagatgcaacagaaaaaaaatacaggcattccgaattaaactcacaaaatctagtgtttcatggtaatttagtggcatccatctgatgtagctaaatcatacaacttatatagagcgcaaagggaacaaagcaatcggagaggcggcactcacttggcgacgacctggtgatcatgaccgaaccgctcggccgcgcccttgacgacgtcgggggacaagacgtgcggcgccaccgacaagtcaggccccgggaggtacccgccgtcgtagaacctccggagcagcgccgccgcctcctccccccacggctgcctcgacctcggcctcggcctcgccctcggcttcctccgctcctgcggtggcccatccccgggctccggccgcggggcgcgaggcttcggagagcttcgaggcgcgaagagggaagagagcgtcccaggccgcgcggcgtcgccgccggcggcggaggagagccggcgagcggcggagagtgccatgggttgagagggttcgggtgacggagacggggaagaaatctggtgtgatctgaaccgtccgatcaaaatccgtatggcctagtttggatgggcctagatcgaagcccatgtacacgaatgggccggtatactgaactccagggcccattcacgtagatgggccggtattttgttactagcctaatgccgtgaagcccatggaacgtgcagtcttcggccctgttcgtttcctctggaaaggatgtattaatttttggatattcgtaccacgtttttcaaaccgctaaacggagtgtttcgtgcgaaaactttttatatgaaatttgttctaaaatatcagattaatccattttttaaatttgtaatagttaaaatttaattaattacatgttattactacatcgttttacgtgaaacatttaaacttcgtcttcattcttaggagattcaaacaccacagaattctcacgaatttgtacacttaggtttctctcatttggttgtgtgtgtttttctttttcaatcactcgaaattcgaaaagactgcactgcacgtgcacccgcaaatgaactctcccaaccctggctcaattgacgaaagcgagtgtactggctcaattgactggtcgacctacgagtcaatggccagttgatacttgatagacatgggtagaccgccctaatcaaaaggtaatctgtggattagtcggttttcaccgattaatcagttaaagtcggtctagtcggctttagtatgtgatttaagtgttgtttggagttcaaaattcttaggaaaatcgattagtatttaacttctaataatttagaaaagctgaaaaacacatcattttacggatttataaccacatcttctaaaaatctagatgaaaaaatagattgtttgtgttatgaaaatagatgcacaacggaaacacaaatttttatatgaaaaattcttgcgggaaaaaactatgggcgccgaccggcaataatcactatagaggagatgattacaaactaagggaatcacaatggaaacgtcaccccttcccgtacggcttacaagagtatatataggggataaaagaaagacacctaatagaaactcctactagaaaacaaatccgaatatattgtggtcccaaaattcagatcacatatttaacagtttgagagagctcttaatgctaggagaagttgcagctaccaaaaactccctcaaacaaccctcgatcaattagatgtgtcattttattttgatccagaaggagtagcgtatctattccgtggaaaatatttttacggctactatattggatcctctaactagttggcctaggtgcctacttactaatcagtgcatcaccgactaagattactccctctattttaaaataaactgattcacgtaggtataaatatgatcgaaaggacatgaacacgaataaaaatgcttggaaagatttgtccgaggcgaagaggtggcgccacatcagactcgaccggggatcagggcaggttcaggaaccggagaagaaataaacagcacattgccctgcaccggctgctacagtgctacttagcattagatgcgccgatcagctgataacaactaaatcaattcaactattcaagcctttaggccctgtttagtttcaaaaacttttcgtaaaaacatcacatcgaatctttgaatacatgtattaagcattaaatatagataaagaaaaaataattgcacagtttgcatgtaaatcgcgagacgaatcttttgaatctaattagtccatgattaaccataagtattacagtaacccacatgtgctaatgatggcttaattaggctcaaaggattcgtctcgtggtttacatgcgagttgtgaaaatagttttttcattcgtgtccgaaaacttcttccaacatctggtcaaacgtctgacgtggcaccaaaaattttcatttcacaaaataaacaggccttaattccttgtgcagaatttctccgggtcgatcgctacagctctcaacaacatgccaaactgcaactttttccgcagattttgacttgaatgagccccagtcgtgcgtcgttttattgctattggatgaaacgcatttatatattagtgatctgatgatatgctcatcctacttttataggcaaaagtgaagttgaatatttggacgtcgacgcataatcttgacgcgaatatgttagttaaaagacagtacgagagctgtgtttattttcggatctataaagtggagataaaatggtgcgaagttgcaactctgttcttcagttcagctgttcccttttgctgtcggtcttatttagtttaagtttagttcttaaaatatctaatttatttctataaccaagtttaatctgttcaataatctaaatcaaataaagttctttctagagaagcattggcaggaaggaacagcaacaagatggactgatacacaccctcctggattccttccaagttccaagagtccaattctccatgcacagttgagcaacacaagccactgcatttttatgtataaattgcatgtatatgttttcagatggctgatgcagaaggagtatgtctccgaggcgccactgcaacagcatgaggttagttggttggttcatctgtggcatttctccttggagtctcttgagagaatataagatacttactccgtatcaaaatatagctatctaatacaagatgtgatattacctaggactatgaatctggacagaacacttcagattcgtattactactccctccgtccaaaaaaaactcaacctaggagggtaggttgagtttttttagacggatgaagtaggtaatgtcacatcttatactaggtaattacattttagaacggagaagtaagtactaagggaggcttggcttggaaggaagagccactctttgcccctgacacagcagatcagacaaaacacgtacatcatttcctgagtgattatctctaattagctcatcataagatagtttaggtactcatcgtttggcttattttctaataagtcaaaacgacttattaggaaataaaaataaatttgtaggtgaaacttttataaatgtgttcttggtgacttaaaagctaatattgaaaaagaaactacgttgaaaatatctcaaaatcaatatcaaaattaagcttaaaaatttaaaatttggctttttctttggctgattagagccttagttggtaatactatatatggttgatgcaatatgaatgagctaagaaatcatcagcagcatatagtgagcatatgtgtcacaaatatataccaacttgtgacatgtagtttagctagtgacccactggaatactggattgtttactgaaacatcatacggatacactgatccctgaacagtaggatatagtatcagatgtgttaggttagcaagtagcgagcgccgttttcctgaagcatttgttgagaaaatgactttcacccctgagagtgttaccacctttaaatctttaatacagtactagctagtagtacgatagatcagcatagagcatagtgggccaataatgcagaagctattttgattgcttgaatacgactaatccataaagccaggacctgagaagtagttagctagcattctaacttccagcaacatccttaacacaagaattcatgtcggtaacatgcatgcatgcatgttgtgatgttggttttcccctgccagttgggacctacaccatcccgttccatagtcaattaaacttttataattttaactatcaacatctttaaaaatatttaatttaaaggcactataacaacatatatagagttgtcttgcaaattactacaatagaaataaatttatatataaaaaaatatagtcaataacgttattttgaagatcgtgttattatctacttcctccgtttcataatgtaagttattctagtattttccacatttatattgatggtaatgaatctagacatatatatctatttagatccattaacattaatatgaatgtggaaatactagaatgacttacattgtgaaacagaaaagtaaaacgtaaaaattcaagaaagtatttaaacctattccttgcgtacgaccaattgcaatcaacccggtatgcatgcgtttcattcattaattcatcaaccctgactggatgatcaggtaatcagctacagtagttaattaagctagcattagagttactccctccaataaaaaaatcttgttgccacattctaatataacgaatatatcacatcttaatataaggttgttttttttaaaaaacggagaaagcaggtaatatcatagacggatttaccatatagccaatggggtttaggatcccaatcaatttttactcgttacttttctcgcaatctttgtacatgcattgaggtgtcactaccaatactcgaaccattcgctcccaatcctctcgatctaatttacaatcaacaacaaatcaggatgggaagcgagaaattgatgcgtcgtcctacactcaccgaaaaattcttgcgcttccatgcagccagccatcaccttcgagaggaggagcagcgtgtctaacgagtggccgccggaggagttgccactcatggatgctagcgaccttggtacttccttccaatactctctgtccgacaacagcagtgtatctcgctgtccactaggtgacgtcgtacgttgtggccgatatctaccgccacattctagtcggctagttcttacttggtgtgcctaaatcctaaaaccccccattagctatcaagttgtgattcgacgtaatcccctccttactcaccaccacgtcacttgatatagctatgagtacaatatgtatgcaccacgtcactcgatatagctacgagtacaatatacatgcactagatgacccgggtcaatttttatcatgtgttcgccctgggtattagcttgccaaacagaaataaatataccctgaaagcaactaggcacagccacctgcaacttgcagaactagaagcttcctctgactctcgatctctgtcgaggaagtttccaaatacgccggcaattaaactcgccgtccgtccggccggcaggcaggcggcggcgacggcgaccgaactccaaatttcaattccggcacggtttcaatatttccatcggatttgaatcgcattccccctcgttttccttttcctacacagtagcatcttagtacattttgtactctagcccctctcgtttgactcgattcccctgttctacggggacgcaccattgtcgcacacgtagggggtagtactaagcactagtttttgacgaggacggtggttaacaagtcagggtccgtctaatagagccgaggccgtacttgctattcctttgcatgatttttgggttaacaagtcagggtctaatagtctttaggctatgttcttcccctcttttttcaactcacttctctcgttttccttgtacacgttttccaatttgttaaacaatatgtttttctaaaagtttatatacgaaaattgcataaaaatcatattgatcccttttttttaaaagaagctaatacttaattaatcacatattaatagattgctctgttttccgtgcgcagcacatgggttcctaacccaggttgccaaacatagcctaatcaattagcatagctctgtttctaattaagataaaccttttacctcggtattttgttgtcacgatatttgaactactacacggtatatttcatataaaaaatttatgtagaagttacttttcaaaatatcagttaaatctatttttaattttataataactagaagttaattagtcgtacattaacgattttctcgttttatgtgttcgtaaaaaaatctttatattcagtgaactcaaacgggaccataatgacgtggcaaaacaatcgaaatgccggctagattcgcgggcactggggcaacgactagcatctcctcctcttcatcctcctcttcctctgcctataaatatgctctgctatctccttctcctgcacgagccaaacacaagaattcagctgtacaacctgatcaatcttacacaagaattcagccatagctagccctgatcgatccaattctgagttcttgaccgacaaccatggcgtccatgaccgccgtcgccgccgtcctgctcctggtcttcttgctgctgacatcgtcggctccgttcttgcaagccaggatgatgccgggagacggcggggagattgttcaggaggccgtgacgatgatgatgggatcctctgccggcgccgccgccgccgccgtcgcaggaagaagaagcacggcgtcgtcctcgccgccggaggaggagatgctgctcccgaggagaccacctctgccgctgtcgccgccggcggcgaccaccggagctcgcagcagcaggatgctcgggtcggtgcccagccccggcgttggccactagcgggacgacgccggctgatctatagttagttaatacagtagattcagagtgtcccttttttttatacatatttgactttctttaaaatatttatgtaaatattattttttagttgttttataaaatatagtttaagtatgatgtatttgtaggaaaaagttaaataggaggaatgatcaaacatgtgtttaaagacgttatttatttaaaaaagagagggagtatatatatatatcttgtgaaactctaaaggttagaaattcgcaagattttatctcaatttttcaattgaacatggtttagcaattacgatatatgtaagagggattagttatgtgtttagatgataatgatgtgtgtgtgtaaatagcaattcaattattccgttggatttctacatcttttttcttctgatgagttgaattacgaatcaattagccgtcgtctttttctattactacatccgtcccaaaataagcgtagccatgagtatccgcgctcaattttaatcatccgtcatatttgaaatttttttataattagcatttttgttgttataggatgataaaacatgaatagtactttactcgtgacttatgtttttaatctttttaaaaaaaaattaaataagacgaacacttaaagttggacgtggaaaaccatgactgcacttattttaggacggagggattattaatgatcgccacctagagtaccagcagaacgaggtgatctgattggctggctgagttgaaaccgtttccctctccatgtgcttggcgccaaaattgtcgcctactctgcttggacttccctgggttgctttggcttgcagcacaacgtacacgtacaaatagatacaatgaacacacatcgttaattatgttgcgtgcattgctctccaatctaattatgtgtttgtactaggtgagctgcaatctcaagctgatttaggtatttatgttagtgttaaatggactcctacatctttcttttttttatataaaaaataacattgtaaaaactgggttacattatccttatgaagaaaaatcattttaatcggttttgttagtcatgtgaaatgcctatacagagatatgtactctattactaggttaatatattttaagactaaaaaagtagtatatgataatagaatagtgccaaataggtcaagacgatcttgggttgttatcgctctaaagcaacatggttgagatagtcttcagtgtagcaacagtacatctaggttagagatattttgtaatacttgttaaataccatactttactacggataaaataaaatatattttccataaaacatgttacctatccatttttcaaatttaatttatatgcaactatccatttagatctaattgtttcttaatattataaagttcatagggtaaattacaaacttacagcaggaagtaagtggctgacagattttgtcactactagtaccacctttttaagtattaaatgagtatacattaggcaaacttaaggcctatttgacacggctctatctccagctccatctctattggagttagagcctaactaaataatttcagctccacctaaaatagaaacgcagctgggtggagcgttctcacaaaatgaactagagagatagagctgagtttaggctgtttcacaactttactccaaatctaactcttgaagctaaatttaggagtcggagctataccaaacggagactcttatttcctctattcatgcagaaagtgaggccttgtttagttccaaaaacgtcacattgaatctttggatatatgcatggagcattaaacgtagataaaaagaaaaactaattgcacagtttgtatggaaatcgcgagacgaatcttttgagcctaattaatccatgattagtcataagtgctacagtacccacatgtgctaatgacggattaattaggcttaataaattcgtctcgcagtttccaggcgaattatgaaattagttttttcattcgtgttcataaccccttccgacatccggtcaaacgtccgatgtaacacaaaaaaaaaaaatttcgcgaactaaactaggcctgaatttgctcctaggcctaggaaattacctagtgaggggttcaagtcgtgcttactcacaggcctaggaaattaccaatgagcggtaccactcagtacaaaacaatattagcccttgggtggatggttcaaatttagtactacatccactcaaggataataaaatctcattccaaacaggaccaaattatccctcaaaaaaggtgtaaaattaaaattatctattttcgaatgattgttacaactgttttacttaatttgaccacaaattacttttagatgattatattataatgaataaaagttttatagttaatttttttcatgctacatatttcagtagtataatatattttcaagtatttatttaaaaaagagagagaaaaatggtactccctccgtcccaaaaaaagaccaatcctagcaatgtatctggacatgcttgctaggattggtcttttttttgggacggagggagtaaatgtttaatcatgaatatagtgtcattaattgtcaatatttcaataataagtggagtagtacgtcgaattagacaaaccatagtagcagcatttctgtgaaacccaagtacattaattaggcatactggcataagaacatttattcagctggcctgacactgttgaagataatgacgtacgggatgtgataagtgataactgataacactactgccgggcatgaaacctaaaaaaagaagaatcttaccgtagacttctacataagccaaaattagcatcagtcaagtcgaaaccgaaccaataattggcaccaacataaacctcatcgccatcccctcgaggagttcgggtgagaagtacacccttcgtttttgccgttgattttttaaaatatactagcaatgacgtccgtgcattgcaacggattaaggtaattttaatcatgcatactgttggacaaaaataataataatgaaataaaattgcagtgacctttggtcaaaaagataaaaaaaaatataattaattatcctttaattccattagataaaaataatttaatatgaagtaggaaaagttttaaaaagcttaaatagagcaaactaattctgtaaattaaaacaatttttttgacattgaaaaatgtccgtgcattgaaaaaaatataataaatatagaaatattatatgataaaggtttagttttatatgatatagcccaatagtatggatgtcatgggaacagaatcggggcaacttaagggacataaagtgaacttattccgtgtgggcagcttgggaatggcgttcggcttgacgcaggagaagccgtagctatacgatatgatggacagttctgattgattccgacctatataaaagttcaacagcccaaaccctaaccctaaaatcatttcccctcccccccactctctctcaacggtggcagcggcgcctctccccctcccctccccccaccagcgcgccgctctatctccccctcttcccttccggcaggagatggatgcgggaggcaggggtggcgccctcccttctagtgggaggccaccggcagtgccgctctatctccccctcttcccttccggcgggagatggaggcggcaggcaggggcagacagatccaactttatctttttctcttctcccttatctatttttctctctcccgcagccacacaccacttctcttgttatctctttctcctatctcccacaaccgatctctcctacatccacacgcgagcagcgcagtgcgagtgcgagcggcagcaatggcggtggtggccccaactggcgagcagagacatcagcctcgtcgagcagcaggagaggcgatggcctcaccacagcgagtagtgacctcggcctcgtcgggcggcgggagaggtgatggcgtcggtacaggtggcgatgaccccgatgtgcagcggccttggccttggcaggtagcgggagcggtggcgtccttagcctcggcctcgggcaagcaacggcaacatatgtgacctcaacatgttgtggatttgagaagttagtttttcttttttggacagggacattaataattcacatctttccggtttgattcaatttttagataggatgattttgttgacctaggcatcgatctagcatgttctgctgtattgatttaggcatcaatatatgatttggatagagcatgctcgaattgagcttcttccgattttgtgaaacagatcgaagcgtaggaaacgctggcggtgcagttctgtcgacgtttggctgggttttagatttgtgtcatttttttctcactcgaacaccctgtggctaaaaaaaccggcacctatagcagtttataagtgacggtttatgaaaaaaattgcttatattatataatagatgatagatgatgccgttgacttttagacatatgtttgatcatttttcttatacaaaaattttatgcaaatacataagatataaatcgtgattaaaatacttttagtgataaaacaactcaaaacaacataaattaaatgatagttacatattttttttaataagacgaatgattaaacatgtgcccaaaagtaaatgacatgatctaattaaaaaagatgtgaagcagtgaaggcggcggtccacttctccgcgcggcggcagcgcacgaacagcggtgacggcgccccgcgggtggatccggtagcggcggctccctccgcccctctcttctccctccggcagcggtggtcgcgtcggcggcggccacggatggaaggcgtggcagcggccgcagatggatggcgtggcgacgaccgacggcggcggtggcagtggccgagggccgcggtggcaatggccgagggcggatccggcggaagtccctccgccgcctctcttctcccaccaagagcagtggtggcgtcggcggtggccgcagatggatggcgtggtgacgaccgacggcggcggtggcaacggctgagggcccacggtggtgatggccgaaggcggatccggtggaaggcaagagaagttttgtgatgtagttttgaagttttgtgatgtagatttgctgttcttctttaacaattattttgtgattttgtgatgattgtgatttggttgtgccaattttgggaagattttgtgataattgtggtcgatattttggggagctaagagtgatttggttgtgccggttttgggaagtctgagagcaattgggattcgggggtgggggcgaagacacgatcgtccgtgctgtgacgaacgggaaaatacgattctttatattagttaagatttaaccatttatcttataaaaaaaatatataattattatttattttattataacttgatttatcatcaaatttctttaaatatgatttaaaaaaaatttatatgcaaaaaattttgaataagataaatggttatatgttgatagaaagtcaacaacgtcatatattaaaaaataggtaatatatacgtagaatcagaattaattaacatcacaggctcacggctccaactttaaatggccaatcaagaatggataaacatggtaattaagtagcaaagtaaactagctctaatacagcagataattaaagttgtcgttcccagtaatgcacggcacgttggaaaaattccatgcaactactggctttcctgccgggtctcccaggagttgtccatgtcaaaattttgacacaattcacgaccgattcgacgccagcagccacccaatttgggggggttatacgcgttacgtgagtgcgttctgtgcgtaaacccttttggcattttgcacttttgatcgatccccacagcacgtacaggatattaatgcaataatgctgatcagctcaagttcttttgtgatgacgctgccactgccatcgctggagtggagcgtgtgcaggcaaaatgtttcaatagaaagtctgtctcgtgaagttataataattgtatgcggtcgtttggttccgagacacctacccgtctagaaacaaaaagacaccatgcctgcgaaaatggtttttctaatagagcaatgtcttagaatgatgccatatcttagatattgataaaacccattggttaatatagatctagcatttacagtttctccttttttttaaaaaaaaagttgaaatggcgtgtgtccataaatatgatcattagatatatagtagtattgacgaaccattgagtttcatgatgagatgtatcctttgcgttttgctaaagaatatgcttgcactattttaatagagagtctatctaatacaattatactatcgtgtagttggttttatgcccacaatatgagatactgagatgtgacgctcatatatctcgctaacagagttataatgaatgtcatatctttgatatcgacaaaacctatcagttaatgtaaacttgttttatcctgaaaaaaaataaacttatgttttacaataaaaggtgaaatgacatgtgtgcataaatgttggcattaggtagtcataatggtgggccataatctaagtatctcttatagatctcatgctaactgatataatcacatatgtttcatgtaatttccccatgatttacatcaaaaatcaagtctttcttgaaggaattgacatagtttcaagtaggtttcattaagatttaatgatccggttacctaaaattaatctgggctcaactttgctatgatgaacacagcaaggcaaaataaaccagcagcatcttcccgtgatgttcaatagaaacaaacttgcttgacatggcctacccactgcagaccatatatgtactagacactagtgcatagaggtccacaagatattttcattatctccatcatatctagttaggtcttttcaacaccagcaacaaagatgctgccttcagaaagatgaggaaagagatgaaagcacttttttgatatggtctcaatcaaactactttctttcaactctcatggtaaaatagacaaaattgaaatatttagctggtacagataatagagtataatgccaacaaggtcttactctagacgccccttcttgaagtcaactctatgggccctagatagttatgcttggacttttggataggataatatcagtgtggattgtggaaacaagcatgcacattgagagtttgagatgccctgcttaagtgtgtgtgtgtgtgtgtgtgggtttttttttttttgggggggggacatgtgttgacttactttaggttgtgaagtggtatggatcatataatgcatagtggtgcatgcaaatccataatgtagaaatggtatgggtcattttacgtgtgtccatcgatcgactctagttatgctcaaccaacactactacaaattaatttggtctttgcatacgcccacctttatttttacaaacgtactaaaaatatatatatataataagccaggggatgtccaataaaggcctgtctatggaaatagtttgttctcacagacatgcatgttaagaagaacaattgcgaaagtgaagacctggctccatccttttccttctcccttcattttcgctgcaccccgcatttcttctccatcacttctctttttcttccacatctcctccttcctctctctcccccatcacttctccttccccaacccttccttcccctctcctttctcctcgaatccaccagcggccgacaacgagagtgaccatcgcgtgccttggctcctcctcctccatcgtcggtagccttgtgacaaccagattcagcagaggcagtgatgagagcatccactgctcgcctcggctcctctacctttggtggcctcacaacggtagaggcggagatggaagcggacaccatgcgcctcagctcctccatcgctagcagccttgtgtaggccagctctagtggcgcatctagcgtaggggaggtaggggatcaaggctagggtttctaggtttcctttttttttttgccaaatatcttttgtaggccagcctacgaaaaaacgattttgcacgcggttgaggtgccgacttgtgataatcaacatttttatgtggcaccaggtaggcactccatctacaagcaaataccgaatttgatagtttgggggaaagcctttatgcaattgatcgtaaaaacattatatatatatatatatatatatatatatatatatatatatatatttgagcgaaaatttttaactaaagttgatcaacggctatctacataacggttagtttgtacaagtgtacgtgatacaagtataccagatcgagttaattatctttatgcttcaaaaaaaatgtcttttttaaatgaagcgcctgtgttaattatcacaaggctttttttctagacttgatatttatgtccattaattttagagatacacgaacatacgcttatacacattcagtggatctccggcaaagtgccaatgctgcagggttcggtggatctcctctactctacttgtagtacttgcctaggtcaatgcaactgatcgaagtgccacattaaagcatagtactactatataaaaaagagattgaacatatgaaaacacacacaaaagtttgagaaaaagacccttgattttgattccggtcaggccatcgtccaacaactataacaaaacaaaacgcgtttgtaattcgttccttcgttgaattcccgcgatgcaacgcaagctggcggcatgtctcgcggcgggccgacagcacgcgcgccaccacccacttgcgctcccgtgggcctactcttggcccatctatccaacaacggcgacgctcccgcccaactgggccgaatccctggggcccacaccgccaccccgcccgcgtgcgccgcccctgggcccactcctcggtgaccggggcccaccgatcacacggaccacggcaacgacgcgccaagttgccgtcgcacgcgcgcgcggtggcggcggcggtgtagctcaacgacggcggcggcgacggcgacggcgagcacggagtagttaaagcatttaaacattgcttacacagaatcgatggatgtatcatgtattattatcattcggattataatttaatcatacggttatgtacaagctcgatcgattgatgatgatcgcgcgaacgctagctagctagctaagctagctgtggccgccgtcgctggggccggacggcggcagcggcggccttcccgtcttggcaacggcgacaaactggccacccgtcgacgacaccggcaccgccgccgccgccgccgatggggacgacgacgacgacgcagctgccaccgccgcggccgccgccgccgtcctagaagcagagtaatgctgctcgctccgcctcacgcccgccgtcgccgccgtggaggcgacggtgagcgccatgaagacgagcactagcaccgatgctgccgcaatcgccagcgtcgcaagaacacgcgccgtcgtcgtcatggttgagacgccgagaagaagatcgactcgatcggcggcttaatttctctcgatccaggcaagtattaatatatattgttcatatgtgttcatgcacggatcgatttgatttgattacgaaaaggggcgacgcgtgattgcatgccccggtgtacgtatgtaacacatgcatgatgggattcaggattaggttttcaaatcgcagaggcgaagtcccggataatcttgagaattgcaaattgcttgcgttggcgtcaagttacaactttgcctttattggatcgaagcccatgtttgtgttggaaaatcattccacaatgagacagactggatagatagggaatcgaattcaaggtatctttttgaatataggagttttatggcatttatgttgcgtttgtttctcacttttcccatcatttattttctcggtttaaatgcacacgctcctcaaactataaaacaatgtgtttttaaaaataattctataaaaaagttgtttaaaaaagagtaaatttcataaaactatatatactttgcacaatctttcacaaaactacagatttaagaatttatttcacaaattataaattcactggcttcatttatcacaaattaaactacaggtactttgcataatatatcacaaaactacagatttaagaacttgttttcaaaactacatatttaatatctccatttatcctagaactataagacactaaatctgtagttttgtgataaataaagacactaaacaagttctaattagtgttttaacatccgatgtattttagtccctagatccaaacaggccttaggctgtgttcgctcctcctggatgggaacactccccctccatcacggaaaacggagcagtccattagcgcgtgattaattaagtattagctatttgttttttcaaaagtggatcaatatgatttttttaaacaactttcgtatagaaattttttacaaaaaaacacactgtttagtagtttgaaaagcatgcgcgcgaaaaacgagatagaggggttgggaacatgggatgcaaacacagccttagtttagttgctgcatgtggcgaaagaaacaggagtagggcagaaaagccatactcctgatctgaaatatttcctaaaattgcactttaaaactttaaaaatagaagataaagataaaaccatgtaaattactaacttcgacctaaaataaaccaaaaattgcagagagtaattaaacctaaaataaatttattttaagatgaatgtggtactatatttgggaagccagagagtatacgtgacatttcagtatacaatgtacataataatatacactgtacataagtattatagatccagacagtgaaagaaaagattgtactggtactccacagcatatttgtctgcgttagtagcccacttgacagtgtcatctgttatcaaatgtcattcttggaaggggcccatggaccatggccgaaagacgacatgtacggcactggaatatttgacctttagctccggtttgccacgtgacatgtttgacatttcctgtctcgtggcatgacactggaattaatatgcacgcacgaacctgtgattatttgtgatttgcctgcctccttgtgtgctcctcctgcctgcaaccaacatgtgctcgaaataatggaattggatgatttggttggatggcaggggcttaagggaaattatcttaggacagtcaaacatttttgggacgtactgaattttgatttttcgttccaagaactgtcgatgaactacctgaagtaacctaacaaaagtacgattttggttgcaaattatttgagaaaacgcacagtttacaaatgtatttcctatagtacaaaagatggaatgttggaggaaaaacatacttcaaccgtcctaaaatgtagctacctagtacaggatggaacattatctagtactacgaatctggacaggtcctgtactatgtagctacattttgggacggaggaagtagtaattttagagaatttcaatcctataggaaaattttctatgaagccatttgaaacaaaggattaaatcatatccaatcctttgaaatttctatggaatggacgatcctatagagattttagagaaaatttagcgagaacttcaacctcttggtaacttttctctgagtcactctctcatccaaattctgcgtttttcctacggttcaatctaacggtcattcctatgttttttctgcgttttgcaatcctctattttacacttatattcctatcaaaattctacgtttttcctatttttatgttttctcaatcttacgattcaaagggacccttaatgtgtgattcttcatagttttaccagcaaaaaaaaaagggtagtttcacaaatttacctagcgatgatttgtttttttctaccaatagacaatgtaaattttagctgaatttgcagggataattctcaaccaagttagtactacttgctgtactaaagcctacagcctattgcatgccgcccaaagttgtgaaacaagactccaaagaatgacacagttcaggcccctttcattcgcaggattgagaaaacgtaggaatagaaaaaatgtaggattttaatagaaatataagtgtaaaacagaggattgcaaaacgcaggaaaaatacaggaatggccgtttgattgaaccgcaggaaaaacgtaggaattgaatgagagagatagactcaagggaaatttatcaagaggttgaagctcttgctaaatttcctccaaaatctctataggattgtccattccataggaattttaaaggattagataggatccaatcttttgttttaaagggcttcataggaaattttcctataagattaaaatcctctaaaattcatatgtttttcctccaattcaaacgggccctcaagaatgtacgatgaccccattggctagcccctatatattcaggcgatagcccatgggccaaaatgcagagatgcgacccgtttgattaaggcctaaagatgacggtcaaaacaacagttgggacattctcataaaggagtaaagttcagctaaaaaattagggaataaagtcccccactccacttggattataaggcctaagtgtgtgattattttcacgttcaacatctcgatcctttttctgttgctgcttagtgcaaattagctgtgtatcatgctcccaaaccaaagctagcaccagttatcattgtcttaacaaataagaaagaaaagcaaaaggagaaaaaaaattagttgaaaatacgacctcactttcttacacacaaaaaaggaaaagaggttgtacttgtacacgaggtgctataatgatgcaacagaaaaaaaaagtaatggatcaacacgaacagctcagctatgctgatgatcctcatttatatttgacactgtcagcaaaactgagctaatccagtagacagcaacactgaaagagtggagaaccgttttgtgcgtgagtatttgacattagccaaagaaagaaaagcttttgatcctcaccttgtcttgttctcataacaaaccaaaccaggcggcttggcttaaagattaaagaagccagcaagattaactagtccatgctgatgccgtcgcccataagcactgcgcataactttagctcttgatcacaaaccaccaaaaggaggcaaccaactgcaaaacagcaaatcacaagttccaacatgccaaagccatcgcaacaaacatccaaaaagtatttattattattgttttgttcctccccagaaacaagaacaccattccagaactaagaccacattgatcagatcaacccccatgatttaatatacaagttaaataagcgcataattggagcaagaatatgctaaccagttagtagtagcagtagttaccacccaacatacatggatgctcatgaactggatctttggttccatcttgtgtagagtacaacccctgcaaaacaagcaagtgacaggagacaatctgatccgagacaagaacactgcaagaacatttctgattgctccaatggatccaaacttaaaatgccatttatattatgatcaccaccactacatcccttaatagatacataaccacccactgatcatcatcaccaacaccgccgccgccgccgcagccggctgccggcgggagacctcgacggccgccccaaaatggacattcctccccctttatcatccgccggacacctgaaacaagacggctttgtcacaacccatcatggccgccgtcccggccgcgacaggtagacccggcattggatcattgtccggccaactctaaaccccggcaccacggtgaacccgacgacgcgttcctcggcggcggcggcggcggcctcgtcggagcgcccgtcgctgacactctccatgtacacttcggagaagcgcgcaccggtgcggacttggaagatggaggcgccgtcctcctcggcgccgccgtcgaacgcgtagaagaggcaatgcagcagccagacgcggcgcgccatctcggcgaagtcggcgaaccacgagctctccgggaagcccggcccggcgctcacgatgccgcgctgctccagcctcccgaagaaggccgtctccatcctcgcgtgcaccagtgacaggtacttggcgcgcaggaacttgccgaacccgccccaccgcgcgttcctcgcgtcgaggaaggcgctcgccggcgccgccttgagctccgtgaactcctcgaagaagcggcggcggtcgtagaactcccgctcgtccaagaagctgaggttgaagtccctccggtggaaattggcgaacatcttcatggcgacgtaggactcgaagacgaacttggtgtccccggcgcggcgcagctggacgcccgggtgcacggcggccgccgcggcggcgagatcccaaccggcggactgcatcgagttgagcattgacttggagaaggagcggatcgactta

SEQ ID NO: 4563 - DNA, 19063 bp, Oryza sativa
  unsure (1)..(19063): unsure at all n locations
tctcttctctctctgtctactatattttggacagagggagtatcttattgtgcactatgcgcttagatatatttgtactactatcacctaggggtgttcatcgacaggaaagattagctatcatgatgaaaaatgaatgctatgctgtctcttaatgaagtagaacaaagaccggggctgatagaatggcatgataaaaccgttttctttctcagtttttttttttgaggagggggggggggcagtaaggattcaagggactaagaaagttcttaagttcaactaacttagtgcccgaaatttcagtggataacttacatctttccaaaccttgctttaaactaccttacgaacagcagttgagaacttgaaatctgggcagcagatgagatttagtaattctgctttttggtgcctacatgttgtaccgtttattttacaactaattgacattgtagtcatgttaggccactgaaatgatcatcagttaattgtttggggtgttctcgacttcttgttataaatgaggccagaggcataatttgcttcagaaaggagtggctagtatcatgttaccagaaactttaaggtccttgcctattagtcttaaattcttttcagagccaatccaccttcccaggttgttcctgcatcgcacatcgcacacattactagaatttctggatgttaagatggtttcacgcttttatttacttcttttatccaggtagttaaatatgaaacattaaaagcatgtcagaaaacttcattctattcgcgtgaaattttgatatggtatatttgtcactgttctaaaacaatacctacaaggccacacacaaggaatgggtgcgcaaccttgtaatgcttaagccgcattagagttccataaagaaatgttcttttgtaattaacagagttccataatttcattaattttcttagttgcacttttttttaagtatatcgatttgccttagttcctaatgatacttttgccatttttcattctcagtttttgttcaaacatttcttttctgttctaaaccgtttctcaacattataggtttccacgttgacgattctgaggttacattgaatgtttgccttggcaagcaattctctggtggtgagttatactttcgtggcatccgttgtgagaatcatgtgaattcagagacacagcatgaggtagatgaacttttatgttttagttgcatttaatatctatttttaaatttcaaacccacctcttttcttctcttctgtgagtgcatttatgtggtgttgaaacttattttgttcagattttttttttgcatgaaacttgtcatttacttgcaacatattctggttaatttgttcacggaagttacacaatacataattgaagatatatatttttttacccttttcaatttcattactcatgttgcaggaaatgttcgattactctcatgttcctggacgagctgtgctccatcgtggtcgtcataggcatggtgcccgaccgacatcatctgggctcagaatcaatcttcttttgtggtgcagaaggtatacaagtcttacagatcttcccatacaattttgattgtcaaagatttcagtgaccttttgtcttgcttgtttaaagcacatactgggcatgtattatagctaccgtttatgcggacatttgaggtttagttcagtgaaatattatgaccatatatatgtatgcatttttttccttaacttatcatgttttattggtgcttgtttcacggaaagttgtgttggtattgcgtagttcatgtcaagggtaagaaacctgaaactacaaaatacacctgatcaaaggcctctcatgagtgctgtggaatcaaggtagttagtggaatctttactgatttaagattttgctgttacagcttgcaaaagttacggagtcctattgttttgaagggattagctatttccaacatggttgtagtctcaacgaagacattcctcatagtcaaatgttgacaatagttcctggaaatcaatttgtagattgattactgataagacagctcaagcgagtctagcctgagatataaaaccacactagccaataaaaaaggtagccaaacaaaactagggagttttcatccaggcgaacaagtagaaagagcttacttggtagtggggagctctttctgcattatctgttttagcagctcttatttctattgagtgctcaactagctcttaaacattaaaaaggatacttatccagaaaggtcagttgccccttacttttactgacagaacataacaaccactgatgattttattttattttagtatttttcaccaaataatactaaagataatgttcttcacctagcataacttcctcatgaaacttttaacttaatactccatctggttgcaaaaacatgtttcggacatctctcaattcaaactttgaaaattttaaacatcaatatcattttaattatttaaaaaggatgcaggcaaaccatatgtatatattttgttgggctttacagatgtcttagttgtagaagttgtattatgaagatcatgttggtgtccaacatgacattttttttatggtagaggtaattattagatttgtagtgtacgtaactctataatagatagtgtaatgttgatttctttagattgtatcacctgtgcactatcatataatgatgatgctaaaaaggttcagattcgcacgcaaatctgttttgtggttaatgatgaagtgatggaaatttggtaaaccataatagacatacgagcatacgactatatgagctgttgtattgtatcattagatcaaaattccaacttatggtatgctttggtgaagtatcaatattttatttctgttcctttttgttttattagaaccgtacttgttctttagcagtgatttgaataaaattgcacacggatgttttttattaggactaagattagataagacatatggggtagtttgaatggagaaaggtggagcaatgttatgttgtttgaataagatgcagccaggcgcaatagtaaaatttcaggaacaaaacaagatgcaaacataggaaaggtttaagaggtcaacataagttgttccatgaaaaacttctctttaacaatgtatcatctccctagctatgtatctgtacgtatgctactttctgtgcaatttagggagggattttagaaagattttgcttccattgacaaatccaaaaactgaacatatatatggaactccataaggttgagttcaaatttgatttttctgtaaacaagatagacatacattttcttctgatgtatgagattccactgtctgtccatcatactgaaagagcctagtgcttaccactcggatagcttaaggttagtaaatcaacgaaacattaatggaactagaagtttgagacaacaaagcattagtgcaaaattacaaatattttgagataatggtcatgattacagatttaagatgctctattgcatatcttaatttgtaacaagtttggtgctaaatatgtagatctgtgatacttcgtgttgaatctgtagttatgtcaaaatatatgtggttttgctaaatttatctttatatttatgtcattcaaatgcaatcccaaaggttattctttctcttgacatccgcaaagagaacttgttactggttactggctactggctactggctactgaaaagattatctttcttgtggctactggctactagcaagctaacttgcagctaaaattaatagttcctgtgcacagctctgtgttcagggagatgaagaaatatcagaaggacttttcgggctggtgtggtgaatgtaaacgtgagaagaagaagaggcagattcatgctgttaaagcagctaagctggtaaattatcatttctccaaaacctgtacagtacatgtcgctgttaactccatgttcaattcttagatgtcttttgttttgttttctggttttttgtttgatcagcgcgtttcttaggggtgctggaggggcacgatttaaattatatttgctttatgtatttacacaatcttgtattatattatactttactgtcatttgggaagcagctagtgtgatcttcagtttttctggtcacaatcattagtggtcacaggtgtatgtaaattgaacttgtgatcaaatcaagctgaaacttagtggaggatcgcatgttagtgtgaaaggagtgctagcagaatagcaactccccccttcaatatcgtctaagcctgatattgtacagataagtgcatctgcatagaatgttctaatctgtcatcaaatttgggtgatgcaaccttttatgcacctgttgccttgttgcttcatttagagcaagtctaactataagcttatatgtgaataagagagaacaagaaaaatgaagtgttaggtctcgagatatgctacaagctaaatgcattagttacataagtgagagaaagaggaaaattagagacaactttattagagacaactttatagctatctagattcattaatatcaatatgaatgtggaaaatgctaaaatgacttacattgtgaaactcaatatgaatgtaggaaatgttagaatgacttacattgtgaaacggagaaagtatatgttagctttaatactacttagttagctctaatattaaacaaacttgctcttagtgatgttctcacagaaacgagagattcgcttaattgtattttttccgaggaggcatttgtggtaaattgtgtttgcctctttacgctcccttctgtaccaatgcttttctagaaattttctattcttgcttttgtattttaacataatagaaaaaatgtattcattcctattttctaacattttcatatttgttctgactatttgcttgctcgagaattgtatacagatactcttgaatcaaacgacatgcctaattgagctccagattgtttaaatagagtaattagaggttatcgtttgcacaagatagtgtctgttgggtgaaacgcacgagcaactatggatttttgcaacaaatacggagatagagaaaaaagagatgtccattcacgtgggcctcactacttttagtttttttttactagtgcgccccactgttcccaaaccgttgccaaaattgctggtgggggtcgtgtgctcgatacctgattttaaagtctaagggtgtattttatatagagtgaaaagttgagggggttaaatgaacttatcactactagaaatgtcttcttttatgccagtttaacttgggaacatatcctatgcgcataagcttcccgtgcacactaagggcctgtttggcacaactctagctttagctccacccctcctggagctggagtttagccaaacagtttcagctccaccaaaactgatagtagagctgggtggagctctctcacaaaatgaactagagttatggagctggatataggtagctccacaactccactccagacccaacttctgaagctaaatttaggagttgaaactataacaaacagaccctaactagcaaatgccataaaaaattctacacaaaattgaacatttactcctattagtattacacatatctaaaagtcttatatttaaattcattatattttagccgtaacaaaaaagtaaaaaatctgacagttttaagggtaaaagtctgtcagaattttgtcttttttattatggctaaaatataatgaatttgaagataaaatttcacatgtaattgtaatactattcgaaatatgtatacaattttttgtagaatttttcgtgacatttgctagttggtgtgtacggagtgtgcatgggaagtttgtgtgtaaaggatatgttcctgtataatttaaacaaacacttggtgagctaatttgggtgattaccggatttgattgacaaaacataactaactggagagggcttaacatcaactgtcatggttagtaacgtcaaaaggacacaaacagctagtttctttcaaacatgcctattttgaacaaagaatttgtggaagaattctatagggattttgaacaagaacaggttgccacggattcgatatgttttgtgaaacacgataagcgcacgggtcaagcctgaaatagatttaactcgtgatggtttgaatgagtgaaataaaagcaggttttagtaaaataagtttaattcaatttttccaaaaaacaaaaccagttctagcttattactctctctgtcctaaattataaagcctgtattttttaatacacggtattcaatgacatattttgattattaatttatttcatattatattattaataactgtaaaaataatatcacataaaaatattttaaaatacgaatctactaatataacatacgtaatattgatattattgtaattaagcgttaaaagttgtacggaaggagtatcgtgttattttagatctcactttttggctgggtggtttaagtgcgcgcatagcataatgaaaccagcttttgtagaaactctggtgtctttgtgataaaaacgcgatttccagtttagagcaaatttgctttcctatccagaagattggtacaataatcaaataataatttatctaaaacaagattaagtgaactataattaacagcacgtgagatctaaacaaccccgtcgagaatcataaaactataaaagcatttacaattttttgcagcctcataatgtttttcgactatatcattcataagacagcatgggtttaaattaatttgatcttttattaattcattcataagatagcaaagcaagtttgaattaccatatggttaccatgtactggcaacatgaaattatacttactacctacgtccgttttaagcatagccatgagtttatgtgtctaactttgatcattcgttttatttaattttttttatgattagtatttttattgttattagaagagaaaatatgaatagtattttatgcgtgacttatgttttttaatgttttcaaaaaaaaataaatatgacgaacaatcaaagttgaacatagaaactcatggttgtgtttaaaatgggacgaatggagtatttagttactgcccttcatatggttgtgtttaaaatgggacgaatggagtatttagttactgcccttcatgtgcaactgaatttaccagtaaaggttattttactagtactgtttagaacatgatgacaattagttcatttgaagacttatttaccttaatttgaggatcatttgttggaactacgcgtggctctgtttattactctatttcgcattataaaacgcgttgggctctcatctcgtttagatttattaacatccaatataaattagatagatatatgaaatatgaatctattcaaaacctaaaatgtcttatactgtgaaacacaacaacgaaacaaaggaagtagattttcttcatgttttatctttaggcgtgtaatgctaacattttaccttttctttttaatttaaacaatgcagataaatggggcgtacccagtgaactctctctttcctagtcagtgagcttatgtgttctccccttctttcattcatgtcatgattctgtgtaaatggatttcagcttgtagcagaattttacaggtatttcactcaaacaagtttacacgcaacgctagtacttggaatttgtttttctttaatggtagctaggatagtaatccgtttgtaatactccctctgtaccatatttctagctatgaatatggattcatagctaaaagttgttgtattttaggacagaatagtaatattcagaaattgcaaaaaccgcacaaggtatgaatgtttcttatattgtttaatctttagtaggtatgcaggctctctgtggagtgaatatgttggatatatttgaattcccttccatgttctaattgcactttggtttttctttgtttggcaggtgttcaatctcactactgctcactaaactgcatggaaaatgattaagccaccaactaaattacattctctatagtctaacaatgggaagaactattagcttttgttcgtgggtttaccatggatatatatatttggatgagttttggctgcacaaatggcaacattctacctgattgttattgtttattgtgaaataaaagataaataagcaataaagatagtgatttattgtttttcaatgggccttgaaaactgtgagggtctcacagtggggcagccatttcagccttgaccattctgtctactttgggcctttttggcaaatgggttagacaaatgattttcctagccatccattatccatcctcatttcattgtaaacctttacccattttcctatcccgatcttactcttcttatcccatatctaaacaaacccttcaagtcaagggttccttaagcatgacacatagggcatgaacgctttccccttagcttgtcggcccatgtgctttctccccccacacgcatagcaattttattaaaagatttcttaattttcattaaatcttatagaaagagatataatttcttctttttttagggattttagggaaaatgaggctcttgtcattttttattctattactgaacataatgggaagacagggttggttattcttcgtctacgaatatccaaattttaactcctaatactccatagatagttcgaattgaatagcagcaataatcaattttagcacgaattgtttggaggggaagtctaccttttttgatgcattcggcacgcgcaatttcttttcccgcgagacggcctgcaatttttacttttactccctttatatccatttttttagttaattcaatgccttttttcattgcctttcggaatgaaactctatttttttaattggaaagctatatattctacaagaatgataggttgtctataagattctttcactttttcgatcccaatattaagtctctggtttacagaattaacttcaaattttagaacaatttattggcacacaacagatttcttgaatagtaatggtattttttttaaatcaacatatttgtaatggcatagatccaattaacccttgattctaacagggtctacccctagtcggtaggggtggtcattcggtctaaatgaaaatttcggtctcggtcttcggtctttcagtcttttcggtctttgaaaagtaaagaccgaatttcagcacaaaaaatgttaggaccgacaaattcggtcaaggtcttttcggtctcggtctcggtcttgatcgaaattcaacaacattttcatatatgcaaagaaataatagaaattttcaacaaaaaaatcacaaaaaaattcgtaagcacttatgagtaaaaactcttattaggttgcatgcatagaagaagtagggatgtgaaaataagagtttaatcctattaaacatagtggattgtagattgcatttagacttttttttttggataattcggtctttttgattcggttaaccgaggagactaaccgaattgatcgaacaaaattcggtctatcactaccgaggaccgaattgatgaccgaatttctcggtctcggtctcggtcttttcggttcggtctttttctgcccacctctactagtcggttggttttgtgtaacatcccgggttatatctatagtcttagttgtcctaatgacttggtcacactagctgatagcggtgttgatcgaaccatgatgctaactaggacttattaatgtattgaattgtagtttctgttttggatttcttggcttatttatgttggtatttcttatgttcacagataaatccgcaaattcacggataccactatagtacttccccttagagtattccaatggtatcgaacaaaattcaatccaaggacaacaactgatgatagattgggtagagataattcctctatcttttaattagctacttaaattaaaggtaaaactctatcgaatgcttcgggcaccggtcctcccctggtctgccaggctgagtccggtcttgagctctatgatgtacccaaacattgagggatacaagggatggacaaggctgtcaccacttgcattctacctcacttttcgtggagcacacaacaaacaaagaaaatttctaacctagacaccacacctatgttattaattactactctaaccttgcgcaataacttcccttctttatctaaagtcctagtactagaacatagtttcacactaagcgatgaaccaacatcgatgagaatatatctcacttaaataaactaactaaagaacataaagaaactcgaatacttaccttatagaaggaagcatccgctgaaatacaattgagagaagaaggccaacagtaccggctttctccagaactccatttgaagaatgccgactttctccggaattcaatttgaagaatgccgacagtccggcactcctccataaaattctcggaggtactccaacagccaacatactaaagtaatgtctaaaagtgagttgcactctattttgttgtgcaagttgaagtgtgtatgaactccttttatagtgtgccaatgacaatcggaactattggaagggcggttattgtgaacaacggaattttgcatcaagatcgaagaataataaaacctagatttatcaaatatataatttccagatgtaggtcaatttacttaaatatttaattgaaacttattattactcgcaaagtagataaactaatattggctatgatagtttaaatcgtaatcattagcaatctaaatttattaatcacaatctagatagatcggacctaactaagacattgtagggaaagtaatgaaggcagcagcttgacctattctgacaaaatctatgtattagccgatacagtagattaaattatgataagcaaataacttatcagctaaaactccgataaaactatattgaatacctatcagtttgagtaaatatagttaatatgttataacctagaagattggactcaaccaagatggttctagattaataacaagtttagtatatttaaacgggtcgatcgatacttttgatagtgtttgatataaaaaccctgactatgattgcaaaaacgatcaaacaaagagtcgaaccttaactagtatgccggacttaactgagaaagtactaattccgctgttacaagcaaagttgacaaaaacttactttcttgccagagattgaaaccgatgcagcctaaactcgaaacaagaactcgtcgaaagtaaaactagggttggtgatgcatcgaaatttgtatattgaactgttgttttacaaagaccctgggtgtacatatttataccaataggctatagaaagtccgactccactacaatcggatcgactcaggactgtacctctaagcaaggaaaatactattacaactccgactcaaacacgactctgatcggttaacctaaaagataaatcttctaagtctgattctaacacgactccatcagcccagaaatctatctataaaaatagaaacttaaaaaccttccttatcacggaagtaatttacaaaaacccagataaacttgccaaccaaatcaactaaaatcatggcgtgaattccatctttgactcggccttaactaacaataattgccaaattttgccgtttacatctgcgaattgttagtataaagagtgaattgcactttatggcaggttttattacccaagttgcaaattggagcagcaatcagcagatcttttcacctttgactaggttttattaccaaacttggcatttttaatcagtggcccatacgtcagcatcaaatagtgttcttcctctcctctcctccctaatcacggccagctacttgtggttgatgaggaagccgagatgagagcggactcaacggatgaaggagatgagaaggatatacgcacaaaaaaaatgttcaagaatgcaggcctccactagtatgccgctgtccatgtattgctgctcgagctcgatttccgttggtgccgtatgcgctctgcttgacctacacattctgccatgccctgcgtatcgtggagcattggagcaagcatagttgatgctttggtgaactggaccggtgaatgcccccaatttgtggaggctatagcgagcgcctactgctcatcgccaaggagcatctcctctgagccatgccctctacctgacgtgaagctcgaggatctcccattttcccagttcccaaaatcaacgtaagaagcgagcacctagctagcagatcattgattggtagtagttgaatcctgcattcctgctcatgctgatatgatgcactgaggatttgaggagccgcatgctgctgccttcatgagctcaccaagtttcctatatggtagagaagaaagtgatgagagagctggagagggaagtggtacaaagtgactcattttacaaacttatctagtccaaagtgaaaatattttcttctccctagtccaagatgcaaccttggtaaacataagtggcccattgtgcaattaactctagtataaattatgacttaggctatgaaaagtgtaagaacaaagcaagaaaagaagataaaactcataaattgttattgttttatttcatcaactatgtttagtattttgtcaataatttgcacaaggcccccgaattcgatgggacaaccctgtagtaaatattgaggtttcaactattgaaacataaaaaagggttgtaagatcaaaagttaaaaatataaaaaatagtcaaatcccaattaaaacattcttgtaacactcatttaacattaaattttaattattgaaacataaaattaacagtaccattccccacctcttgccatagattccatgcttggaaaggatgtgggagagtgtttgcaggctacctcagttttgccactcctgagcacccaccagagtccaattccctccaacctataaaaatttcttggaagcagctatttttttttaataataaaagcttttatacaaggagaaattgcaaatataccactactttcaccctctaactcaaaatagccattaaaaacacgaactgtaaatttgccactggttttggtttaggttgatgcagtttgccactatcgtttgatttagtgcaaataagcagatgaagataattcataaaaaagaaaaaaacatgataagaccgttttgcccttagccagtgttaatcctcactgcccatctctttcgatcagtgctcttcactccaccgtgaagaatcagctcctctctctctaatcccaaatcccctcgtcactttcccctcatcaagagcaaatcaaccaaaaaatgggtcacactggaataggagatgacaatggaggagctcagccgtggggcagtagcggcggtggctggggatggcagcggtaggggtagcaacagcatcatgcggctggggcagtggcggcggtggctggggaacagcggcggcaagggggtggcagcagcatcaggctgcaggggcggcggcggcaagggagtagcagctgccgacggcgaccagcagcagcagcaacacgcgccaggagctgcaaggaaacagcaggagcaccatggaacggtagatactccaccgatctactagaacattcatcaattttcttcttatgttgtaggaatcaatggtccggcttcttgacaattatggttagagttgaatctcatttggccacatcatttttggaggacaaaccaatatgtaagctttttatggcaaatatgatgtcaatcttgcaatttcggggtaggggtatccttgtcctaatttttctgaaaaccaaccttctaacggtgttagtctaatctgtcaatccagtggcaaatatgataggttctaaccgtttttgatggcaaatatgcaattacatcttctataatggtaaattcacaataccggttcaaaccagtggcaaatatgcaattggccctttatacaacccagtcaactacaacaagatcatacaacagttttgagaacactcctagcctttgcacaactaggatgcacataaccaaaacatacaccaaccaatttcgaagaaaacaagtacaagaagcattaaggaccatcaattctagaactagatcgtcacccatgtccctaggtaaaacacacccttatcacatgctccaagcgtagacacgccacaataaccatatcctgtgatgacctgcataggcgaaggaataacttttttgtagaaaccatatgacgtgtttaattgcctccttaatgtgacgaaaacaaaaaatttgattgccttgccaattacgtttagatatattgttcttagttaacacaactccacaacaaagataccgaaggaaaatctttaccttcagaggcacttttagtttccagatgcgtctatttatacctgggatgtcattatggagtagtgcaagggaatgatacttcacaatgaactgtctataagaagtcaagttctatcgaaactcatcttgctcatgaattagatgaatatcggtaatacggtaataagttagtccatgctactaatttgatctaattagatcccttcttcaagaaaaaaaatggaatatccattcgatatgacatctgcaacagtcgcctatttatgcctagcattatttgtagggacactgatactattttcatttatagatatgttccaaccatttatcgtcctgtaaccaaatataagggccatccttaattacaaaggattcgaactgaaaggacatgccttgccaccttcactagggtaaccaaaaaatgtgagtcccctgcttttcattgaactcgcaagcgggttgtgaacataaatacctatgtccatagttaattatgcgcattactcaaaacaacngctatatttttaaatttgggccctaaccgttttgaaccacccccctgaatagctactgttttagtaggttatgtttttaatatccagatcatgaatccctaaaccctctagtcaataggcccgcacaatatgtcccatttgacaagaagatatttctttttatgaccgtcacttcgccaataagacatagatcgaaaatagtcaggctttttttaatccagacaagagaacgtactggttatgaagtcccataaagccttttatccataggcatgggcttgctctacacaatctgatacaacctaaaaggaaatgcattgtaggaagggtgaatagctaatttaatccctcaagtttcaccgaaggctcaatttggtccttcaggtttcattttgtccacatagttcctctaaatatttgttttggcctaaaatcatccttgggcccacttaatatgccatatggctatttttagtcaacaattatgttagaaaatgtcccttttgcccttaattgtatacagctatagactagaaaaaaaaaaccaaaatgaacaaacaacattacatatgtacttcccattatttcaacatgtgcacatgaaaattaagcctaatggctattgtatacacttggaagtacataatttattttatctataaaaagaattcattgcatacaatttttttcatatatatgtgaatggggggcataagtgtcatttatcaggaaagttgttggttatgtgtgttcaaggataacactacaataatctatttaatctatgatgaaaaaaattcgcattnatcactgaaaaatctcacataaatttgctgtgacgattctacttatcgtcatctattgagcgtcacagattaaatctgccgacgttttctccgaaatcgtcacggatcagcacaatctatgacatttttaactgtcataaaacgcttttgggctcatgtagttcagcccatgcccaacttttgtgacaaaattaaacgtcacagatggttgccacgtggcggccaacatggcaggtgacgtggtcattaacacgtgtgatgacgtgtcactgatgacgtggtagataacgtcagcaaatatttttaaacgacctattatttttttaatggcccattattttttttacaggccattaaatttttacattggtccattaattatttcatagtggcccattatttttttagaactggcccattttgttaaccaactattagatcaaagcccactaaacaggcccattaaatttgagcccaccaaattcaatccaatttctcataccatgtcacattcaaacctaataacagataccatagtggtttatcctaggtgagcttattacaattttgtaaaacattagattccccatggagggtagatatcaaccatccccatcctctaatgtgtgaattcaccacgggggatcggtgatcgggtccccattgccatctctaggtccacatggttttacagaaaaaggcagcaaaaagtttgcttcacatgatttttacagtaaactagccaagttctcgatctgggttgaacataaaataatataaatccctacttagatggtgtttgaatcttctgaagatgaagatgaagattaagtgtttcacgcaaaacgagatggtaataacgtgtgattatttgagttatacttattacaaacttgaaaaatggattaatataatattttagaacaactttcatatagaaagttttcgcacgaaacacaccctttagtaatttgaaaagcgtgtcatgaatatccaaaactatatgctctctttacagaggattcaaatggggccttagtgtctcgatctcatagaactacaaaaattagtgaattttttttatttttaaattttttattaaaatatttacaaaactaattttgtgtttgaaaattttacaaaactagtcgcccgctgcccttggggccctcccaaagggccatttttgtgacgtggcgcacgacagttagctcattcctaacggctagctatagggggcctgccattttgcaggcggcccccttgccgtccttagggagggcggttttacactgttcgggggccgcctgcaacagggcgacgagggcggcccccttgccgcccttagggagggcggttttacactgttcggggggccgcctgctaaaggccggcgaggacggcctggaattttgcaggcggcccccttgctgcccttagggagggcgatttttcactgtgctaggggacaagggcagccccaggtgtttagctctgtttatttagaaaatttagtaaatcatcacttaaaaaactgtgaaacaagaaaaacattattacaattgaatggtacgttgttttcgcagtttggagcccaacaaggggtatttttacatcaaaataattaattgttactttataaactacgtaaatcatcgtttcgaaataggaggaatagtttcaaattattcattacataaatctaactattttgcacttaaaattttacaaaataggtgttttacatagacctaattttgtagcacttaaaattaggtaaagtatagttttgaaacgaacaaagtacgtacatttttataaaatttcaataatttaatttttcatatagattggagggcaatgagggggtttgttacctataaattgtaagttacgtataattcttacgtatgttgaatcatgtacacaattgaaggtgaaagttataaaaatataagcagatatttataaattataaggatacaacgtatcgtggcgtcaaagaaactttggaaatcggaacgatagagcccattaatttgtaattcgtgacgcatataacaacacaccataataatgaaacattataatgacaagatagcatggataaaagatacaaatttgtcggtcctgacaaatcgagcctgagcttatctaccgaccccttctgcgctgttcaacatgtattgcattttgatgctccttctcccgttggtattctacctatgtttcagactcagttatcttttggccatcatatgttggattgacattgtcgatccataaagtgaatgtgcacctccttggattgccctaagaaataaacatagttagtcagatatgatagtaataataagcagatgctagttaaatttggaatttgttatacgtacaacgaaatcgtcgtctacattggggcagacaaagtatctcctaccaattgtttgttctgcaaacgaggtagccacctggcagcgatctctacaaccacactttggacactctgaccatttaggtaaacataatggattgttcctccagtctaagcttgcaatttgtacctgacattcgtcaatgagaccgcaccaatgtttcactgcctaaactctctcatcaatgagatcgcccaatgcttcactgcctccttcatatcctccttatgagcatatgtagcaccctcaattaccttgttatccttgtattcgcagggtacatgatgctcctctgagataacaagtcccgagaagtcctcgtttgtccaatcagtgggcattacatcaccttcctcgtcggatgatgcatcaccctccgcttgctcgttatccgaatcttccctctccatttcatcaacgattgtattgtttctctccccctcatccgccacgcccatggcctgctccacccctgtgtcattccctcatcttcccctgatggttcaacaaaatccccctcatggcttggaccctcgacatcttcagtttccattgcaatatttctatcattttcatgcaccgacacaaaaataaccagggccatgacctttcaaaagccatctccagataccgtttccaagcaacagtgctatgcatcgggatgagttcctaaaaataaccttccgttgcacgactcactacaaccgatactgacattgtgtagacttctgagtctattctaaatcctcgcatcaaccaattataaattgactgaaatgatctctcggcaagcctatcgatgcccttcgatgtcattacaaaatctgacagatcaacaccatcaggaccaaatctaaggttgcctt

SEQ ID NO: 4564 - DNA, 15985 bp, Oryza sativa
atcttcagaagattcaaacaccatctaagtagggatttatattattttatgttcaacccagatcgagaacttggctagtttactgtaaaaatcatgtgaagcaaactttttgctgcctttttctgtaaaaccatgtggacctagagatggcaatggggacccgatcaccgatcccccgtggtgaattcacacattagaggatggggatggttgatatctaccctccatggggaatctaatgttttacaaaattgtaataagctcacctaggataaaccactatggtatctgttattaggtttgaatgtgacatggtatgagaaattggattgaatttggtgggctcaaatttaatgggcctgtttagtgggctttgatctaatagttggttaacaaaatgggccagttctaaaaaaataatgggccactatgaaataattaatggaccaatgtaaaaatttaatggcctgtaaaaaaaataatgggccattaaaaaaataataggtcgtttaaaaatatttgctgacgttatctaccacgtcatcagtgacacgtcatcacacgtgttaatgaccacgtcacctgccatgttggccgccacgtggcaaccatctgtgacgtttaattttgtcacaaaagttgggcctgggctgaactacatgagcccaaaagcgttttatgacagttaaaaatgtcatagattgtgctgatccgtgacgatttcggagaaaacgtcggcagatttaatctgtgacgctcaatagatgacgataagtagaatcgtcacagacaaatttatgtgacgaattttcagtgatccatggcgaatttttttcatcatagattaaatagattattgtagtgttatccttgaacacacataaccaacaactttcctgataaatgacacttatgccccccattcacatatatatgaaaaaaattgtatgcaatgaattctttttatagataaaataaattatgtacttccaagtgtatacaatagccattaggcttaattttcatgtgcacatgttgaaataatgggaagtacatatgtaatgttgtttgttcattttggttttttttttctagtctatagctgtatacaattaagggcaaaagggacattttctaacataattgttgactaaaaatagccatatggcatattaagtgggcccaaggatgattttaggccaaaacaaatatttagaggaactatgtggacaaaatgaaacctgaaggaccaaattgagccttcggtgaaacttgagggattaaattagctattcacccttcctacaatgcatttccttttaggttgtatcagattgtgtagagcaagcccatgcctatggataaaaggctttatgggacttcataaccagtacgttctcttgtctggattaaaaaaagcctgactattttcgatctatgtcttattggcgaagtgacggtcataaaaagaaatatcttcttgtcaaatgggacatattgtgcgggcctattgactaagagggtttaggaattcatgatctggatattaaaaacatagcctactaagggagtagctattcaggtttcttagtgcataaggtgtttggtaatggctaattaatatggaataggtatttatgttcacaacccgcttgcaagttcaatgaaaagcaggggactcacattttttggttagcctagtgaaggtggaaagggatgtcttttcattttgaatccttcgtaattaaggatggctcttaaattaggttacaggaagataaatggttggaaaatataattctatgaaaatagtatcagtgtccctacaaataatgctaggcataaataggcgactgttgcagatgtcatatcgaatggatattccattttttttcttgaagaagggatctaattagatcaaattagtagcatggactaacttattaccgtattaccgatattcatctaattcatgagcaagatgagtttcgatagaacttgacttcttatagacagttcattgtgaagtatcattcccttgcactactccataatgacatcccaggtataaatagacgcatctggaaactaaaagtgcctctgaaggtaaagattttccttcggtatctttgttgtggagttgtgttaactaagaacaatatatctaaacgtaattggcaaggcaatcaaattttttgttttcgtcacattaaggaggcaattaaacacgtcatatggtttctacaaaaaagttattccttcgcctatgcaggtcatcacaggatatggttattgtggcgtgtctacgcttggagcatgtgataagggtgtgttttacctagggacatgggtgacgatctagttctagaattgatggtccttaatgcttcttgtacttgttttcttcgaaattggttggtgtatgttttggttatgtgcatcctagttgtgcaaaggctaggagtgttctcaaaactgttgtatgatcttgttgtagtcgactgggttgtataaagggccaattgcatatttgccactggtttgaaccggtattgtgaatttaccattatagaagatgtaattgcatatttgccatcaaaaacggttagaacctatcatatttgccactggattgacagattagactaacaccgttagaaggttggttttcagaaaaattaggacaaggatacccctaccccgaaattgcaagattgacatcatatttgccataaaaagcttacatattggtttgtcctccaaaaatgatgtggccaaatgagattcaactctaaccataattgtcaagaagccggaccattgattcctacaacataagaagaaaattgatgaatgttctagtagatcggtggagtatctaccgttccatggtgctcctgctgtttccttgcagctcctggcgcgtgttgctgctgctgctggtcgccgtcggcagctgctactcccttgccgccgccgcccctgcagcctgatgctgctgccacccccttgccgccgctgttccccagccaccgccgccactgccccagccgcatgatgctgttgctacccctaccgctgccatccccagccaccgccgctactgccccacggctgagctcctccattgtcatctcctattccagtgtgacccattttttggttgatttgctcttgatgaggggaaagtgacgaggggatttgggattagagagagaggagctgattcttcacggtggagtgaagagcactgatcgaaagagatgggcagtgaggattaacactggctaagggcaaaacggtcttatcatgtttttttcttttttatgaattatcttcatctgcttatttgcactaaatcaaacgatagtggcaaactgcatcaacctaaaccaaaaccagtggcaaatttacagttcgtgtttttaatggctattttgagttagagggtgaaagtagtggtatatttgcaatttctccttgtataaaagcttttattattaaaaaaaaatagctgcttccaagaaatttttataggttggagggaattggactctggtgggtgctcaggagtggcaaaactgaggtagcctgcaaacactctcccacatcctttccaagcatggaatctatggcaagaggtggggaatggtactgttaattttatgtttcaataattaaaatttaatgttaaatgagtgttacaagaatgttttaattgggatttgactattttttatatttttaacttttgatcttacaacccttttttatgtttcaatagttgaaacctcaatatttactacagggttgtcccatcgaattcgggggccttgtgcaaattattgacaaaatactaaacatagttgatgaaataaaacaataacaatttatgagttttatcttcttttcttgctttgttcttacacttttcatagcctaagtcataatttatactagagttaattgcacaatgggccacttatgtttaccaaggttgcatcttggactagggagaagaaaatattttcactttggactagataagtttgtaaaatgagtcactttgtaccacttccctctccagctctctcatcactttcttctctaccatataggaaacttggtgagctcatgaaggcagcagcatgcggctcctcaaatcctcagtgcatcatatcagcatgagcaggaatgcaggattcaactactaccaatcaatgatctgctagctaggtgctcgcttcttacgttgattttgggaactgggaaaatgggagatcctcgagcttcacgtcaggtagagggcatggctcagaggagatgctccttggcgatgagcagtaggcgctcgctatagcctccacaaattgggggcattcaccggtccagttcaccaaagcatcaactatgcttgctccaatgctccacgatacgcagggcatggcagaatgtgtaggtcaagcagagcgcatacggcaccaacggaaatcgagctcgagcagcaatacatggacagcggcatactagtggaggcctgcattcttgaacattttttttgtgcgtatatccttctcatctccttcatccgttgagtccgctctcatctcggcttcctcatcaaccacaagtagctggccgtgattagggaggagaggagaggaagaacactatttgatgctgacgtatgggccactgattaaaaatgccaagtttggtaataaaacctagtcaaaggtgaaaagatctgctgattgctgctccaatttgcaacttgggtaataaaacctgccataaagtgcaattcactctttatactaacaattcgcagatgtaaacggcaaaatttggcaattattgttagttaaggccgagtcaaagatggaattcacgccatgattttagttgatttggttggcaagtttatctgggtttttgtaaattacttccgtgataaggaaggtttttaagtttctatttttatagatagatttctgggctgatggagtcgtgttagaatcagacttagaagatttatcttttaggttaaccgatcagagtcgtgtttgagtcggagttgtaatagtattttccttgcttagaggtacagtcctgagtcgatccgattgtagtggagtcggactttctatagcctattggtataaatatgtacacccagggtctttgtaaaacaacagttcaatatacaaatttcgatgcatcaccaaccctagttttactttcgacgagttcttgtttcgagtttaggctgcatcggtttcaatctctggcaagaaagtaagtttttgtcaactttgcttgtaacagcggaattagtactttctcagttaagtccggcatactagttaaggttcgactctttgtttgatcgtttttgcaatcatagtcagggtttttatatcaaacactatcaaaagtatcgatcgacccgtttaaatatactaaacttgttattaatctagaaccatcttggttgagtccaatcttctaggttataacatattaactatatttactcaaactgataggtattcaatatagttttatcggagttttagctgataagttatttgcttatcataatttaatctactgtatcggctaatacatagattttgtcagaataggtcaagctgctgccttcattactttccctacaatgtcttagttaggtccgatctatctagattgtgattaataaatttagattgctaatgattacgatttaaactatcatagccaatattagtttatctactttgcgagtaataataagtttcaattaaatatttaagtaaattgacctacatctggaaattatatatttgataaatctaggttttattattcttcgatcttgatgcaaaattccgttgttcacaataaccgcccttccaatagttccgattgtcattggcacactataaaaggagttcatacacacttcaacttgcacaacaaaatagagtgcaactcacttttagacattactttagtatgttggctgttggagtacctccgagaattttatggaggagtgccggactgtcggcattcttcaaattgaattccggagaaagtcggcattcttcaaatggagttctggagaaagccggtactgttggccttcttctctcaattgtatttcagcggatgcttccttctataaggtaagtattcgagtttctttatgttctttagttagtttatttaagtgagatatattctcatcgatgttggttcatcgcttagtgtgaaactatgttctagtactaggactttagataaagaaggaagttattgcgcaaggttagagtagtaattaataacataggtgtggtgtctaggttagaaattttctttgtttgttgtgtgctccacggaaagtgaggtagaatgcaagtggtgacagccttgtccatcccttgtatccctcaatgtttgggtacatcatagagctcaagaccggactcagcctggcagaccaggggaggaccggtgcccgaagcattcgatagagttttacctttaatttaagtagctaattaaaagatagaggaattatctctacccaatctatcatcagttgttgtccttggattgaattttgttcgataccattggaatactctaaggggaagtactatagtggtatccgtgaatttgcggatttatctgtgaacataagaaataccaacataaataagccaagaaatccaaaacagaaactacaattcaatacattaataagtcctagttagcatcatggttcgatcaacaccgctatcagctagtgtgaccaagtcattaggacaactaagactatagataaaacccgggatgttacacaaaaccaaaccgactagtagaggtgggcagaaaaagaccgaaccgaaaagaccgagaccgagaccgagaaattcggtcatcaattcggtcctcggtagtgatagaccgaattttgttcgatcaattcggttagtctcctcggttaaccgaatcaaaaagaccgaattatccaaaaaaaaaagtctaaatgcaatctacaatccactatgtttaataggattaaactcttattttcacatccctacttcttctatgcatgcaacctaataagagtttttactcataagtgcttacgaatttttttgtgatttttttgttgaaaatttctattatttctttgcatatatgaaaatgttgttgaatttcgatcaagaccgagaccgagaccgaaaagaccttgaccgaatttgtcggtcctaacattttttgtgctgaaattcggtctttacttttcaaagaccgaaaagactgaaagaccgaagaccgagaccgaaattttcatttagaccgaatgaccacccctaccgactaggggtagaccctgttagaatcaagggttaattggatctatgccattacaaatatgttgatttaaaaaaaataccattactattcaagaaatctgttgtgtgccaataaattgttctaaaatttgaagttaattctgtaaaccagagacttaatattgggatcgaaaaagtgaaagaatcttatagacaacctatcattcttgtagaatatatagctttccaattaaaaaaatagagtttcattccgaaaggcaatgaaaaaaggcattgaattaactaaaaaaatggatataaagggagtaaaagtaaaaattgcaggccgtctcgcgggaaaagaaattgcgcgtgccgaatgcatcaaaaaaggtagacttcccctccaaacaattcgtgctaaaattgattattgctgctattcaattcgaactatctatggagtattaggagttaaaatttggatattcgtagacgaagaataaccaaccctgtcttcccattatgttcagtaatagaataaaaaatgacaagagcctcattttccctaaaatccctaaaaaaagaagaaattatatctctttctataagatttaatgaaaattaagaaatcttttaataaaattgctatgcgtgtggggggagaaagcacatgggccgacaagctaaggggaaagcgttcatgccctatgtgtcatgcttaaggaacccttgacttgaagggtttgtttagatatgggataagaagagtaagatcgggataggaaaatgggtaaaggtttacaatgaaatgaggatggataatggatggctaggaaaatcatttgtctaacccatttgccaaaaaggcccaaagtagacagaatggtcaaggctgaaatggctgccccactgtgagaccctcacagttttcaaggcccattgaaaaacaataaatcactatctttattgcttatttatcttttatttcacaataaacaataacaatcaggtagaatgttgccatttgtgcagccaaaactcatccaaatatatatatccatggtaaacccacgaacaaaagctaatagttcttcccattgttagactatagagaatgtaatttagttggtggcttaatcattttccatgcagtttagtgagcagtagtgagattgaacacctgccaaacaaagaaaaaccaaagtgcaattagaacatggaagggaattcaaatatatccaacatattcactccacagagagcctgcatacctactaaagattaaacaatataagaaacattcataccttgtgcggtttttgcaatttctgaatattactattctgtcctaaaatacaacaacttttagctatgaatccatattcatagctagaaatatggtacagagggagtattacaaacggattactatcctagctaccattaaagaaaaacaaattccaagtactagcgttgcgtgtaaacttgtttgagtgaaatacctgtaaaattctgctacaagctgaaatccatttacacagaatcatgacatgaatgaaagaaggggagaacacataagctcactgactaggaaagagagagttcactgggtacgccccatttatctgcattgtttaaattaaaaagaaaaggtaaaatgttagcattacacgcctaaagataaaacatgaagaaaatctacttcctttgtttcgttgttgtgtttcacagtataagacattttaggttttgaatagattcatatttcatatatctatctaatttatattggatgttaataaatctaaacgagatgagagcccaacgcgttttataatgcgaaatagagtaataaacagagccacgcgtagttccaacaaatgatcctcaaattaaggtaaataagtcttcaaatgaactaattgtcatcatgttctaaacagtactagtaaaataacctttactggtaaattcagttgcacatgaagggcagtaactaaatactccattcgtcccattttaaacacaaccatatgaagggcagtaactaaatactccattcgtcccattttaaacacaaccatgagtttctatgttcaactttgattgttcgtcatatttatttttttttgaaaacattaaaaaacataagtcacgcataaaatactattcatattttctcttctaataacaataaaaatactaatcataaaaaaaattaaataaaacgaatgatcaaagttagacacataaactcatggctatgcttaaaacggacgtaggtagtaagtataatttcatgttgccagtacatggtaaccatatggtaattcaaacttgctttgctatcttatgaatgaattaataaaagatcaaattaatttaaacccatgctgtcttatgaatgatatagtcgaaaaacattatgaggctgcaaaaaattgtaaatgcttttatagttttatgattctcgacggggttgtttagatctcacgtgctgttaattatagttcacttaatcttgttttagataaattattatttgattattgtaccaatcttctggataggaaagcaaatttgctctaaactggaaatcgcgtttttatcacaaagacaccagagtttctacaaaagctggtttcattatgctatgcgcgcacttaaaccacccagccaaaaagtgagatctaaaataacacgatactccttccgtacaacttttaacgcttaattacaataatatcaatattacgtatgttatattagtagattcgtattttaaaatatttttatgtgatattatttttacagttattaataatataatatgaaataaattaataatcaaaatatgtcattgaataccgtgtattaaaaaatacaggctttataatttaggacagagagagtaataagctagaactggttttgttttttggaaaaattgaattaaacttattttactaaaacctgcttttatttcactcattcaaaccatcacgagttaaatctatttcaggcttgacccgtgcgcttatcgtgtttcacaaaacatatcgaatccgtggcaacctgttcttgttcaaaatccctatagaattcttccacaaattctttgttcaaaataggcatgtttgaaagaaactagctgtttgtgtccttttgacgttactaaccatgacagttgatgttaagccctctccagttagttatgttttgtcaatcaaatccggtaatcacccaaattagctcaccaagtgtttgtttaaattatacaggaacatatcctttacacacaaacttcccatgcacactccgtacacaccaactagcaaatgtcacgaaaaattctacaaaaaattgtatacatatttcgaatagtattacaattacatgtgaaattttatcttcaaattcattatattttagccataataaaaaagacaaaattctgacagacttttacccttaaaactgtcagattttttacttttttgttacggctaaaatataatgaatttaaatataagacttttagatatgtgtaatactaataggagtaaatgttcaattttgtgtagaattttttatggcatttgctagttagggtctgtttgttatagtttcaactcctaaatttagcttcagaagttgggtctggagtggagttgtggagctacctatatccagctccataactctagttcattttgtgagagagctccacccagctctactatcagttttggtggagctgaaactgtttggctaaactccagctccaggaggggtggagctaaagctagagttgtgccaaacaggcccttagtgtgcacgggaagcttatgcgcataggatatgttcccaagttaaactggcataaaagaagacatttctagtagtgataagttcatttaaccccctcaacttttcactctatataaaatacacccttagactttaaaatcaggtatcgagcacacgacccccaccagcaattttggcaacggtttgggaacagtggggcgcactagtaaaaaaaaactaaaagtagtgaggcccacgtgaatggacatctcttttttctctatctccgtatttgttgcaaaaatccatagttgctcgtgcgtttcacccaacagacactatcttgtgcaaacgataacctctaattactctatttaaacaatctggagctcaattaggcatgtcgtttgattcaagagtatctgtatacaattctcgagcaagcaaatagtcagaacaaatatgaaaatgttagaaaataggaatgaatacattttttctattatgttaaaatacaaaagcaagaatagaaaatttctagaaaagcattggtacagaagggagcgtaaagaggcaaacacaatttaccacaaatgcctcctcggaaaaaatacaattaagcgaatctctcgtttctgtgagaacatcactaagagcaagtttgtttaatattagagctaactaagtagtattaaagctaacatatactttctccgtttcacaatgtaagtcattctaacatttcctacattcatattgagtttcacaatgtaagtcattttagcattttccacattcatattgatattaatgaatctagatagctataaagttgtctctaataaagttgtctctaattttcctctttctctcacttatgtaactaatgcatttagcttgtagcatatctcgagacctaacacttcatttttcttgttctctcttattcacatataagcttatagttagacttgctctaaatgaagcaacaaggcaacaggtgcataaaaggttgcatcacccaaatttgatgacagattagaacattctatgcagatgcacttatctgtacaatatcaggcttagacgatattgaaggggggagttgctattctgctagcactcctttcacactaacatgcgatcctccactaagttacagcttgatttgatcacaagttcaatttacatacacctgtgaccactaatgattgtgaccagaaaaactgaagatcacactagctgcttcccaaatgacagtaaagtataatataatacaagattgtataaatacataaagcagatataatttaaatcgttgcccctccagcacccctaagaaacgcctgatcaaacaaaaaaccagtaaaccaaacaaaaggcatctaagaattgaacatggagttaacagcgacatgtactgtacaggttttggagaaatgataatttaccagcttagttgctttaacagcatgaatctgcctctccttcttctcacgtttacattcaccacaccagtccgaaaagtccttctgatatttcttcatctccctgaacacagagctgtgcacaggaactattaattttagctgcaagttagcttgctagtagccagtagccacaagaaagataatcttttcagtagccagtagccagtagccagtaaccagtaacaagttctctttgcggatgtcaagagaaagaataacctttgggattgcatttgaatgacataaatataaagataaatttagcaaaaccacatatattttgacataactacagattcaacacgaagtatcacagatctacatatttagcaccaaacttgttacaaattaagatatgcaatagagcatcttaaatctgtaatcatgaccattatctcaaaatatttgtaattttgcactaatgctttgttgtctcaaacttctagttccattaatgtttcgttgatttactaaccttaagctatccgagtggtaagcactaggctctttcagtatgatggacagacagtggaatctcatacatcagaagaaaatgtatgtctatcttgtttacagaaaaatcaaatttgaactcaaccttatggagttccatatatatgttcagtttttggatttgtcaatggaagcaaaatctttctaaaatccctccctaaattgcacagaaagtagcatacgtacagatacatagctagggagatgatacattgttaaagagaagtttttcatggaacaacttatgttgacctcttaaacctttcctatgtttgcatcttgttttgttcctgaaattttactattgcgcctggctgcatcttattcaaacaacataacattgctccacctttctccattcaaactaccccatatgtcttatctaatcttagtcctaataaaaaacatccgtgtgcaattttattcaaatcactgctaaagaacaagtacggttctaataaaacaaaaaggaacagaaataaaatattgatacttcaccaaagcataccataagttggaattttgatctaatgatacaatacaacagctcatatagtcgtatgctcgtatgtctattatggtttaccaaatttccatcacttcatcattaaccacaaaacagatttgcgtgcgaatctgaacctttttagcatcatcattatatgatagtgcacaggtgatacaatctaaagaaatcaacattacactatctattatagagttacgtacactacaaatctaataattacctctaccataaaaaaaatgtcatgttggacaccaacatgatcttcataatacaacttctacaactaagacatctgtaaagcccaacaaaatatatacatatggtttgcctgcatcctttttaaataattaaaatgatattgatgtttaaaattttcaaagtttgaattgagagatgtccgaaacatgtttttgcaaccagatggagtattaagttaaaagtttcatgaggaagttatgctaggtgaagaacattatctttagtattatttggtgaaaaatactaaaataaaataaaatcatcagtggttgttatgttctgtcagtaaaagtaaggggcaactgacctttctggataagtatcctttttaatgtttaagagctagttgagcactcaatagaaataagagctgctaaaacagataatgcagaaagagctccccactaccaagtaagctctttctacttgttcgcctggatgaaaactccctagttttgtttggctaccttttttattggctagtgtggttttatatctcaggctagactcgcttgagctgtcttatcagtaatcaatctacaaattgatttccaggaactattgtcaacatttgactatgaggaatgtcttcgttgagactacaaccatgttggaaatagctaatcccttcaaaacaataggactccgtaacttttgcaagctgtaacagcaaaatcttaaatcagtaaagattccactaactaccttgattccacagcactcatgagaggcctttgatcaggtgtattttgtagtttcaggtttcttacccttgacatgaactacgcaataccaacacaactttccgtgaaacaagcaccaataaaacatgataagttaaggaaaaaaatgcatacatatatatggtcataatatttcactgaactaaacctcaaatgtccgcataaacggtagctataatacatgcccagtatgtgctttaaacaagcaagacaaaaggtcactgaaatctttgacaatcaaaattgtatgggaagatctgtaagacttgtataccttctgcaccacaaaagaagattgattctgagcccagatgatgtcggtcgggcaccatgcctatgacgaccacgatggagcacagctcgtccaggaacatgagagtaatcgaacatttcctgcaacatgagtaatgaaattgaaaagggtaaaaaaatatatatcttcaattatgtattgtgtaacttccgtgaacaaattaaccagaatatgttgcaagtaaatgacaagtttcatgcaaaaaaaaaatctgaacaaaataagtttcaacaccacataaatgcactcacagaagagaagaaaagaggtgggtttgaaatttaaaaatagatattaaatgcaactaaaacataaaagttcatctacctcatgctgtgtctctgaattcacatgattctcacaacggatgccacgaaagtataactcaccaccagagaattgcttgccaaggcaaacattcaatgtaacctcagaatcgtcaacgtggaaacctataatgttgagaaacggtttagaacagaaaagaaatgtttgaacaaaaactgagaatgaaaaatggcaaaagtatcattaggaactaaggcaaatcgatatacttaaaaaaaagtgcaactaagaaaattaatgaaattatggaactctgttaattacaaaagaacatttctttatggaactctaatgcggcttaagcattacaaggttgcgcacccattccttgtgtgtggccttgtaggtattgttttagaacagtgacaaatataccatatcaaaatttcacgcgaatagaatgaagttttctgacatgcttttaatgtttcatatttaactacctggataaaagaagtaaataaaagcgtgaaaccatcttaacatccagaaattctagtaatgtgtgcgatgtgcgatgcaggaacaacctgggaaggtggattggctctgaaaagaatttaagactaataggcaaggaccttaaagtttctggtaacatgata

SEQ ID NO: 4565 - DNA, 27741 bp, Oryza sativa
acggctcgcgtggcgggagggcggcgggacaacggctcagcggcctgagggtggtgggacggcggtgcaggactgcaggccggcggcgcacagaggccgctcgcgtggagagatgcgagagaaggaaaggggatcgaaactagttagggttggcaggggcattttggtatttcctaaaaatactgacaatacaacacatggtttgattaacatctctaacggaaacctgacgggaggggcatgggagggatcacaacgaaatttcaggggtacacaggggattgggtaaattacggggtatagaagggattaggtgtgttttcatgggcacacaagggattttctctaaaatatatataaacctgactccatgtatgcaaacaaaaattagcacctgcaatttagttatcatgacacatcagctgctatacgtccgactagcgcgttcgactggcgtacgactcaacggcgaattacacggcgtgaggcagtactgacttggtcagatgggctgctgctccaactgtcccacgtaacataatccacatcaaagcccatatattatttcaagcctgaacttataaggacacaacatgtccttttagccgcacaacgatattttgtctcatgtctatgattttttagataaaaatttggagtaggcataaataaatcagcagctttcacatactttttttttcggggaagcagctttcacataccttgtgtgatgtgatcagtgaatactattggctagataaaacaacgtggccgtgtggccaaattacatcttattgaactcaagaaattgattagagatggaacacaaaggaattagatcgtggggtttaggatagaaggagatggaaagtcacgttgaggcaatattatcggctagatgaaacgatgagcggaagtgcggccagattattgaattgggcttttgtaaggcccaactgaattagtgatctatgcggatgtgtagacacggacggcggacgtcttagtcgtacaagggtcggatgctttggttgtatgtatagcatttttggttaacaatatagtgaaatggactaaaatatagttagtttcaaactgttaatgctacaaagccatgggagaactaaaacgtgatgaaaggtcatcagaacagccaattaggggcggtttagatggggtaaaattgtttagtccctatcgcatcggttgtttggacactaatttggagtattaaatatagactaataattaataaaaaaactaatttcataaataagagctaatccgcgagacgaattttttaagcctaattaatccataattatcaaaagtttactgtagcatcacattgtcaaatcatgacgtaattaggctcaaaagattcgtctcacgaattagtctaaggttatggaatgggtttttgtaattagtctatgtttaatactctaaattagtgtccaaacatcctatgtgacagggacttagaataagtcgttgtttcccaaacagcctgtaataaagctaaatctacattttggtgcatggcagggaggagggagctcggctctacgtacggctcagctcaaacgacctcggctctacgacacatgcgcgcgcgaggagggagctgtggcagggtatggcgagcggtagagaaggtgtcggccgacgtgacccaagctctccggtgggcgcacgcgaggaggctgtgccccggccgacagcgaccccggctctctaatgggcgcacacgaggaagcgaggaggagcgaggaggtggtggggattcgcagggcggattcattgcggcggagtcatcgcttggggcggaatcggcagaatcactgatgaatgcgtactgcgagaaggacagtggacggatgagattagatgagacggtagatggacggatgagataagaggggatgatttcacctgtaggatttctaggcacaactcctccttttttatattagtatagattgtgctgatcttgtttattttttcttccggcatggactcgtatatccctagtggagaactgatctactcccgtgctacccaaaatcataattgtcccagttagattaagaactggtactaaagatgctccaagtccctcgaaatatttttagtctaggttggtgttatcaaccgggactaaaaaaaataatctttagtcccggttggtaacactaacacggactaaagatggaggatctttagtcctagttggtaactgatcaggacatcactccttcgaatatacacaacaatcctctaccggtcattcaaggagcaatcacaagagctcgctcctatgtccttctttatataattttgagaatagattgctatctaatgattatgattatattacaattaggaacaatggagaggacaaagagatatttagagagggacttagaggcgtggaggaccagcaagggcgtccaagtcaagatggaggtccaaatctagttgacttcgagtacgtttcaaagtccatgaccaatctgtactaaaacgggcgcccaggtcacatacgtgctcggattggggtgttctttatatggatggaaagctaagaagataacatttccaatggttccaatcccatatccaaattctttccgagtcatcgggaatcgaccgaacaagttgacttccaaattttgttccggtgctgtgtcaccgtattttggcctttgggccgtgtatcgtgttggagcccattagggttgcgtatgttagattaatgggctagacccaattaaatcctaataaattccattggtccacattaagtgctatgggtaataataccaccttggaaatctaagtgaagaggtctcaacttaaatatggagctagtggagagtctctgttgaccggttgagatggtgggcgaacagcaacacgcgcgcgccgggccgtggcgtgggcgtgggtgagacaaggctgctttctctctcgttttgtgtcacgtcccaaaacgactctaaaatacatcctctaaattatgcctagaataattaaaatccgtgtgaaagcctccaacaattaaaaggtgcaaagttaaaagtcaaataaggcttgggggatttttgtatatttcctaaaatgcgtaaataaattttagtggaattttcagagcacaaataataattattaagaaataaacaaagttaaaatgattttgtaaaaggaaaaactctaaaaagtcccatttccctccctctccctcttgggccggctcggcccatctccctccccctctctcctcttccccgcggcccatccggcctctccccgcgcgcgccgctaacgggcgggcccgcccgccaccctcgctgacgggtggggcccacccgtcatccccttcctcccgccgctcccgccgcctcccccgcgccctagcgctgccgccgccgcggattccgccgcatcccgccgtccccgcgtgcaataaagtgggaagaatcacttcccgtgatcccctctccctttccccccaaatttccctccctctctcccttggattcgtttggaaaccctcccctaatcccgccggcgccattgatggagcccgagaacgccgcgccggtttccttcccctccggccgccctctcccccttccaaccctatttaaaccctccccgcacctcctccgtccgtttccgcctctcgccaccctttctcctcgccggattcgagcttgcgacgtcgctctctctctccgccgtcgccgccaagctccggtccgccgccgtcgtcgccccggaccgcctcccacctcggtgacacctccttcgggttcgccgcatcctcgccaacctcgtccacctccccgtttcggtcgccgaccgccggaacgccgtcgaccccgtcgacccgagccgcgctgccgcctccctccgctccggccgcctcctccgtcgccgccgtcgccccggggtgagccgtggaccgtcgcctcctttcccccttccctcccctctctcggccgccgctccgccgcgccggtggtcgccggcggcgaccatcggggcgtgggcgcgccgcctcccgccgactgcgccggcatggccgccctccgggcgcgccgagtggccgccgcgtggggcccggccgtcagccgcccgcgccctcgggtgcggctgacgtgtggggcccacggcgccggccggtgcgagcccgggtgcacccggtccaccgtggaccgtgaggctgccgcgtgggccccactcccgtggacccagtccgcgcgcccctccccctcggctgacgcaaataaaccctttttaaattaaaatttaaatggagaaattcgcaaatattcatttaaagagcatataaacttcaaatggccataacttggccatttgaactcggaattggaccattcaagtctctaatttttccttaagaagtcaagaacccatttttgcgctttgttcctgcttgttatatggagtttattagagtaaaagccttttcttttccgttggtcgtgtagacgctgcagcttcggaagatccgctcttcgtggaagttgaagccgacgtttggcaaagagagcaaggcaagtcacatcatccttgaacatattgaatcccagtttataaaattattttgatttaaattattgcattatcgctttatttaaattcccgcgttatcactgttttatctagccatgcctatgtacctttgttatgaccttattattgttattgttattattaccttgtccaccctagaataaacaaaacaccaactagtggacactctactcatggtaccactagtatgattttaggtagatgcttcgctggttaattaggcaacattaggtggttttacaactctagactttgggatattctcatcacctggacactatggaattgttggatcagtgtggaattggattcacacctccccctctattcaaaatcctcaaaatggatttaggttgggctcggggtgcatggttttgatagtagcacctcggccatataaggaccggtcttcgggcctctgttgcaaagcactaccgtacttccacatgtttagtgggtaaggcttagtttgtggctcagtctggttataaacaaaagtacacggatggagatggacgaagtcgggggtcgatggacatctctagggcaaatgaaggctacacgagctgcggctcggtagtcgagatgtcatggcacagggccggtgtcctgctgctaggggctcagtcctgcctacctgtcccggaggttccggccgtaggtggggttgggtctgtactcttgtctatggctaggatgggttggaaactatgtcacgtcttccgtccgtataccgtggtggtatgtggcacgtgtgatgaaccctgagttcctctcgacactcaaggctgttgttggcccgatctttcggtgagttgtgatatctacgatttgggagaaacgttgacgatccgactacaaccgtacgagacgttgtgttgcgccttagcgatcgatacacctctccgtgggttgctgatcttgccggtgcagatcaaccctattcctgcaagcaaatcgaagaaacaagcaagaacaagataaaagcaatctgatattgcaaataggaatttaatacaaatgataagttggggttccaaagaacaagcagacggacggtctagccgacacgcgcgctgcaagcaagtagcaatggctaaactttaatctaacaaaacccgagaaaccctgaaggggtaactagctatatataggggtgggaggacgacctaggggtgcctagggtcgtgctccaccagcttggggcgcaccccacatggaccccacctgggccggggtcccaaatgaagttacaagcccataggcccattataggtgatgcaacaccttgttcctgtgattctggccacacgagatagaattcagagaagaggctggatccgttaaaaagagggctccgagagctttccatcaagtactcacgggccgaaaacggaggtcgtatgcagattcggtggccgtttgaagtcagcagtgtagtaggtggccgaatcggattccagcacttggagtacttgatctcgatatcttcttgttcatccatgatgtgagcaatggttgcatccgtggtagccatggtcacatcaacgtggttacatgtgaggaagatgtgtcttgtgggtaaagatgtacacatctgatcagagtataatctattcgaatagccgcgccctcggttatgggcaagccgagcaatgtacccaagttagtgtttttaattcttaaaacctgcttaacaactaaaatgtggaatggttggcctgggttggcttgggacgagctgggacccagggtcgggttgccagttcagtctgaatcatcgtaggccttgggttaaggcaggttcgtgtgggttcacggccttgattaataatattgtatagctctaggatcgtatttacaaaatagctttgagcaactaagtgtcttttaatgctgtttgctgcaaaccctaaccctttatattataacccccttgtactcccttggatttatcctgcacttgtgagtgtgtcttgttgagtacggtggttgtactcagtcttgctcaattttttcccaaacccagaagaggagcccctggataatgaaggctttggtgtctagctcgtgcctgccgtcaagcgcctgtggtcgtcgccctagtcttccgctgtttttcgtttgtctttttgtgtgctgggtcttcgccgcccatgtaataaattaattaattacgcttccgcttgttaaactctgaattgtatcaacttttggtgtaccttgcctcctgggacaaggaataatgcacgcacgtaaggaacgcccgttgggttatttctggtcgtgacattttgtaacgaacaataataaatatgggaattgatttagtatgagcgagcgcgtcggttacagaattaaacaccgtggttgatgatcccgaacattactctcgcgctcgcacatactctctcgttttgtaacggacaataataaatacgggaattgatttcgtatgagcgagcgcatcggttacagaatttaacaccacggttgatgatcccgaacattactctcgcgctcgcatgtagttcgtctcttgcacttatgttcattgtggagattatggataccccatatctgcatgacagttatactttagtcggatatacggcaccaaatatagatggaatatctttatgagaactcgggttggtttttaacttgtatgtcaagaaaatatccgggatcctagtcggttacgattgtattttatctataatcccatattctgttaggatatggactgtattttgtaaagcggactccttcccctatataaggagggtccgtgtgcctcttggggcgcgattctttttccagtttatacaatcaataacacactcggcggaatcatccccggacaggagtagggtattacttcttgaataagaaggcctgaacctgtataaaatcccttgtctccaaacccatccactttcctagcttgatagccaccccttttattattgccgaaatcttgtttcaacagttggcgtgccaggtaggggtagcgtcaagttctcgccgactaagtgcgatgggctttgtttctggcatcgacgacttcgccttccctctcgggcaggcgttccggttcggcagcctcaacttcatcaccaacgacttcggcaagatctctctccttgactcggattcaaaccagtcggggagagaccaggtccccgtgccattcggtattccgaactcggcctactctaagatcatctctcccgagtcggcttcaaaccacttggacgagatccaatccgctcggcctcgtccagatcaagacgacgggtcctatccctcaatcttgatgaaacttcctgatgatttggccgccgtcttcactgccaagacatctcccactcgaagatctaggcgagctccggcttcggccccgatccaatctagatccagggaggttggcgttatactccaacctctcgggacagtctcgacggaagagttggatggctacctcagctcccccggcgtcagttctcgaccaaccgagatcctcgactacgacgatttcggctaccactacgaccacggcgacctcgacaacttcgacgacagctatgaggataactacacgcccctcttcttcggcgtattcatggctgacaacgaaacggaggaacagcgccaagcccgagaagcggaccaagatcgcgcacggcaagaagctgaacgtcgccgactggaggaagagcgacagcgacaggagcgagaacgactacagcgtgagcaacaagatcacgaacagattgcaaaggaggctgaagatcgacgacaacgcgccttggaatctgggcggcgagcgagagagctcattgggcaacaagacgtcgatggaacagcggtctttcacaccccccagcagaacgcggttgcagcaatcactctcctcgacaccctcctcaaggaagacgcactcaaccaagctgatcatgttgtcaacatcttgaaccagatgaagaccatgatcgctgcctcggttccagccaactccgcaagcacccgcactccgactggtagccgagtccctcatctccgatctcatgattatcatcagccaagcctcagcatcatcggcacaggatctagccgcaggagcaggggtcacgacgaacgatctgttcactcgcctcccgaacgtcacagggagcgccgagtcgaacggcctcgctctccacttcaccagcgtcctgtcgaccttcgcgacatgatcaaccagcgccgtgcagcacgaggtcaccgccattcaccaaatctctacgacgacgacgtggatggagtagctgccttcactaatgacctgcgtcgagtggattggccagccggctttaagccgactggaatcgagaagtatgacggcaccactaatccggagtcttggctcaccgtctacggactcgcaatccacgcagcaggaggagacagcaaggccatggcaaactatctacctgtggccctagcggattccgcccgatcctggctccacggactaccccttggcatgatcggatcatgggcggaacttcgtgatcacttcatcgccaacttccagggcacctttgaacgccccggcacacagtttgatctctacaacgttgtttagaagtctggagaatcccttcgagattacatctaacgcttctccgaacaacgcaacaagatctccgacatcaccgacgacgtcatcatcgccgccttcactaaaggcattcgccacgaggacctagtcggcaagttcggacgtaaacctcccaggtcggttaagcagatgttcgaaaaagccaacgagtatgtcaaagccgaagatgctattaccgcgtccaaacagtcgggcaccacttgaaagccaaagaaggatacgccgaccgcaggagagagtggaagtaacaaccacaaggatcgcaagcgtaagcccgaagaacttgtggcgaccacctctccatcttcctgacaacgttcccgcatcaacaccttcgacaagataatgaactcccaatgtccgcatcatcccaactccaaccacatggccaaagattgcttcgtctacaaccactttggagcaatacgtcaagaacgcacgtaaaccttcagacggagatcaaggcacatcaaagaagaaagatgatgaagacgatgccccgactggttttcaagatcatcgcaaataacttaatcacatcttcggtggacccctggcttatgagtctaagagaaaacagaagctaacataatgggagatcaatgcggtttagcctaacacgccccaatatcttcggtagttagaaatagcaattaagtttgaccgctcggatcatcccgaccgagtgatccacccggggcggtaccccctagtactagacccagtggttcgcaatgtcaagctccgacagactctcatcgatggtggcagcgcactcaacatcctttttgctaagaccctggactatatgcagattcctcgcacggaattgaagccgagtaatgcacccttccacggtgttatcccaggattgtcagctacaccactcagccaaatcactcttccagttaccttcggcactcgggagaattttctcacagaaaatgtttgtttcgaagttgttgatttcgagacagcatatcatgctatacttggacgaccggctttagctaaatttatggtcgtcccacactacacctacatgatgatgaagatgcctggtcctcgaggagtcatatcactacggagcgacatcaagcaggccgtcacatgtgacaaagaaagttgcgagatggcccaaacccacgagactactctcacccgcgaagagatccgactggctgcgaccacggcaagcgagggagaagtgcctgcaaccaagctgacgaagaccgaagaacgtgatgctaagacgaaaaagattcccttagatccctccgatcctgataagactactgtaataggcgctgagttaaattgtaaataggaaagcgcgctcatcacctttcttcagaataataaagatatttttgcatggaaaccatccgatatgcctggtatccccagagaggtgattgagcactctttacatgttaggaagacgccaaacccatcaagcaacgactccgccattttgcacaggacaggaaggatgcgatcaaggaggaattaaccaagctgttagcaacaggcttcattaaggaagtccttcatctcgactggctggctaacccagtcctggttcgaaaaaagacggggcaatggcacatgtgtgtcgattataccgacctcaacaaatcttgtcccaaagacccttttgggttacctcgcattgaccaggtggttgactcaacggccggctgcgagttactcagcttcttggactattactcgggatatcatcagatccgactaaaagaatccgactgcttgaagacctcgtttattacgccctttggggcctactgctacatcaccatgccctttggattaaagaacgcaggagcaacctatcaacgcatgattcaaagatgtttttcaactcagatcggtcgcaatgttgaagcttatgttgatgatgtagtcgtcaagaccaagcaaaaggatgacctgattgcagatttagaagaaacttttacaagcattcgtgctttcaagatgaaactaaacccggaaaagtgcatcttcggagtaccgtcagggaagttgcttagatttatggtatctcaaagaggcatacaggccaacccggaaaaaaatcaacgccatcctcaacatgaaaccgccaagctcccaaaaagacgtccaaaagctgattggttgcatggcggcgctcagccggttcgtctcacgactcggcgagcgggggatgcccttcttcaagctgctgaagaagactggcaatttccagtggggactcaaagcacagaaagcctttgaagacttcaagaaacttctcaccactccaccagttttggcctcgccacatccacaagagccgctactgttatatgtgtcggcgacctcccaggttgtgagtacggtcctggttgtcgagcgtgaagaggaaggccatattcaaaaagtccaacgtccaatttattttgttagcgaagttttagccgactccaagacaagatatcctcaggttcaaaagttattatatggtgtcttaattaccgttaggaaattatctcactactttcaaagtaactcggtcacggtggtcacatcgtttccactcggagatatacttcacaatcgcgaagcaaatggacggattgcgaagtgggccttagagttgatgtctttggacatatcgttcaagccacgaacttcgatcaagtcacaagctttagctgatttccttgccgagtggaccgagtgccaagaagacatgccagaggaaaagatggaatattggactatgcattttgatgggtcgaagaggcttacaggcactggggctggggtcgtcttgatttccccgactggagaaagattgagctacgtattgtggatacatttttctgcgtcccataacgtggcggaatacgaggcgctactccatggattaaggattgcaatctctttaggcattcgccgattaatcgtccgtggagactctcagttggttgttaatcaagtcatgaaagagtggtcatgtctagatgataatatgaccgcttatcgacaagaggtatgcaggttggaaaataaattcgatggactcgagctcacccatgtcctccgatataacaatgaggcagccgacagactggccaattttggttcaaaacgggaagcagctccttcagatgtgttcgtcgaacatctttacgaaccgaccatgcccagaaaagagacagtcgaagccatggatacccaaggcgtaagcatgatcgaagctgactggagagaaccgtttataaaatttttgagcaaacaagaactccctcaagacaaaaatgaggccgagcggatttccaggcgcagcagactttacattatccatgagactgagctgtacaagaaaagtccatcaggaatactgcagcgctgtgtgtctttggaagaagggagacagttgttgaaggatatacattctggtatttgtggtaatcatgctgctacacggaccattgtcggcaaagcttaccggcaaggttttttctggcctatagctgtgtccgatgcggacaagattgtgcggacatgcgaaggttgtcaattttttgccagacaaactcatttgccagcccaagagttgcaaaccatcccgttgtcctggccgtttgcggtctgggggcttgacatggtcggcccgtttaaaagggcagtcggcggttacacgcatctctttgtggctatcgacaaattctccaagtggattgaggctaaaccggtcatcacgatcacagcagataaagctagagatttcttcatcaacattgtgcatcggtttggggtacctcatcggatcatcactgataatggcactcaattcactggcggagcatttaaagacttttgtgaagacttcggcattaaaatttgttacgcctccgtggcacaccctatgagtaacggacaagtcgagcgcgctaacggcatgatactccaagggatcaaagcatgagtttttgaccgactacgtccctatgctggcaagtgggtagatcagctgccgtccgtactttggtctttacgcactactcctagttgggctaccggccagtcgtcgttctttttggtttatggcgcagaagcaatgttgccgagtgaagtggaatttgaatcactacgattttggaacttcaacgaggagggctatgaagagggccgagtagacgacatcaatcgactagaaaaagcccgagaagcagctttaattcagtcgactcgatatttgcaagggttgcgccgttatcataatcggaatgttcgatcgcgagcctttttagtcggcgacctggttctgaggaaaattcaaacaacacaggatcggcataaattatctcccttatgggaaggaccgttcataattgctgaagtcactcggccgggttcttatcgactcaagggcggagacggtactctcatcaacaattcttggaatattgaacaccttcgtcgattttatgcttaggcatttcgtttgtatctttcctctttgactactaacttcaagtttttccttgaagttttcagtcagggggctactatgataataatggagtgtgatttttatcaattcaatttgcttacttgatttatcattgccatgtttggtctttcgacttagccaatgaggactaaaggtttttaatagcttttgcgggttttaggctcaataagacttgacaaaggcttttaagaaatcagaagctaagtatggaacaccaagcatagcataaattcatcagtattgtacaaattgagcctccaccgtcattgatcatcaaaatcattgttatatcaataagtatcagttttttcatcatcagacttatcagacccagtcagccgaaggtcgatatcttggaatctctcaactacatcagcagcaatcttgtcagcggctttctgcgcatcactgatgaggtcaagagcagcttcttcgctcgtcccgtttgcaaagccatcaatggcatccatatcaacccttggataaagggatttggtcatcgccaacgccagacttgctcccatacttccagcttctttgatgttcttgaaataagtatctggagcgactctcagcttgtcaaagatttcggtagcatcaagtgtactcgaaccggcgttattgaagaacatggcctggatgagtggagtagcggcattagcgactttatccctggctccttcaagcttgttgatcttgtcaactaagacatcaaactgtgcttgagacttgatcttgcggtctccatcaacagattcacattaatgaatcagcatatagaagataatggcttttgaagtattgattattggtaccttcaacctcttttaaaaccgaatccctctgtcttgccagctcagccttgtcattttccagagtttggatctgcttctctagttgagatatcttggcagcttgcactgcattaacttcggttaatcaagattacagagataatagcacaaatcagttgggcagagtttgcgcgaacctagccactcagttcgaaattggactcctggagctcagcaatccgatccctcagatcgtgttcattcttcttggcaagttctctggcctcgtgcagttgactcctggtggcttcgagggttccaagatgaggaactagtctctctagggttgcagttttcgcctcgttcctaagatgaatcctctgcggagcagtttaatcagcgctcgcgccagatggcaaacaagatggctgaggtcaggcgtcaaggaacttacatttacaatgcgagtcgcttggttgagtgcctttttcagtaggcagacctcttcgtcttctttttgccggtttattacaattccttgaggttgcaagttgtcatcccaccacttgaccagaatgggagggcacgaatcttcggctgctcgtatacgggggatttcttcttcatcaccaatcattggtcctaatgtattcactgacaaaggttagacaattgatcagagttatttgggtcaacatggtttcagataaagtgtttacccgtaatgatttctggacgaggacgagtggatttggatgcctttaaaggagatctagatctctagttattgctggcgttttgtccgcgcgggctgtctgcttgggtttcgacttctggaatctcttggcttggccttgcgtccgactggtttccagtcgggggctcctgattaactccggcttcggcttcggccgactggtttccagttgggggttgatcaccggattctacattatcggttgccggctgattgtcactcagatgatccccagcagttggcccggtttctttggacgaacttgtgttcatgttagtcgggtcagagtctttcccagacggatccatatcaaatggtttcctgcaaatttaattatcagtattattgccgcaatgggtgcgcatcaatacaagagagatcgttatatgagttgcacctagaagacttcctgatctttggcacagggcgattggatgttttcttccttggagtagcctgttttggtagtttcttggttgtctctcggtcttcaggcctcctggtggtatcatcggcttcgtcgtcacttaaaaccagcttcctctttcgataatcggactggccgactagatcagaagcacttggttgagtttcagaccgaattcttggtcctccgctcccttgcccagtttggtgacggggagatcggcgttgagcgattgggggatccgacttcatcaaagcaaattcctgggtgtaatatccttcattgttaactgattcaacaagaaaacaagatcatattttgagaaaggttgaagtgtatgaatatgtaccggtggaggaggattgaatgcattgaatggtacgactggcagcaagtgtgagtagctgacaacgatggcgtttgagaagatcttatacatcctttccttcatgaccttgaagtcaagagaatctggatcttcacggtttgggtcatgcttgccgtcaaattcgaaggctgtgcgagatctttctttgattggagctaaccgacattggataaagtgccgggtgatctgttctccttgaaggccctgttctttcagctttatcatcctctccatcagttctactgcttgtgcagcttcgtctcccattggcagtgagttccaagtatcccgataaactggaggaagacaggagtactcgggaagaacaggcttggggttttgaacataaaaccagtttgcgtgctagcctttatttgaggtcttgaagggcatggagaagtatttttggcttagtgttcccctgagttggaaaccagcacccccaatgatgcatggtttgatcttatttggctagggcttgaggaagaagatgcggcggaacaaggcgaaatgaggcctaatgcccagaaaagcttcgcaggcatgaataaaattggcaatatgcactatggagtttggattcagatgatgcaagctaatcccgtagaaattcagaatgccccggaaaaatcttgaggttggaagagaaaatccgccatagaagaaatgagcaaataccatgatttcgtgtgtatcgggggtcaggaatgcctcaccaaatgccggtcgccacccgatgatctcttttgctggaagaacgccgtgcgccaccatctccttcagattgtcttccgtcacatcggagggcgcccactgactctcgaagctttctctttcttccgccatgaatgtgaactggatggtttgatttagtttgagatacggctggaaagggatggggaatcggagcgatggatgcggggagaaatttcgtgaagtttttgagggtggatttgagcggattgatgaaccctagtttgcccggcgcagttttgcactgtagcaggaaatggggaaaatggcgagagtctcggcggggaagacgaagagacgtttttcacttcggtattattagggtatcgggagtactaatgggcctgggcctgtatagtatttcagcccaatactataatcagcgtggcctgttgtgatccctagggacttaggcactttttgctttggtaatttatgttcacaatggtgtggcctaatgctgttaaaatcctttttaacgcgatttaataattctttggaattattatgatgcacataaaaaggtgcccgacagaaaggtgttataccattttttgtaagctttattaggctggaaaagctgattgggttgatttgagatgactggtttattaatagtcattcttttagcatgttatatgcttattttggttatggtaagggtcacagcctaggctattagactcattaattaccatgattttctatcatgtttggtgggtcattctatgagatttttactcggattcctatcaaacatgtctatttttggacctttgagtgtttatcgctcggcccttcttgtattttttgtccttgatatgttcaagttgagcagcagtcagctgggtatcgtactaagtaccatgcatgcttcgctataaaactactcggttcttgactatatgtttagtttttcaactaatcacatagtcgggggctacacctaattaggtgcatctactcgatgcaccatgttttattttcgcccttcacagtttttgatttctagtactcggcaagctggagcaagttgaattgaagcactcggactactgttttttgtttcgagaaggttatttcgtcaactgcgaaggtctcgggggctactgtggagattatggataccccatatctgcatgacagttatactttagtcgaatatacggtaccaaatatagatggaatatctttatgaggactcgggttggtttttaacttgtatatcaaggaaatacccgggatcctagtcggttacgattgtattttatctataatcccatattctgttaggatatggactgtattttgtaaagcggactccttcccctatataaggagggtccgtgtgcctcttggggcgcgattctttttccagtttatacaatcaataacacactcggcggaatcatccccggacaggagtagggtattacttcttgaataagaaggcctgaacctgtataaaatcccttgtctccaaacccatccactttcctagcttgatagccactcccttttattattgccgaaatcttgtttcgacattcctccttcggccttgaacgttactctcgcgctcgcatatactccgtcaaaggagcgaacaaaagtacgacaagttcttcagttcttcccgtctcttgcacttctgtgcatatactccgccaaaggagcaaacagaagtacaataagttcttcagttcttcctgtctcttgcacttctgttccacctccggcctctgttcctacgctgcaagattcttcctcggttccgttcacctgtgtgcacaggtgtacgggattcttccccgtttccattcatcggcgcgcacagttgtacgggacgagcaggtgccttcggaactccgttcgcttgagaacctgcacgggtaggcgagagatcaagtttttggggagcgctacacgcgattgctcctgttcgtcttcctctgcatcgtctttgccaacatgtcgaacaccggcgataacatcaacactggagccaaggagaaggaggctcccgtcaacaccaacggaagcaatactgcctcaaactctagcggagggccattctcggggtataacgttttactactattgttcgttcttcgtttcctgctagtgacagccacaatgtcattgcgttgtcttgtttatgttgacgcttattttatattaagcatactcatgttgtatacatttagcactgtcactagatccacttatattgcaaagtcatgtttattgtcttaatattttggattaaaatatgccaaattatgaccaaatttccaacagcgtcaaggggtgtttgcatgaccctaaacttcatatattagtagctgccaccacttttagggtttgggttttgcttagattaatctgtcagaacagattcgtcgatccttcggtttgtgagagccccaacttgtgagtttaatcattcatatataatttggttgtattcgtttttgttcttgtttgtgttcttcgattcgcaagcagggattagccttctcggtgaggtcaaccgggtttcgacacggttgataaccaaaggagacgtggtgctgcgattgcggggcttaagagcgtgtttgtttagaagttggatcgacttgtgtcgcgactccaccaaatcgactgtttatcagaacctttcggaagatcgggaacccttgtccacatcaataacaccaacccggactaaaaaatcgatctttagttctggttggtaacaccaacccgaactaaagatgcctctaagattagttcataaggaaagcatctatattctagtcagatgtgtgtagtaggtgtgatggttacacgcgtgagtgctaaggtgaaagatcataattatcctttcttactacataaacacactgttgtgttcggcatttgagcaagaacaatagtaggctacaagtctgctataagcatgtgtggaatagataagagaggatagagaaggaaatcaactataagcatgtgtggaagagataagagaggatagagaaggaaagcggagcaggtacaatagtaggctacaagtcagctataaacatgtgtggatgagataaaagaggatagagaaggaaagcgagctacaaatttgtagccagctgcagcacgtactccaaaacgttatgtgtgtatgagagataggaccatatattaatgatgtagtatatgtttatattatatgaatgaactattaaatttgctatagatgatttggagctaatagttggctatactattaaacttgctcttacgaaactgggaggaaaactaactcatttttcgtgcacatgcttcccgaactgctaaacggtgcatttttttaagttttctatatgaatattgctttaaaaaatcatattaatctatttttcatgtataaaataattaatactcaattaattatgcgctaacggctgacctagtttttttttatcttctcaatcttcttcttttccctcctctcaaacacacctactgctataaaactcaacttctatgagaccagatcatcaagattatattatccattcgattgaaatgtctttctctatcaattatcatattagcatttctcaacaaagcgacagggccatggtattgccccgtcttctcattattttcctacttcttccatccccatgcccccggggtgccactcaatgggctcgatgtgcacaggaggatacccaatcacgcatatcggggtagaggcatggcgctcctcattcgtgcatctcggtggcgattcaaatgtccaatggatcagctttgtctatcacaactcctcatctactaccaccacagacaatgattaatctgtgacttgttatccttgtatgacacttcccaatccgttctagttttgccttttttactagaacagtttaagtttaatccctctctcagccaccagtcccacaaagtggcaaatctattgccgctcacccctccagagtggtaaaaagttgatgattactatcaatgtcttgaaatcaatttgttttccaattattcattctttgtctgattgtcccccaaccatttttttcaattgctggtttatctcccatttggttcagttgatcttcattatattccggacctcaaagcacaggtaagttatatgttttaggtgaagctttaattctagggataagtccatttgaccctccccccccccccctcaacttttcacttcgtctaaaatacacccttaaagtttaaaaccaggtattttacatccccgaactttcaataccacgcagtttaccccctgggtggtttctatcctagtttctgcaattaattaatgagaatctccggatctgcaattacacataagaaattgcattgaattattttcgatgtgtcttgaataagaccgtcacgtagccggcgagcagctcgtcgccactggtgatgatcgcgtcatttaattgatcaatcgaaattgcatgctcccatttaattttcgatgcgttttgctgtgtaatcgcataccgctggagttgattgatcgatcgaacagcaagatgacgaagcgcgccgcgagcagctcgtctacgccggtgatgcacgcttgacagtggaacgtgcggtttcgctatggacggtttgcatggatcggtgatgctccgggcggctgccgctgccagtacaccatgcaaggacagaaactccgtcgccgctggtgcgtcgagaaggtctagcgagagcaaccgatgcgtttgcattccacgcttcgccggcggtgcatcgagaacctccggccgtggttgttcgcattcgccggcggcgggcggggcggcaaagacgacgaccaccacgggccacggcggcggggccgcgggggcggcgtccgtgaccgcaaccgcatcctcatcgccaagtgcgcacgctcccagcggtgcggccggcacggggactcgtacacgcagtcggcattcgacaccatcctcgctggctacgtgacggtcttcttccacctagactcaggctacacccagcaccagtggcagtgtggcacctgctgcgcaagcgcaaccacaccacatgcatggcgagctcgccatcgctcgatctacttccatggtggagctcgacgaggcttcaaggtcggcgccggggagctccagttgacgtggctctcctctttgcgctgtctgcgcgttcataggcatcagcgctcgagctgaccaacccggtggctgctggcttgggaagagggagaggggaagatgaagaatcagtctgagatgtgggacattaattattttctaatatattttgctgacttagattgacacgtcagcgccacacattggcgaaaccaccatatttcaggacgggggggtgatttgaatggttttaagaattgagggacgtattatacccggttttgaagttaaggggtgtatttcagacgaacgctatagttgagggggtaaaatggacttatcccttaattctatggtcatgccaatcacaagtgcaagtcccctcttatatctcactaaatagaaaaggtttccttacctttctatacttttatttatctttcatttcttaccattaatcacccacaaagatcgatttcataattattcaatgatcgattcaggactaaatcaaattagaacatttagaatttttatcctacaaggagacaacctatatatttaattgctttctttaataattagaatcatgtaaataaatgaccatatgttatttctatgtcatttttattttatttttttcatagatataagagcaaatatgagaaatgtcattgacaagcggctcattctataatcaaactttggtatctctattttgtagtaatactatataaataaatgaccataggtttcaagtgatttgtgttctttattatgtgcattgagaataatactttgttatctctattttgtagtactagcttatggacgttagagcaatgttatcttatcattggtcgatcctaatcgccaagggactgattaggtcgattaatcgtcaattaacctcaattaatcacctgatcaatattttgtatacacggactagtacgggcgtgtttggttacctgcatgcatggagggtggctcgcatgtgtgggtgcaagaggaggttgtctggttgcccgcacggtcgtcggggcttggatccacgcatgcaaaacggcctccgcagctaggcccgcgagaaacgcccgagttgagcttcgctccccatccaggctgcgcttgtgcaggcggcgtgacgtgcgggtgcaggcgcggggatacacagatgcaggagggcgagaggggtcgcgctcccttcacctcactcctcctcatttgctcgcttggcctctactcggctcatcgccatcttcgtcgccgcacagccatcttctccaccagaaacttgcctggggcttgccttcctcctcttcttgtcgtagcctccaccaccttctccaccagaaactccacccctcctttctccagcgactggaccgcgcggatccggtgcccacaagcttctaagcggtagatctggagcggcggcgacaccatggtttggggtgaggccgcgaacgacgagcggccaccagatttggatgctatgaccgcgggaagtgcgcacagcaagctccatggtgagctgcagcacaagcgagccaggggcgacgctgcaggtgagctgagctgcaggcgttggggatggcggcgcggcactgtggatgtcggcgatgtggacggagaaatctcgtcaacgcggcgctctttcttctttctttctcttttcttttttttttcttttcatttttttcgtctattcatgagtaaatgctgtgcatcaatgctgtgcaatgcgcacaccttttgaaactaatgattgtttttttcctgtttttttaattgtattttctatctgtttatgttgtctattaaaaagtttacatgtatataatgttgttagagattttaaacaccattattactttttacatgtgataaattattcatgtactcgttggttaatccattttttttcatatgatgtcgcagtggtaatcttacctaaccaattgaataggtaagcacactcaaattcatacaaccaaccaaacaaaatctcccttaaaccgtatttctcatacaagcaaccaaacaatgtcttgtgctagtcaggctgaacccatgcaatcaaccaaacagctgcatgtgtatctcctcaaccaggctatactcagccgataagagagatggaccaggctagagggtgcgagcaaccaaacacacccttaagtttagcattatatacatgtaaactttttaatagacaagatgaacagatagaaaatgcaattaaaaaacaggaaaaaaacaatcattagtttcaaaaggtgtgcgcattgcacagcatcgatgcacagcatgtactcatgaatagacgaaaaaaatgaaaagaaaaaaaaaagaaaagagaaagaaagagcgccgtgttgatgagctttctccgcccacatcgccgacatccacagtgccgcgccgccgtccccaacacctgcagctcagctcacttgcagcgtcgcccctggctcgcttgcgctgccgctcaccatggagcttgctgcgcgcactccccgcggtcctagcatccaaatctggtggccgctcgtcgttcgcggcctcacccccaaaccatggtgttgccgccgctccagatctaccgcttaggagcttgtgggcaccggatccgtgcggtccagtcgctagagaaaggaggggtggagtttctggtggagaaggtggtggaggctacgacaagaagaggaggaaggcaagccccaggcaagtttttggtggagaagatggctgtgcggcgacgaagatggcgacgagccgagtagaggccaagcgagcaaatgagggggagtgaggtgaagggagcgcgacccctctcgccctcctgcatctacgcatccccgcgcctgcaccggcgcgtcacgccgcctgcacaagcgcagcctggatgaggagcgaagctcaactcgggcgtttctcgcgggcctggctgcggaggccgttttgcacgtgtggatccaggccccgacgaccgtgcaggcaaccaaacagcctcctcttgcacccatacatgcgagccaccctccatgcaggtaaccaaacacgcccttagaaggaggtgtactaactgtcgaaggaggagctcatcttcctagtgccgacggtgcttgaggcttgagtccttgaggggcggcaccataggagccatctagctcggcagctctagcagcagaccaggtgaagggaagagagagatctaggcagcagcaggtctagttctagcagcatatcagggtggcggcttgagagagggcgacggcttctgagaatagtggtgacatgcagtggcggatttagtccatttctgtggggtcggctgaccccacagctttttgaaaaacatcttataaaccttgattttcatgtataaatctaaaaaaaattatagaaatgaccccacttaaatataaaccactagtaattgaccccacaggtataaaatcttggctccgccactggtgacatgccctcatgactaaaccctaaggagaatggacccagcttcacatgcagccaagacttgttgtgagatcaatataggtgctctaatcggacgattaatcgtgcctgatcgccaattaatcggacgatcaaatttctagtcaacctgattgaatgaatgcccatgatgggatgattaatcgtgattaattggacgatcagataagatttctttatagattcattaattaattgttctgaggtggatatcaatttgatagtagatcaatatcgataggtacgataatttggtctttggtaaaaaaaatgtgcaagatataacgtgaatggagagaagaggagaagtcacgattggaaggcaaatgttcgtgaagataggcacatatatgtatcgtacaatgtcctctccgcttgtcgaaatgcaaataacatcatcgggggatatgatcatcagttcacgagaacagaggaagaaacaaaagctaaaaattaaaaccatcaacagcccgatcgagtttgcattactagatacacacattgcagccttccttccctctctccatgtatcgatatatcaacccggcacgcacaaaacatttgttcattccctactcgagctgcgcgtaccacaccccttggatcttgacatccttggcaccttggcgccgaggtctgtgtccgacggctgcacgctctcgaagacgccaatcacctcgccggtctctggcttgctcttggtgacgctcaacgtgatgttgcccgtcgacgacgaggcgttcttgacgttctccttagcgagctcctcctcgtctcctctgcctccggcggggagcgccacagcgttgtcgtagccggtagagccaccgcggccctttgggtcgaggaaggacgaaccacggtagctgggcacgaggaagggcccgccgaagctctccggcttgccggtggcgaccagattcttgatggtgaagaggaacggcacgcgctcgcctcccggcagctgcacggtgacggcggcgtagtcgattccgtccttctcctcgaacttgatggttccgtcggagctgacctcgagcgggccctcgatctcgtcgagggtgtaggtcaggcgggtcatgagcttggtcttctggaactcgggtggcgcgttcttggccacgccctccgccttaacggtgaaggacgtcggctccaggcagaacttcttcatgttgtacttgccggccttgaaggcgaaggagtcgacgccgccctccaccgtcgggcactggttcgccgtgccggttcccttcacctccatgtacgtcttactctgaatctcgtcgaaggtaagcctcctcggcacgccctccgcgctggcgccctacaccggccggccaccacatgcacggcgttacatatatagtaattcgatcgtttccaccttggccttggccatggcgccatgcaacatactcctaaatcctaattaaggtcttaccgagacgagcagagctgaggtggcgagggcgaagccggcgagcttggcggcatcggcgcacttgttggcgacctcccggatgtcggactgcagggagcacgtgatcctgccggcggcaccggtgtcgacgccgaacgccctggcgacgtgcgaagacgggcgcgatggcagcgcggcggaggaggcccggccgccgagcttggccggctgcatcagggtggccgcggcttggagcgatgctgccatgtccgctcgctcgcctgctcagctctcagttggtgggtggtgtggccgtgtccgtgtgggttgtatcgtgaagggcgttttgtgagggcgggacagtgttatctatcgcagagcaaggggggcagaggaggataagaggattggataaggcgtggcctcccattggtggcttggggctatggtgatgctgagctggacgtcgacgtggcacgcccaggtgccactccttccccggcgtgtggtggtgggctctttcatttgtggggctggcgctgtgaagatcctacttccagccaacgaaggcttgccacgtcaggaatggagagacaaacgaacctattctcttgaaggcacagggaacccaaagaaaatgctaaaaattaaagatctcgctcataagaccgacatttgtaatgtgttagatgaaacaggaattataaaaa

SEQ ID NO: 4566 - DNA, 17202 bp, Oryza sativa
catctaaacctctttcaaatccaatctaccatatttttatgtcgagttaatgtcatgttatccttatttttatttaagaatagtaggtatatatgtagttatatgcatttatctgtcaaaaataataagctattatgatttatgagttatgtacatatatttgtccaaaacattaaatttccgtcaaattccgattactcatccgtactccgattaatcgtttagcggtaccctctccgtccgacatccgtattccgtcatccacaacactgagtgggacgggcggccggcgaccgaagcggttgacaggcgggtcgaagcggggcagccggccggcaaggttagctagggggcgggtaggccggcggcggcaatggcttcatctccgccaccgagctcgcgcgctccatggccaacacctcccctggcacgcacggacgcagtcggcgacccctccccgggcgtggtcggcgacacctccccccgcgtgcccgtgctgctcctatcctctccggccgccgcccgtgtacgcacaccgctcctctcctcccgtcggccggcgcccgcgcacacgcgccgctcctctcctcccgccggccggctcccgcgcgctgctcctttctcgtcggccaccccgcccgtcgccgcttcggtcgccggcgaaagtgagggaaaagtaaggtaagagaggccctgccagtacctgtcagtggcagaagggagaaattttttttaaaaaatccatgtcatcgtccacatggcatgccacgtaggcaagaccacagtcaaacgatgctttggactaggatgatacattaaaccaagtttagagatctcgatgctcgttttgcaagttcgtggacctaagtgaaacctcgttacaagtttaaggaccgctagtgtaatttactcttttttattttataagcagagaaaaattcttaccccatatccttgtaacccgagaattaggaaagtgcatgccccacatgctaggacaccggcccagaaagggatgtggagtagcatgttgtaggctaaagcagttcctaaaactgcacaaagaccacagaaagcaccatgaaccttgaagaatttaaatacagaagataaaactgtaaagttctgtaagatttataaaggagaactgtagtgtatagtgcagatcttgtaagcctatgtcaagaaatagattataaaaaatgtgatcaagatagataagttaactggcacacaagaaaataactcccaccagttacataaacatgttatcttggacattgacatggtctccatagtgcaacattagatggtaatttctaatacaatatatttattataaaccagcaatataatactataaggaactttccacaacaaatctatttagaaagaaatatgacaatttaaagttttgaaagtttgacttagcacatgtccaaattgatttatgtgaccagtgggagtatttgattaagaaataaagcaagataaacacatggaaaccctataccgtgagagtaacattctcataaaccacactattggtgtttctatcttcaaaatataattagagttatatgcaataatcatcaatattttagataatggaatattttattatcccggccactgcacccagagatggacaaagccatgatcacttatttacaagttttccatgccaagaagaataaaccaaacataaagcaacatgctacagatgttgatgaaacacaaaatttcagttcgcttacaacctattgctcaaccaccagccgtagttattgaatagctctattaaatttataattcaataaaacaaactctgcacaaggaagttcattcaaaatattaacctaatttatggattacccccatggtttatacatggacaacaaatatgctgtaaaagaggatactatttttccaagtaacaagtaaaaatagtatttcaacttttatagaaagcaaagacaaacaacaaatactgatacatacctcctggtatagtggcagcaataacaccaagctctgctagtaaccataggcagtacttgacatactttggatattcacccatgcacaactcagcgaggtgccttcctacaatatatttatatggtaagtttcatagaacatgtatttttgtcaccagcttgataatatgggtagttagtttcacctgtaatgatacccaaatttgctgccaatgattgtacagtcaacacaaatatgaacccaaataggagtacccatagcaactgaaaattttaaaaatgaatgaaggagaagtgagatggcaaatctacaatcaattgacaaaaatgtataacataatattccacagaaattttgagagctttataccgaatatctgtggctggatccagctaccaaatcagtctgcactgttccaattttcaaagtgaagtagttcaatatattagtactagaaaaagaaaacggtggtatatgagcatgtcctgcctaggaattctagtggtatccatccatgttccttgatcctattgttgaatttaccaaagccatttatgacttaaaaatgtctttttctcaccatgcatggatggatggacacaaactggtgagcagagacaggcatagttctagtccaaggaagattgaaggacaaaggggacttacagttactaggatcaaggtatgcgatggagataacaaatccaggaccaacatgtgcaagaaatctcttccaagtgggtgcctgctctcacagatataaattactaaatggactcaaaaagttctgaaaaaaaaagttgcatgttgcagtatttacaacttaaatattttttccctggtggaataaagttcaattgtcttgtaatagatggttttacactgttttaaacattagtttttccctaaccagttaatcttttatgtaggtaatgcatatatcagagaactacaagtgaaatatttttctaaaatttggaagacatctaattttaaaaattcaagaattgtttgatccttgagctagattgccacattagagccatgttaatcaaagcaactctaaatttgggccaaagttgaaaactgaatgaaatacaagttcaagggtatatacttcatggttttgaagtttacgatcgataattgtttaactctatgaaagatcatgataataaaatggtttttttcttttctttcttttttctcgaaaacgtaggagaattgtgtttcatttcattaaggggaagaaaaaacaaagtagaaaatatttacaaagtaggaggacccgagccctcccaccgagacccacgcacccaagaccacaccgaggagcgctaactgcctaggttagccatcccactgaggagcttttgaagtgccaaagctcctgcggaacaccaaagattactcttgttttctaccacttgcaagaccgagacaccctcgcaatttttgttgaacccatgttatagtaggggtgaactgtacttttgcggcactaaatagagaaaagaacatgtcactgacaaatgacggtataaaaggaaagaaaagccattgtctgatattatattgtgaaattcatgttcgtcgatggtattttgtagaacacaacatttgttgatagcatattgtagaataagtcataatacaaagtcagctacaccaacgtgaaaggaatgacactaaaatctcaactcggcaatacgcgagtgagttgaattggcttactcctaaatttttttttggggaatacggcttactcctaaattgaagcccaagagaaacatgcctaaccgatgtcggttgataatcattattgcaagaaaacatccttgccaactactcgaagaataatcaaaccatggcaaaactaagtaatataccacaaaaagggtctattattttgtaaccagacgaagagatgatacgatctacggtcgagccaacagatttcctatacaaaatattctagcaaagccaaaagtcctcattgttatcagaaattttgattagtgcctgtttctatccccgtttgaggaaaagtctgtgctaattttacaaagcagagtacatagagatcatcaaccgtacatattcatttcagaaatcaatcaaacggatattcctcagatgtctgaattggctgaggcaatcgtgctacacatggtttgcttcctacttgtgcggacagcaggagagaagaagaaattgacagcaggcagcctagcagaggaggaagaaaggaagaagaacaaactaacctggacatcgccgtgcagaccgccgtgttgccgcgacggcgaagcccctgcggctgcggcgacctcaatctcaatctcgtccccgccaccgccgctgccgccaccgacggccgcgaccctcccgctaccgttcaccctcccgtgctgctgctgctgctgctcgtgctccctcccgatcttcgccccctcctccattgctctgtctcagtagcgcaactagtggtggtggtggttgaccattaacctgaacctggcgaggccagcaccagctccggttgccgcaagaaaagcagcagctgcctgcatgcaatacgggtcaactccgcgatccctctgcatatctgtacttctcccaacgtacactcggtgtattcgagatgcgacgcaagcatcgaggacgaaagtcgtcggcttgggggcaggaacagcactcacctaacccattccctctctcaaaaccccctccaacccaaacaaatgcccattgtttaatgcccgccgatggcctctcgcttccgacgtacagctccccttgtacggcatgatgcggaattgcggattactggtgcaatcgacggtacggatcgaggtggtgcgtcaattggacatttggattgcggaggaggctgacagcgaccggatccgcggggtccattgggggcgccggtgggtgcgcggtgtgcgtctctcacagctggacaaggccgcgacagccggccgggcgacgtacggcaggcagtccggatcagcttcttgctctgctgtggatagaatatagatagggatcgcgacaaccagttgaggacaaattgtaaacgccaaaaatttacaaatgccgtcgatgtcttcggtctctctagaaactcgacaagaaagcggcgacgctggccgcaggctccgcaagaaggcggtgtcggcgccgacgaacctcacgaggaggcgatgaagatttggggattttgggacgatgggtgcgctgattggttaggagcgatgacggaggggatcggggtgatgcggctatgaggcgtagacggatggatcgatgaacccgtggacatcgtcccggacggtgcatgaagggtgaggtcctgtagtactgtagcaggctttctgggctgagaatcgtcgaagctgagaatcgtcgattcactgttggtagtgggtcacaaaaactaaagatttaatatgatctcggtgccctatattgataatagttgaaaacaatctgaatcattatctgaagcgttcagatttttttttctaccaccatcccacttaactgtagtagaaatatttaggggcataattgttaaaaaaagttacggaggggtaaaatcatcctttaaagttgactaaacttagcacttcccctcaatcagccgtcgcatccgccaccgatgccgagcatccggtgtctagtgtctcctccccaccaacgcctccaccaccaaaaaattgcttatcgtacccattcatgttaggacgcttgatcaaggcgcatgcccgatctccacttcgtgtaaccaaaccggttaagtcatgtataacttatctggactccacgccatttcacgcaccggatattcgaagtgtttacaaaaaacaaaacagaatttactgcagcaaaacaaaactgcaaaaaggagaccacatctacgtaagggtaaggaaccaattttgacaaaccatctgacaccgtacgttgtgcacgcgcaccgcctcgctaggacaggccaggcgagcgagtgcgcgcgtgtgttccccttgttctctccacctcacatgcctcaagtagctagaagagtatccttccttataaggagatcttcctctcctagaatgagcaaggtggtactaaactccccatgcatgccatcctatgaggtgggcttttctgattttccaatgaattaatcttcgaatgggctaaggcccatctattaattccaacaaccccccaccaaatctaaaaaacccactgaaatttgcctttttcaatgtattgtttatataccagcggttcgatggagaccaattaaggttgaatatccacctaaaactccaagctacacttactcacaacttgaacaatggattacgccttgaagcaaggcttatacaagcaagtttcactcagagtcttatctggtactagaccgtcagtcatagtacaaaaaaccggaccggaccggcggttgaaccaggaataaaccagagccgaccaccttgacggctcagttctgctaaaagaccgcccctgcaatcgaacaagtaaaaaaccgtgaaccggccggtttttgcttgaaccggtgaaccggtggcaggttttaaagtatcgaaccggtttttatttttcctatggcagtatgacatgattaatttattatgttaccataccacatttatttttttatgttgtgaccatgtaataatagatatattggtttatttatgcatattttcaccaatttgtgatggttctatattaaaaataatgaaaatcaaatataatagtaataaataaaaccagtgattcaaccggtgaccggtgaaccgacagcccaagcgggttgtcctccggtccattttttgttactatgatgtcagaagaataccccttgggtggagcgtataagtcatattctctggtctcttagtaagcttactagaagattcacccaaaatctccatcgactgcgaccaacagtcaatctcacaaaggtgcattctttcaagaaagctctgcaggatagcatcttcgttaattaaagccaacaaaactcatcacgacatagccaacctgtcttgcagctcatgagagtacatgcatcttcacttagttaactaatagtctgtttacaaaacctccatgaaatagcaccactacctagtgttaaaacatatccactaggtgccaagtttctcttctcggcaaccttgtgaggcttgcaaggttgctttgattgcacacaataatgacacttagaacctttgacaatggagaacttagaaatttatcacataccgaaaagccgagacatcaagccaaatttaatatgacatgaacgtaagtgccgaacattagcctcatcatccacactgccacaaatatggttcacagacttattgcagaaatcagaaagggaaaatcggaacaggcctccgcactcatagccttttccaataaaatatccaagtttagacacgactactttattagactcaaataccaacttaaatccgtctctacatagacgggagccactaacgacattcctgtcgatagtaggaacatgttgtacgtttttcagctgcacgatctttcccgaagtaaacttcggatctaccatgctaacaccatgaacaaaagcatgtgacccattccccattaggacggcagaatcccgtgcgacctgataagaagaaaacaatgagatgtcagtaaaaacatgtacattagcccttgtatgaacccaccagttagtagactaattaactaaaaaatagtaggtaaaataccataccggcttccatctccagtgttgccaatggtcacattggcagactttgaagtctgccctgcaggtggcatcatccccttgcgttgtggacacgtcttggccagatgaccagacaagctacacacaaagcatgttctctcatcctggtttggattgctattgttattcatctgctgcttgaagttggtggtctgtgaggtttgtatttctttttattcttgttttgggccttgtgcacaacattgacactagactgcccatcatcgcccttagacgcggctatttttttcccaagctttctcctcaacatcaagagatgctatcaacccctcaacggagtattcttgtctcttgtgtttgagtgcagtaccaaaacttctccaagatggaggtagtttcgcaataatttacccggccacaaatttgtcaggtaagacacacttaaggagttcaagttccttaaccatggtctatatttcatgagcctgctcaactacataacggttgtcaaccatcctatagtcataaaactgctccatgacgtacagatcactgctagcatcagtagcaccgaatttgttattcaatgcattatcccacaactccttagcgtcggtcatgtgcatatataccccgaccagacgacactaagaacgctaagaatgcatcctacaaagagagtagtggcctcctcgaattctttctgcttttgagtagtgagaactcattcaggtttgccattactaacccagaagcatttcatagccatcagccacaaagtgccccttgatcagccctctcttaaagtacacaccggtgaatttgtccgacctagtacatcggcaaaaccagctatagtaaaaccacggttcctataataaagtttttggattgttgaatatataagcacataatgatttaatttattctataaataaatcatgacattgtagatgtaaactagcataatcgcatcatacgatctacacgtgtaaactagacggtaaaccatgaatagattgaatatgcgaaacatgctaaatgcgtatcgagggttttggaaaatcggttgcccagcaagaaggactcacggtaccatgcgttgatgacggcgcgcagcacgtgaacgaagaggaaaacgagccgttgtggacgaacaggaagcagtcgtgcgaagcgcttcccaaaatccttattgtcaccttctcccagtgcaagacgtcgaaggctatagttccgaagacctgctctcctgatcgccggtgcatgtcggcgagtgggatggagtagtctacgagcaacggcgcgatgcagaggaggaggcaaaccctagattgattttgcgtgcgttgcatggaggcggggactcaacttatatagagatatcatgtcacttgatcagggcgcctgcacgctctccactccgcgtaactgaaccggataagtcgcacgtaacttatctagactccacgccgtttcaagcaccggattattcggagtgtttcccaaaaaaaaacaaaaaacaatttcatgcatcaaaataaaactgcaaaagaagaccacatctgcgcaagagtaaggaaccaattttgacgaactattcgacgtgtagtcgtgcatgcacctcgcctcgtgtattcctcttgttacctccacctcacatgcctcacgtggctaggagagcatcctcccataaggtggcttttgtgattttccaaagaattaatttttgaataggctaaggcccatctattaattccaacagcctcatgatgtgttgttttgtgcaccttctatcctcaccggtagtatggctctatcattgatggtgacatcttcttacatagatctgtcaatcgaggtcagtttgagcatgtagcagccttgcaggcaattgagcttattaacctgtgttttaactgaaattttatcttttcaggttgtatgggaagataccagggcaaaagtaaatctgcatcccatcttgtagttctatggcttttctgggagaggttaaataacatgtacttgtaatagtacggtttgtgttaagtatttgccagtttattggtccgttgccttctgctcatcgctgttaagtatttactggatattgcatgtattcgaattggataaaaccgcgttattttctcccagaagaacttgcgagctgcaaatctacaactaaagcagatatagagataggcctgttatagaggcgggcccaaggtattcaaaataggaaaaaatccaatttgactcccttaaatatacgtcgaatcttattcatatccttaaaccacaaaaccaaatatgatgacttcttaaactattaaaaccgtctaaaacgactccctcggctgttttaagagtggttttcgctgacgtggtgtacatgtggccgcctagtcatcaaataaattaaaaaaagttaagctggcccacatgtcatcccctccctttaataacctctctctctccctcctttcttcttctcggccccttccgcctcggcactggcgacggcggcgtccggcggcaagtgtacggtgtcgagggcccgacagcgagggcgtcgcttgcggctgctgggcccgacgacgagggcgttgactgcacagtgagatcgacgagatcctcgacctagcggaggcccagcctttccccacggcgtttctggccgctgcccgcctcgacagtgccctccgtgtcgccatgtcgcgcatgacctgcacctcgccgtcgacaagctcacggtcggtgcttccgccaacgccctgtggacacgccttagattgtctccaacagagaaggcaaaacgcaaaacagcctccaacagacaaagcaaacagaggaggcattttgcatatgaggagagagggaacgcaaaattgccgtctctctccaagacgcaatcgtccacacgatgtggcggtgagctcgaagattcgcatcggggcgcggcggccagcggacgatgacatcaaggcgagcccgcggccggcgtttccaggcatgtctacgacggggcgaggaggccgacgacgaatccttgtcggggcgcggcggcgcagcgtggtgagcccgcgggcggtgcttgcacgacggatccacgtcggcgaggcagcaaggtatccacgtcagcgaggtggcgaggcgaggaggatctgtgttgacgcggcaacgaggcgaggcgaatccgcgtcggtgcgaggcgcggcggatgcccgtcgagtgcccctggcgatttggtcggcttcttggacggcgacttcttggaagacctccgctgctccacagcgtcgaagtcccgcgggaagaactcgatggagccgaggcggcggcggtagagcagccaggccgccgccgctccctaccgccgtccccaccaccgtccaccgctcccgaccgccgccgccgccgctccccaccaccgctccgagcaaggtgaaaaaagagacccgggagggagaaagagagataagggggagagagagagggagagagggaggaggaagaagggaaggagagggaggatgacatgtggggcccacatgtcggtgggtcccacttttttttttttgtgtgtgtggatgatatgttggtcctacaaatttttgtttttttgtttttactctaattccacatgagctacatgtcgacgacacgtgggacgaagaccgggtcaacaccgtcacataggcgccacatcagccaaaaccgcttgcaaaaccacctagggagtcaaattgcatcagtttcaatagttcggggagccatcttatccggttttctggttaaggggtacgaattagattcggccaatatttaagggagtcaaagtggactttttccttcgaaatatgaagggataaaaaaatacaatatcaagcctaataaatgatatgtatgtatagtttcgcatagttctaaactatataatatataatggctataagtatattttcataaatttatagaactggtcatgaaatgaattgtatgtattttaacatatagccgaatgggctgagttgtggcccaaactcagtgtgggctgagaggaaaggggaggggagtggggtatttttttcatttttagattttttttaatatttacagaaataatctatcggccaaaaaaaattgcaaaaatagaccctgccgtccagaggtgggcggcaagctgacgtggcagacggcgggtcgaccgcgccgtctgccgccatcggccaaaattgtaattagccccttgccgcccatacagagggcggcaaggggctaattgcaattttggccgcccataaagaggttgcgctcgtactttgtgcatttgggccccttgccgccccagtagagggcggcaagggacccagatgcaaaaagtaccgccaaacgatttttctatgttatgttaataataaataaagaattatttattggtaaaacttgttaatattgttataaaaatgtattgaagttggttgtttcgcaatttcatatgttaagtaaggtattattttgtaacttattcgacgtattagtactcggataattaatataggcctatcgcagtctcggtcgtagaaacattatatggacttaaacaaggagaattatgtaacatgaagaaatagtagtacaatttgaacatgatacaactatttccattgcggttacatagatgatattagattcgaactaggagggaggtagtgcaatagttgaacacaacgacgatgtagtaatgggacaaggaagcatgacagtagaaatttcaatatgccaagttgtccgataatagctaacccctacgtgaggatccctctcctctctcaaaccgcgctttagtaacactgtattgctctgatagttcaagctgcacaacacggctaggtggagttagaacccttatggtgtctatccattctctgtattgacatcttcttggtggttcctgggaggaaagaatagatgtaaagcaagcaaagttagtaaatgttgtgagaaaataaggattcatgtaatcaaaatattcttaccatgaaatcgtcgtcaagaatatttggacaaacaaagaaccttcgacccaatgttgtaggctttatggaacgaagaacctgacaacgatcaccacacctacatcttggacgggcttcccatggagggagtgccgtagttagcacccgccagtcgctctgttgttcacgacattgtcgttcataagccgttttctctgtaagtattgctcagtactttcggatgcgaaataccagcgaccttcttgtaaacaagtggttaggtcgagaacgggattatctgtatcgacccactcgatgtatgcgcaagccgtagtgcgggtttgccgaatagagtagtgttacgaagaataaaacgattgcccgtacggaatgaataagcatatgcagataataaaatacctcacggtcatagttagggcacctaaaaaagcgccttcctcgaatatcaggattcctcgaagccattagttggcatcgatcaccgcataggcagagaggacgctggcaccaaggtggtagtaggtatacacaaggatcgctacgccagttcgaatcctcaacaccccggcgtctagccattgacgaaagccggtaggatttgtaatgaagcaagtagggaagagagtactgaatgtgactgagttctgaaagattgtgaggcctcactcgttaaggcgacttatataggcgcaaaaaatgagtgatatccctgacatgtgaacgtggaggggcatggttggtacgcctgattggggctgaaagttacatgcctgatcggcgccgaaagttacattggttgtatgcggcaaatggcaggcaaatactcgtatcgcacgcgaataaaggaggctacatcggcgtggcagaaagtagtcgtgcatgcgccgaaaggtatcgtgcacatataacaacaacgtattcattacacaagcatacagtactggaaagtgaagcaaataaacaaagagaagaatgctctactggccctaccccgcgccgcgaccacgcttggtcctccgggcctgtgctcgcacgtggtcctaggagtaggtgaaacgatccggtggcacagcacgggtagcacgagtgtctggcggcggagtggcctgcgcctggtcctgcgtctgcaccggcggtgcgcctcccagctgtgaggggccgatgacgtcctccgtcgagcctgaagcgaagtcaaagtcagtgatgtcgaagagcaaggtggaaggcaccaagtggtccgacgaggtcccagcatggtccagtggtggaccctgactcgacgtgccggctacctgtgacgaagtcccggtgtactgccagaactgcactgagtgcgaggtcgacgcagctgcctgagacgctgaccatgcagcctgggagaagtgggcggcctgcgtcatagcgaattgggcgaaacctacacatcgactaagacgctgaccatcgcatttgctgcaacacttcaccctgccagcctccgactcatccatattgttgtggatgcgacgagtcttcctccttacagccttgcctcggagcttcgatgggtcaggaatattgagtacttcatcgttagtctatgtgaactccccagctatgccgaacccataaatctcgccgctccatgtatgatatattgcttgcttactgaagtactgtgacacatatactgcatctggtatgccacactccgctgcggcagcaatgacatgggtgcatggcctgtggagcagcttcggctttgcacaaaagcaatgacatgtgccgtcagctttgagaacacattcctgcttcactctcttgcggtagatacccctgcatgccttatcttgacatagtatctcaaacctgtgttgttgggtaccttgcactagagctcgatgtttcatggcctttttacgcaactcctctagctttttctgcatgaaagttccaaacaaaatgctgttgttcggcatagagggaagaactgcctggaaccgatccctaaaatacctgcatgtcccatgtaaaatgaacttcactatgccaactagtggcagtccacggacaccgcgcatcacccagttgtaaacttctaccaaatttgttgtcattattccatatctagcaccacctgtgtcatacgccttggcccatttctcttttggttcatgcagaatccactgagaaaatttctgaatctccaatctagttcttctaaccaatgttggactatccgttgggagaggtccaagagcttgaggagggtcagtaacggcagtcaatggagccactgcacgctgatcactgcatttggctgtcaactcatctaatctattccaaagctcattgaatttttttctcctggttctgattgcatagcctcttaaacatgttcatgagctccttattcttgaattgcttgaagaaattagctcccatatgacacatgtaccacctactctgtacatcttcccacacaccagggtatcctcattccatactcccaaactgcaactcttctatcgctcgcagaatgctagcgtgcctatcatgtatcaggcacacatttggcctcataccaacaacttttgttttaaccaatttcaggaaccagtaccagctgtcggtattctcactctcaacaaaagcaaatgccaagggcaatacctgattgttcccatctacccctattgctgttagtatctggccccgatactttcctgtcaagaatgtcccatcaatgcagagaacaggacgacagttcacgaatgccatcttgcatgcatgtagagctaagaacgccctttgcagcacactcttgccaggatgttcaatcgaggggaatttcttcactgcgtaagagctcccagggtttctttcctcgataacaccaagcaggcgtggcaaattgtcatacgaggcttcgtaagttccaaatctcatctctattattttctgtttggccctccaggccttggcatagctaacagtatacttgtatgtctcttcgatgtgtcggattattgaccttggttcatatgtgagattatcgatgacatgcgcatacatctcagatgcaacaaatgcacatgtaatgttcctgtggtatttctgaacaccaggtagaaaacatgtatgcttggtaacgactgacactgtccaataatccttccatttccccttatacgcgtgcactctccagggacaaccatctttttccttaacacaccgaacttcatattgcgaccggttggacttggcaacccaaaactctctatgaagtgacattgcaaaatgttttaccgcctccttcatatcttctgctctactataaatcgctccctgaaaaacctcattttctttgtactcccatctcacactatcctctttagagacaaccagccaagaaaaatcctcactagcccattctgctggattaatatccgtctcatcatctgacgaatcaccttcctctacacgctcgttgtcagaatcctccctctccatttcatccacaatggcaccgacagtctccccctcgtcggccactccacctggttgaatgcccactggagctactacgcccccgtcctctcgtgcgttgacctcctccacagaagtctcatttacttcagcacttggtccctcgccatcatccatgttcatctgcacacctggatccttcgggtgaacaaacggaaccatagctagaggccacccgcgttacaatgcattttccacataccatctccatacttgagaattttgaactggcattagttcccaataaaaaccctcagttgcccgacttactataacattgattgttatgtcacttgtctgtggatcaactctcaagcctctcattaaccatccttttatagaaggtacactcctctcaacaggtctatcaattcccctttctgatacaataaaatctgacagatctaccccagttggcctgtaacggacgtttcctgggccatggtaaacttggaatatttgtttgttcgacatatctgtcaacgaaataactagatcatattactctttcatgcaataaacatctacaacgtaatatcttcttgtgtatgccaatgcaacggtaaagtattgattccaaactagcagatctacgtagttaccgatatctacaatacgcacttctagattagtaaaactaaaaccctaaaaatataatgcatttattcaaacaaaattttaaaaaatacacactatttaactcaatagtcacatataggatctatgaatattacctgaaatcggcgtctgaatccggcagggcttcgccccttcttctcttctcctcccctttcttctttttcttttcactggatttgaggggggaggaatgagggctgg

SEQ ID NO: 4567 - DNA, 13702 bp, Oryza sativa
aaaaaactaaaatgcaacaacaaaatggaaacacatttcaaatgaatgtattacctgtgatgaagtcagcaaaccagcagggcttcgccgctccccttctcctccccctcacccctccctcattctcttttttttttggattttgagtgaatataatgaaaattctcagagggggaagaggttttatactcgggaggggaaaaatcgccctccctaagggcggcaaggggggcgcctgcaaaaaaactaggccggcggctcccgaacagtgtaaaaccgcgctccgtaaggacggcaagggggccgcctgcaaaatggcaggccccctataaccggccgtaaggacttagctaacggccgtgtgccacgccacaaaaatcgccctctccaagggcggcgggcgactagttttgtaaaattttcaaacacaaaattagttttataaatattttaataaaaaaattcaaaataaaaaaaatcaaaattagttctgttccacaccatgcagttatgccaagattacaaacatgcaatgcaacacattgtatcttgaaattaggtacatcagttctgcaggcaaattgtccttttcattcaggccttgtttagttcgcgaaataaaattttttaggtgttacatcgaacgttcgaccggatgtctgaaggggtttttggacacgaatgaaaaaactaatttcataacttgcctgaaaaccgcgagacgaatcttttgagcctaattaatccgtcattagtacatgagggttactgtaacacttatggctaattatggactaattaggctcaaaagattcgtctcgcaatttctcctctaaccatgcaattagtttttcattttatctatatttaatgctccatatatgtgttcaatgattcgatgcgatgttttttggaaaaaaattttgggactaaacagggcctaaggcctaagtactccagctaatgcagttgtttgtaaagagtctaatcagcagagagatcagttcatccccccaacgatccgaccgtccatctcccctcccacggatcgacgggcccaccaccctccccttcccccaaccgtttaaatacgccaccccaccggcctcgtctccatcgcgcactcgcattcgacgacccaagaaaaggaaaaaaaaagaaaaacaatcctccacgccttcgagcgcagcaggaaccagcttagctagactagccatggacgccgccggagccggagcgggtgggaagctgaagaagggagccgccgggaggaaggccggtgggccgaggaagaaggcggtgtcgcgctccgtcaaggccgggctccagttccccgtcggccgtatcggccgctacctcaagaagggccgctacgcgcagcgcatcgggaccggcgcccccgtctacctcgccgccgttctcgagtacctcgccgacgaggtaataacgctcgcccacgcccacgcccccactttgtcgtcaacttcatctgcagtgcaggtttcgatctgtgtgctgatctggtggtgccctctctgttcgattgcttaggtgctggagctcgccgggaacgcggccagggacaacaagaagaacaggatcatcccgcgccacgtgctgctggcgatcaggaacgacgaggagctcggcaagctgctggccggcgtgaccatcgcgcacggaggcgtgctgcccaacatcaacccggtgctgctgcccaagaagacggcggagaaggccgccgccgccggcaaggaggccaagtcgcccaagaaggcggccggcaagtcccccaagaaggcctagacgtcggcgcctcgctttgcttgtttagctggagtagattggacgggatgtgtgtctgttagtagtctgctgatgctgttgatctaatctatagtggtgtcgttgaaccttgtgtctgttcaagaagataaatctaagatatgttaaatttttcttcagagatgtttccattcttgctccttatgctttggctgtggagatctgaattttctcaattgtcagatccgatcttataagatcgttcgaatttggttgcttgggttgggcgggtaacttaaaatcacccaaatttgttggtggtgtgttgggcttagtgccgcctcaaaaatttggtgtttggaatgaaaatcaccgaatgcctaagtatgggtatctcagcatctgtgattttgctggatgttgaagtgattggttggaatttgcattttgggaggcaatctggcgctttggtttgaattagtggagggggaatggcgggaaaccgggtacgaaatgaaaatttgtcttgggatttcctatggcattgggcgggctaaatccatggaagtttggagctacttggcccctcaattgtgtcttgagctgtatatttttgggccaacaggcaaataaacttggtcctcaattccgctatggacttattttgggtcaagatccacgtccttatgaatagaccttctctgtatttatgttactacctccatttttgtattgaacacgggtaaaattaaatgtgatgattgtgatttgttgagaatagaaaataggtgaggatactaagaggtggaaggttgtgattggttgaaaaaaagttattatatttaaggataaacgtacacctaagttgttatattttgaaacgaatgaaatactaatatatttgaaagatccatctttgtaatagggtcttgtttgtgtaccctcctttttaagcaaggacatttattttttagaaaacatagtacaacataggcgcttaaaatatgcaaactcactctacgaatacgcacatacacatcctaactctatgaacagtcatcatgagtacatcatctatcgttaaaagaataattagttgtaaatttgagtacatttgttgaatttgaattagttccaccacaatgttacactcattccgtcaagggtatttaattttgatcaactatataacctttgtacctatttccatatctcacagagcacgcttaatttttcatgtagtgaactaatgatggattataatgttatatctgctagtacaatttaattttgaagaaatggttgtctgctcctgtaaaacaataaacttccggtacatcctcaggccaaggcaacccagtagcacaagatttttttaatttttgttggtctttttattttattaaaatattttttaaaaaaatcatagcacaattggaatcgtccccatatttggactggaggaattttatacaaggaattaaactaattactgcaaaattcctacatagaaaggaaccctttacctatcctaggttaatcagcgcattctaattgatttaattgaactaaagtgagataatccaactttagccatgcccatggaactataacctcttaggtaatgtgttcacaggtccgcatgtcaatgatcacgttactctgacgtagggcacaaagccatccaaaaccagttcatcggatatacataacggctttaatacttttcagatcaaattcaaacaatatcgctttatagatgacacagaagaaaacggtggaagcactagctagtggagcaggggcgggtatatgggtcatccagcattctacgcatatataaccttccagctcgggttcataaattcaacttaaccttccaacaacaattttcctgtttgaaagctttctttgtctttaaaaaacaaacaatgttgttcgcaaaccaatacttggctcaacagaagtcacaaaagtacgcattcaggccgggagaagtgctcataggtcttgttggaactaagccagattagccatgtagtcatgtacgagtacgctttaaggcaggaaaactgctccagttcagcaacgatggtgatagactatgccctatgcagttttattcttttgcaatttccacaaaaattagtcttccacgtatgatctgccaaagaaaagatttattgaaagtttagtcttacaataaaacagaccaatcaggggaaataagaaggctggtttagtataaatctatgctgaatacgaatcatttccacatgaagaaagatctgaatgaatactcacacgtcacaatcccaaaataaaaacaacattctacagtgacaaaatggtggagggccaacatgctagcaagatgatatctaatctcaaagtttatggccaatctagaagatattttctttgggattaacagaataaaaagaactatataagcaacacaatgttcctcacagaaggaaataaaccccacagtttggtccacatggttttacagaaaaaggcagcaaaaagtttgcttcacatgatttttacagtaaactagccaagttctcaatctgggttgaacgtaaaatactataaatctctacttagtgtctcaatctcatagaactacaaaaattagttctgttccacaccatgcagttatgccaagattacaaacatgcaacacattatatcttgaaattaggtacatcagttctgcaggcaaattgtccttttcattcagtactccaggtaagtgcctcagctaatgtagttgtttgtaaagagtctaatcagcggagagatcagttctgcagtcaacttgtccttttcattcagttgtccaggtaagtgcctcatctaatttagttgtttgtatcagtggattttttttatccccttagtatctgaagtagatcagagataacatcacaaatgaggcccactcaatctacgagggtaggtgttatcatgaatcacaataaaccactctaggcttcaagtaattaagctagaaatgtgtgtgtggtgtgcatgtaccttcaattccaattgaaaaccaggtagaaagtactatatacagattttcagaactcttctcagataaagaagaatcaaaactaacatcagaaaggtaaattgcgggtcataggcaagataggggatgagcagagcaaatacccgtccatccattgccttaacagctttctctgcgtctgcttgagaagaatatttaacaaaaccaaatccctttggccttccagtttggttgtctctcaccaatcgagctacgcttgataaggtagataaagcagagtgaaacttgaatgccaattaagagcaacaacaaggatttaaattgccctgtgctgaaaatcatgtgactactgactggtaccttcctcaacagcgccaaatggtgagaagacatttttaagttcttcctctgttgtgtaaaatgatagccctacaaaatcccaaaatgagtgaatgaatgtttaagctgtacaagcaatcaacatcaaaacatgatagaatgagtggacaatccactaagaacataacttacatggctttagcttgcatagatagcagaatatctacaggcaatttatgtgttctactcatggtccaatgtgaacaggtgagcatctcacaagctcaacagattagggacttctaagtaccgctatcaccaagagaataaataagcatctatcaaacactatgagctctataacaatagctagctatgtttctataggctgtaattccctaactcgctagaaagcatcctctgatcgatcctttgttgcaatcaaaaggaatcatattctgaaagcaccaagcctcaacaacttctggcatgccatatctatcatattcagaaaaaaagaagggctaaaggacacaccatttagtgctcatttcatccaccatatcatattcagaaaaaaagaagggctaaaggacacaccatttagtgctcatttcatccaccacaccccccagaatcacaccagatcatcactcatgaagttctgacggacagatcatgacaagcgaaactgtgaagcagcaggacatcacatcacaggctcacacagatccaaacattttgcagcaaaccacaagattacgtaggcggcgaaaaattaattacttactgctcacaaatatctccgtgctgaaaggcttggctccaaccatccgagaggccaagccagccagccgcccacctcgcagcatcatctccagaagtacagagccccccgcctcaaaccctagatccccaaattgcaatcgcataagagagaaaaaaacacgagatgcgaatcagccaccgacagtaaataacactccacgtctattacatcaaatccaagctgtccattatgatcaagcacaatttacaaagcaaacacaagcttgcaactactgccacctagcaaacgagaggggaaagggaaggagagaagcatatggcggcgaaaccctagagagataaggctagttgctggtgaacttggtgacggccttggtgccctcggagacggcgtgcttggcgagctcgccggggaggacgaggcggacggaggtctagatctcgcgggaggtggcgatgggcttcttgttgtagcgggcgaggtgggcggcctcctgcgcgagcttctcgaagatgtcgttgatgaaggagttcatgatcgacatggccttggaggagatgccgatgtccgggtgcacctgcttcaggaccttgaagatgtagatctcgacgctcttcttcgccttcttcctccccttcttgtcgccggcgccgccctccttggacgacgccttcgactccgacagccgcttctccgccttgggcttcttctccaccggcttcttctctgccttgggcgccatcggagctgcctctcgagggatcggcgcaaatggagattgaggtgggattcgtgaggaggaagactttttcccttcgcgtggagttgaggcaaagggaaagaagacctcaattatatataggcgcgtggtggaaccccattggtcgacatgggttcatggatatatctgtccggtgctagcatatgaatcttttactagaaaacctgtcgaactccatacacatttatcttctattaggagtcattcaaaaatgtttaatacgacaggttttgtatttctcacattgactagagcagatataattgaactccatagctcccatacaagtaagatatatttcagcacaggacggtcgaaagagtttattgatggcgtgcattattttttgagagtggccgatgctaacaagcataagggttttatctgttgtccatgcaataagtgcaaaaaccagaaggagtattctgcattaagaagttttcatttccacttgtttgagtcggggttcatgcctagctataagtgttgggcattgcacgaagagctaggggttcaaatggaagaagatgaagtggattttatcacggctgttcaagaacaactgatgggattcatcaacgaacaaatccttgatcccgagggtgaattctactacgacggatcgacaattcataccgtcggtccttcttcttctgagataacaccggcgtcgaagtcgtagctagcgagcatatgatagaaacattatatttagggtccgaaggaattgtaaatatatgtatatatttatatatgtacacatttagtttagtgtaaatatatattttggtaatatatgcacataaattgttaagtgctttaatttatatgtgtgtaatacatatatgtatttatacatacaaatatatatcccctagaataactattctacaccccccctctcccatgggccaatcccacagacagaaatggtaaaggtttcttcaggagaagaatctgttcctctttccttccacggcagatcacacacacgaaagaacaaacccatcaagcaacaccagcccaccccccaaagatcctagcacaagaaccctaatccgcgcacggaacagcatgaaacgggcaccgatcaggatgaaaccgggcgggggaagaaggattcaggaggcgaattgggggggggggggggggtggggacaaacctggccgatctgggaaccggagatcaatcggaactggggtctcggctgcggcgcctcctcctcttgttgttgctgcttttccccccttctctctcgtgtttgttcttttctccgtgtctttgacggagctatgggctaaaataaataaaatttaaaaagaaaaacaaaatcgacaaatactctctctgtcccatagtgtaagggagtagtatacaagaagggggcggcgttgcgtgtgcgtgcctgacggggatagggccgacaacgttgttggcgtacgtgaggcggcggcagctcggtaggcgtgggcggaatggcggcggcgacggcgcggcggtcgaccgcgtaggtggtggtgtaacaccccaggtaaccacgtacctagagtgccacacaaaaatacactcaaaaccactaactcacaagttttttagaaatttcggcaggcaaatataagataactcaaagacaacataacccacacaatcccaaaccatcctagctccataaattccgtgtgaaaataaggaccagaactttaaatgacctttacaagttctgtgcaaaacttatgctaagcataatcacagtccaaaactaaatttgaatagtgtgcaataataatgtgtagaccaagggtgctactcccatcccatgccgatcaatattattaggtacctaaaaaccaatttaaacacaagagtaaagaatactcagcaagtacaatatagaactagtaaaacatacacagatttattgcaatatgaaaccaatataaaatgttggatttactttattctaaaacaaagaagtcaaaagatagtacttccctcccgggcaggtatgaacatcctcttagcattaccggtaagcctagcaagcgtgatcaacgcttctcaaggatcatgaataaagatacaaattgcactcccatgcctacacatggttcttgaataatgtaaacagaaacatccgaaataataaaacacgaataacatcgtgaatttgaatatggattgaaacatgaataagtagcataacatcagagccatacgatcaataatatcaagcaattgaataataattatgcaagtaaaacccaaaaaaaaacaactaagttcatccatcaaataagtccgtcttgtacttgccttaagtccttcgatactccgactcaactcctccaacgttggaaccctccacacctgtggagcaaaactacgcataaaccactatatccaactaatgatagttacaagggatatctactaaaatcaataacctagaacatataaactttttatcgatttgtattaaataatctatagtagttcccttactgttttatgtgtaactcgcaaaccgtctaacggaatctagcaaataatacaacttcggacatctaggcaaaattgtctacatctttcatattgggcacaaaatcagattcaccctctattggtctcagattaagaaaaactaattactgtccctattttcagaccgggcagccgcactgttttttctgtttctcctaaaccgtttatcggaatcgagcgaaaccagtggcgttaaaaacatatcgacattgactacaaactttatttagaacaactaacctgaatcccgacggtttaataccagatgcgaaaatactattgtcagcccataaacaacatctaaaaacacccgaccggcaaaccgatcgattcccacgtgaaaatttgagctaccatggatcaagaggagttacccttacaaaggagaaaaacaaatttgaggtaaatttgcggaatcccagaaaatccccaatttttgcttatctttccccttttcttctattcccctcctcttcatgtgcccctgaaccttctcctccctgaccacacaacggcagacctagcagcaacaccagcagcagccagctttggatcacggcagcagcgccaaccatcagatcggcaacaacagggaaacgatagaaggaggagcagccgcaggaactcaccgggaagaagcaaaacggaaaggaaccaccggttgcgatggatggcgacggctgcgacccccggctatggccgtggtggcggcgcaaagatagcggcggcggcaagaacgcaggcgtgtggcggctagggctgctgctgtagcgctctcttttttttccttttttttttctcttttttttataaaagagactaaaaagagatctaacggcgcacttcgtttcaaaccccgctatttcgttcggactccgattactataaacttatatctattttgcattactcgacgagctctgcgcatccatggtttctgatcgcctattcaaacaacggtttaaaaattgaacttttacgtgtttgttcaaatattccccgaaatatattaattcaaaatccagggcattacattcttctcccttcaatcgaattcgccatcgaattcgtccaaccatactctagaacacagggtattataggtggggactagggaatggggacggctcatgcacggtaggaaaggtaggagcagtatttctggcgccgtttcggattgtgggaatgaaacgagaaggttatataaaggattaatttgatccattgccattgtaattattgtattttagataaatgtcattacaatttatctattcataattacatcatcaaaattttacaaaattagagccgtgcccctatcgtcatgttttctattttcttttccatctgcacgtgggacccacgcatcatattcttcttcttccttcatcttccccttttctttttttcccatatctctccatcacctttcagcctcccacccaatccatcacgtcctctcctcgccatatatgccacgagctgcacatggccaccccggattccctccccactgcccttctcctccccacctgtcacacccagaaattcacgaaccagaatttctaagctgaatatgtattaaatccctgtccaggaccagccagggtacacaaacgacaattgttgacatacagatctacgtcttacaaaaatacaaaagattacaaatgcagcggaaaagataaaacgagctagacttggacgcttgacttcagcagtggggcgactccactccacatgcaatccttgatggcagcgatgaaaccaacctctctaagatagctccaacttggaagaacttcaactctggtgtgggagaaaagagagcaagactgagtactacccactgtacttagcaagtcataccggaaaaggaggtatgatgcaggatataaccaaaggaggctaaaggttcatttgcataaagctagcatttaaaagcaatagttgaaaacagtaaaacaattgcagtagattaagcaatattaaccaatcactgtcctacgctacaccacgttgcaataggcccaaccaaccacctgaactacaccagttcattaagctaatctaggggtgagactaatcatggtgaatctggttgatcgcccataaccgcgggcacgactattcgaatagttttactcttgtcagaggtgtacaactgtacccacaagacacgattccacacatgtcaccatgccccgaagtatcaccatgatactacaaagggggaaatcgtgcaagaccctccgcataaccctcccctaaccatccacaccacgctaaggtttcacccccacccctcaaaaggcagtgagcaatcccctcgtgcaccgcggtgaatccggcagctggacaaccggatatcccggccgacccaactacatcacgcccaccctcgccaccgatgcctaggaaagggtcgagctatacttcagatcaagcagttacccactccgcttgtggtaaacacggtaagtgtaacatcccggcctagggcttaataggattaatagaatactcatatcaacaagttgcaacttcttttccggaatccaatctccaaagaactccagggttaagcgtgcttggcctaagcgtgcttggcctggagcaatttgggatgggtgaccgaccgggaaattcttcccgggtgcacacgagtgaggacaaagtgtgcagaaaagatatgtgttggtctgtgagggcagtctatgacctatcaaagctatcagatgtaagcgggcccggcctgggggaaggcgggacgttacaaaatggtatcagagccgactctcgcggtttcacgggcgcgtgtgtcgcagttgcgcaggcatggtgcgcatggctggtgtagaccgggagtggttacacagcatggcacatgcgctggcactggacacatggacgtggccaagagaggacgttcctggcctagggttgatcgactggggtgtcgatctctcttaagggggtgagggtgtaacatcccggcctagggcttaataggattaatagaatactcatatcaacaagttgcaacttcttttccggaatccaatctccaaagaactccagggttaagcgtgcttggcctggagcaatttgggatgggtgaccaaccgggaaattcttcccgggtgcacacgagtgaggacatcttcccgggtgcacatgagtgaggacaaagtgtgcagaaaagatatgtgttggtctgtgagggcagtctatgacctctgaaagctatcagatgtaagcgggcctggcctgggggaaggcgggacgttacatcccgggtgcacacgagtgaggacatcttcccgggtgcacacgagtgaggacaaagtgtgcagaaaagatatgtgtaagtctcctagggtttcccgtgaaccggtccttaactgccatgggtgcgaccagcaaaaccatgcacccacagcacaccatttagtgtattttaattaactaacaccatttgtggtggtaccaatctaaagctatgctaatagacaaagtctatgtaataatgtgatctccatttgtgtactagttgagctaggcatgactaaacattttcctaaaccaacatctagtcatttttgatacccaagttatcaatggcataaggtaaacaataaatggctgagtaataggacccatcacacgtgacattgtaaaagaatacaacatttaatagaaatgcaggatatttgtaaattgggtacaatatgatcaattgttatacatgacttgccttactctcgtacttatgagaccacagcaacgtcttcgagaaaccgtggatcgacgaaacggccgaaatctacgcgacaaacaaagcacccaagcaaaacatgctataagactactgaaacaggaaacaaaaccatttttaatagattctagggatttttatgaatttactaagacttgaatggacttaaacggagctcggatgaattacttatgaatttgaattttagaagataatatgtgcttttacaaataaagaaaaatccttattcgatttattgcacaatattgccccaggaccgacgtcagcggcggggggggggggagggagacaggtgggccccacgggtcggcggcacaaggcggccggtcaaccgtggactaggaccacgcaggtggtccactgcctgtccacgggaccgacagtccagatcggccgggagccgatcggacggcgcggcggcgactaggaatggctcggctcggcacaaagccggccggccggccatggggagcggcggcggcgagtggtcgcatgcgacggtaagtggcggcgcgggaggcaacagcgaccggcgcggaagcggcggcacacggccgatgcggcggtgcaacgaaaggcggcggcgcacgcgggaaggggaaaaaaaggagaggggggag

SEQ ID NO: 4568 - DNA, 27520 bp, Oryza sativa
ttagggcggagaggacaaccacggtggcttacattgccggccgaaaaggggcaaaaatggtgggctcatcggcgaggcgagggaatcgaagctccggcgtcgttcggcggcaagcaagtggtggccgaggtacgggtggactcggtgagcgcgacggtggcgatggcgcggtgcggcggcggcggagctcgggtgtggcatggggagagcggcagagtgcacgggcgagcacggcgagagtagaaaatggttgagggggctcgggggagcgatttataggtgcgggagggggcggacgtggccgggaaacctccctatttcgccagcgacgtgggggattggggaggaagagagagaggggattcaaaaatgaatcctgcctctatgcgagcttgcacgcgtgcggaagaggtggaggaggtgggcggcgacgtggggaggcgcggagtggggtggaggaagcgggcgtcgtggggtggcgcgaagtgggcgcggcggttgccggcctaggcgcgggcggctggaggttagggacgaccgataggtgggccccacctgtcggcgaccctagggaggaagggaggggcccgggccggcccaaaaagaaggaggccgagcgtggccgggcgagatggaccaggccgatggcccaagaaagaaaaagaaggaaaaagaaaaggagggaaaatggaaaatgaattcatgggattaaaatattgcggttaatgaattttaattggttaaaattatttatagggctctgaaaatttaactaaaaatcctgttaattaattgtgacatgtggaacccaagaaaaatctcacaatgccatttccaattattgaatgcatttattaattagggatttagctctagcttaattaaaacaatttcttcggacgatttaacttggaggcgtgacaccacccacccccctcgttgtgggcaccccaccaccaccacgtcggcatctacacctggacgagcagctccccatccccacgttgcacctgcgactgcaacacgatgcgctccagcatgctctgcagccgctccttcaccgttggctccacgcctacctcctgcggcgcctccttgatggtagcccaagtcaatatatactgtggtagtgtggttaactagcaaatgtcttgctagttaccatcaaggttgagccacgtgaaataccgttggctccatagctcctgttgagacatgttttctaagcagatgagggaggcggaacattaggagtttttctgaatgactccacactttgtagcaagacatcgcgctagggttaccatcaaggtcaggtattgaaaactttagtatttgaaaatgttgtttgaagttgtcataatttgaattttaaatttaaattattgaaacagagtcatatagtaaaatgaccaaaccaaaagttgtatatattgatgagttgtacaactttgttgttgatgactttgtcagttgaaatcatttaatatttgaaaatgttatttgaagttgtcataatttgaaattcaaattttatataggtcaatcaaactcacatgaagaaataatcaaaataaaatagttagatatcaataagttatacaactttttttttgacaaacttttcatataagttcatttagtataataaaattcgattcgaagttttaatattttgaaattaattgaaaggagggaggcaaaatggacttatcagtgagggaggtgcaaaagggctggcccgtaacaggcctcgtttcattccatctctgtttaacctttttttctttttattttgttgtaccattgtgaagtaacacaaaaaaatcgtattaaatgaacttatgtgaaaaggttgtcaaaaacaaagttgtataacttattgagatctaccaattttattttggttatttctccatatataatatttgaatttcaaattatgacaacttcaaacaacattttcaaatactaaatgatttcaactgaaaaagtcatcaacaacaaagttgtataaatcatcaatatgtacatcttttgttttgatcattttgctatatgactctgtttcaataatttgaatttcaatttcaaattttgacaacttcaaacaatattttcaaatcataaatgatttcaactgaaaaagtcatcaacaacaaaattgtataaattatcaatatctacaacttttgttttggtcattttgctatatgactctgtttcaataatttgaatttgaatttcaaattatgactacttcaaacaacattttcaaatactaaatgatttcaactgaaaaatttatcaacatcaatgatcatttcttcatccgataaagtgatagtagtatttttcacaaaatttacgtatttaatattatatttgtaaatcgcaacgaaatttctataacgccacagattttgagtcggtttatgatgaaattgataaactgttacggtattacgggccttgtatctatagttgcatatccgtgatgatctctgatcacaaaaatttcgtcacagattaaatagattcttgtagtgtaagtttgaattaaaataaaaacttgaagtagtaatatgggtacattgaaacattaaggattaaactgatccttgcatgaaacttgaaggaccactttagctattcacccttgtacgaatatcgatgctcatgcgatttgtatagggaatgattgaggaagagcaagtatcttgaacattaatgttacgacatctatgtgaataagggataaaactaagtgatgtcaatatgtggataaatgggctcatggcgggggccaccattggtgtagtgtcaaagcctacgaacacatgattatctgtaatgtattttcctaatccaccagtcacttcttgatggctagattacaacaagatatattgtgtagcattttataaccttatcttaatccacttcctcctcccatcgaaccaccactgccagtactcgctcccaacgcgtgcattggtcacccctctccaccgcctccagctgctttcccttccttcaatagctctggcaaattctgcatcctttcccccgccaccctcatccattcttgtggctccaatggtactgcctatgcctcactgccagtgttgagattatgggcatataatgatttaatttattccataaataagtcatgacattacagatgaaaactagcatgaacgcatcattagatctacacatgtaaactacgcagaataacatgaacagatcaaatatgcgcaacatattgaacacgtaccgaggtgacgaaaagaccggctgcttggtcgaaacttttcgcaggtgtctacgaaggcacgaaacacgcgagcgaagaggaaggcgagccgtcgcgaacgaacagggagcagtcgcgcgaagcgcttcccaaaaaccttattgccgccttctcccggtgcaggacgtcaaaggcagaggttccggagacctgctctcccgatcgctggtgcacgccggcgagcgggatggagtagtctacgagcgacggcgcagtacagagtaggaggcaaaccctagattgattttcgcatatattgcgtgaagacggcgggtcggtttatatagagaaaggtcgcttgatcagggcgcccgcacgatctctactgcgcgtaaccgaaccggataagtcgcgcgtaacttatccggactccacgccgtttgcacgcatcggatttttcggaacgtttccaaaacaaaaacgaatccgaatttgcagcaaaacaaaactgcaaaaagaggctgcatctgcgcaagggtgaggagccaatttttcggaccattcgacgcgtacgtcgtgcacgcgcgccgcctgccctgcccaggccaggccaggccaggccaggcgaggcgaggcgagcgagcgcgcgcgtgtgtttcccctcttctctccaccacacatgcttcaagtggctaggagggcatcctcccttttaaggaggtccccctctcctagaataagcaaggtggtactaaactccacatgcatgccatcccatgaggtgggcttttgtgattttccaaagaattaatcttcgagtgggctaagacccattcattaattccaacaatcccccaccaaatctcaaaatcccactgagatttgccttttccaatgtactgtttatataccagcggttcgatggagaccaattaaggttgaacatccacctagaactccaagctacacttactcacaacttgaacaatggactacgccttgaattgcaagtcttgtgcaagcaagtttcactcaaagtcttatctggtactagaccgtctgtagactacccctcgggtggagcgtataagtcatactcctaggtctttagtaagcttcctagaagattcacccaaaatcttcatggactgcgaccaacagtcaagctcacaaaggtgagttccttcaagaatgctctgcaggacaacatctttgctaattaaagccaacagaactcattaaggcatagccaacctgccttgcagctcacgagagtatatgcatcttcacttagagagggtatatatattggtactctcctctagtttattaatggtttgttcttcccaggatctaattcacgggatctccgatcacatagactgggttaccaccatagtataactcacatgggtctcaaacccatctccttcgatgcattgtctatcacatttcgtgatagtcccttcgtgaagggatctgccaggtttctcgctgtttggatgtaatccaacgttataactccggagtttcttaatttcctgacagacttcaatcgtcttttcacatgtctagacgatttcatattatccttagaattattcactttgacaattaccgtttgattgtcacagttcataaggatagccggcaccggtttttcaacaacaggcagatccattaatagatcacgcaaccattctgcctcaacagtagcagtatccagtgccgttagctctgcttccatggttgacctcgtcaaaattgtctgtttgcaagacctccatgaaacagcaccaccacccagtgtgaaaacatatccactagtggctttgatctcatccacatcagagatccagttagaatcactataaccctccagtaccgcaggatacccagtatagtgaagccccaattccacagtacctttcagatagcgcattactcgctcaagcgcacgccagtgatcatctcccggattagaggtaaatcggctcaacttgctcacagcaaaggagatatcaggcctagttgcactagccaggtacatcaacgagccaatgatttgggagtattccagttgattcctagcaattctcttgttcttgcgaagcgacaagctaggatcataaggtgttggagaaggcttactatcaatgtagccaaagcgattcaagatcttctccacataatgagactgcaagagtgtaatcccattctcacctctaattagcttaatgtttaaaataacatcagctactcccaaatctttcatatcaaaattttgagacaagaatgatttaacctcatttatcacctcaatgtttgtcccaaatatcagtatgtcgtcaacatacaagcacaaaataactccctcacccccaccatggcgatagtacacacatttatctgcctcattgactgcaaagcctgcagatgtcaatgttttgtcaaatttctcatgccattgcttaggagcttgtttcagaccatacaaagacttcaacaatttgcacactttgccttcttgaccttcaagtacaaacccatcaggttgatccatatagatctcctcatccagctctccattaagaaaagctgtcttaacgtccatttgatgaacgagaagaccatgtgaggctgctagggaaagtagcacacgaattgtggtcaatctagcaacaggtgagtaagtgtcaaagaaatcttcgccttctttctgagtatagcccttagcaacaagccgagccttgtacttttcaatagtaccgtcaggcctaagcttcttcttgaacacccacttgcaccccacaggtttacacccatagggtcgctctgtcacctcccaagtcccgttagcgataatggaatccatttcactacggacagcctccttccagtagtctgcatcaggagatgcatatgcttctgaaattgacttaggagtgtcatccacgaggtacacagtgaaatcatcaccaaaagacttagccgtcctttgtctcttactccttcgaggagcttcactgacatcctcctcagagacaagttcatgtgtatgttcagtttgttctggtggtgtgattgaactgggaattatttcagagggttggttcgaaccactatgtgtatccttcattgggaaaaagctctcaaagaaggtagcatcacgagactccataattgtaccaacatgcatgtccggtacctcggatttaactattaaaaatctataggcaatgctatgatgagcatatcccagaaaaacacagtccacagtcttaggtccaagtttgcgcttcttcgttattggtacattgactttcgccaagcacccccatgtgcgcaaataagaaagtgatggttttctaccaatccatatctcatatggtgttttgtccttatttctgttaggaactctgtttaacacatgatttgaggtcaacaatgcctccccccaccatgccttaggcagtcccgcggtgtccaacatggcattcaccaagtcagtcagtgtgcggttcttcctttcagcaatcccattagactcgggagaatagggaggcgtcctctcatgtatgatgccatgttcctcacagaataagtcaaactcgttcgagaaaaactctccaccacgatcagacctaagcctttttatctttctgtcaagttgattttcaacctctgccttataaattttaaaatagtctagagcctcgtctttcgttttcaacaagtacacatagcaaaatctagtagcatcatcaatcaatgtcataaaatatcgttttccacccttcgtcaacaccccattcatttcacaaagatctgaatgtaggagttctagtggtgccaagtttctctcctcggcagccttgtgaggcttgcgaggttgcttcgattgcacacaactatggcacttagaacctttgacaatggaaaacttaggaattaaacacatgctggaaagccgagacatcaagccaaaattaatatgacataaacgtgaatgccaaacattagcctcatcatccacactgccacaaatatggttcacagacttattgcagaaatcagaaagggaaaagcggaacaggcctccgcactcataacctttaccaataaaatatccatgtttagacacgactactttattagactcaaaaaccaacttaaatccgtctctagtcagacgggagccactaacaagattcctgtcgatagaagggacatgctgcacgttcttcagctgcacgatctttcccgaagtaaacttcagatctaccgtgccaacaccatgaacagaagcatgtgacccattccccattaggacggtggaaccccgtgcgacctgataagaagaaaacaatgagatgtcagcacaaacatgtacattggccccagtatcaacccaccaattagtagattgattaactgaaaaaacagtaggtaaattaccatacccgcttccatctccagtgttgccaatggtcacattagcagacttagaagtctgccctgcaggtgccttcatccccttgcgttgtggacacttcctagccagatgaccaacttggccacacacaaagcaagtcctctcatcctgattaggattgttgttgttcttcttctgcttcttgaagttggtggtctgctgagctttgtatttccccttgctcttgttctgggccttgtgcacaacattggcactggactgcccaccatcgcccttagacgcggcatctttttcccgagctttctcctcaacatcaagagacgcaatcaacccctcaacggagtattcctgtctcttgtgtttgagtgcagtaccgaaactcctccaagatggaggtagttttgcaataatgcacccggccacaaatttgtcgggtaagacacacttaaggagttcgagttccttagccatggtttgtatctcatgagcctgttcgactacagaacggttgtcagccattttgtagtcatgaaactgctccatgatatacagatcattgctagcatcagtagcaccgaatttagtattcagtgcatcccacaactccttagcgtcggtcatatgcatatacacctcgaccagacgatcgccaagaacgctaagaatgcatcccacaaagagagtagtggcttcctcgaattgcttctgctgttcagcagtaagaactccttcaggtttgccagtactcacccagaagcatttcatagctgtcagccacagagtgaccctgatctgccatctcttaaaatgcacaccggtgaatttatccggcctcagtgcatcgacaaaaccagccatagtaaaatcacagtgcctataataaggtttttggattgttgagattatgggcatataatgatttaatttattccataaataagtcatgacattacagatgaaaactagcatgaacgcatcattagatctacacatgtaaactacgcagaataacatgaacagatcaaatatgcgcaacatattgaacacgtaccgaggtgacgaaaagaccggctgcttggtcgaaacttttcgcaggtgtctacgaaggcacgaaacacgcgagcgaagaggaaggcgagccgtcgcgaacgaacagggagcagtcgcgcgaagcgcttcccaaaaaccttattgccgccttctcccggtgcaggacgtcaaaggcagaggttccggagacctgctctcccgatcgctggtgcacgccggcgagcgggatggagtagtctacgagcgacggcgcagtacagagtaggaggcaaaccctagattgattttcgcatatattgcgtgaagacggcgggtcggtttatatagagaaaggtcgcttgatcagggcgcccgcacgatctctactgcgcgtaaccgaaccggataagtcgcgcgtaacttatccggactccacgccgtttgcacgcatcggatttttcggaacgtttccaaaacaaaaacgaatccgaatttgcagcaaaacaaaactgcaaaaagaggctgcatctgcgcaagggtgaggagccaatttttcggaccattcgacgcgtacgtcgtgcacgcgcgccgcctgccctgcccaggagccaggccaggccaggcgaggcgagcgagcgcgcgcgtgtgtttcccctcttctctccaccacacatgcttcaagtggctaggagggcatcctcccttttaaggaggtccccctctcctagaataagcaaggtggtactaaactccacatgcatgccatcccatgaggtgggcttttgtgattttccaaagaattaatcttcgagtgggctaagacccattcattaattccaacagccagttcatctgtaccacccaaagccggtcctctgccactccggccatatatcctcaccaccttctacctttctcccatcatcacccaacctcaaaatggtaatccatcaatgctcacttgagttcaatggtgcccaccatcaagaccgggactctctgccgttgtcgcaattgatggtgaattttcccataacttctcccttggatgtcaatacaataaccaatgatcatatgactagatttggacaaatttcaggcacttgctggagatggattctaatctcccgggcggataaccacccgtttttttgcatgtcaactgaatgattatgaaaaaaattcaaaaaaaaaagatagattaatatgtaatatatcgcatcacaaacatacaagtttaaattcaacttatacaagttataacaaaaataataaatactctaactacaatattcatagtcaaatttgtgatttttcttcagaaaatcaaatttgaatttgcgtgtttgtggagtaatatattatatattaatctatcttgtcatcttttttaaaaaaatcataatcaattaattgacatataagaaatggatggagatccaccgagtgtttaattaaaagagtttcccgtcacctgaccgatagaaaagctgatatatgagtgatatcagtgatcatcagagtgtaagatcccctcatccagccacaatatccgtttcctacattattgagcattgtgccgcactgtaacaattcatctagagagtatttggcacacatgacggaccaattgactacctcaacatgtagcaatttgcgtggttagacttggtcaaaaccaacggggcatgggtacagaaaaaaggatattaccaatggtcccgatcagaccccttaacttagctgtctatagctagctagtctctttccaagactttcttcttcttttttcttttttttttgaggggctttccaagactttctgcattgcctagagtatgtactttctcttgttctttaatttgctcttcttttcaaaatatgatggagaacactagcacatagtttagtccgccagtgcttgactactccacaaatgtcttcaaatggtgccaccatctgctagtccaaattccctgtggaccttggtatttccgtcttagtgaatttgacgcttttgatgttcttgctcaatcgtactacgtacatattccatgccctgcttatcctacccggccggagtggaattatctactggaaatcactagaggtacaatgttggagttgtttcttaatcatggatagacgatgactcgatccacttgactacaaggattttaaatcctgctgctcacaatttcgtacacataagtgtgcttttagtagcacgatgaaggatttaccgcaagtttccgtccccttgagtaggtgttgataaaagcacactcatgaatgtaagcatgttagtatagtgtacgtcgccatgtaaggaaggaaaataatggaagttatctacaaattaaattattgtctcttctttagtcatctactccctcaatcctataatataatgtattttgacttttttcttgcactgtttggccattcgttttattaaaaaaatttagaattattatttattttatttgtgatttactttattatccaaagtactttaagcacaatttttcgttttttatatttgcacaaattatttgaataagacgagtgtgttaccgaccaaatttggtaaaaccatagatcggattcaaaaccgcattaacagagtggtcaaacagtgcaagcaaaaggttaaaatttcttatattatgggatggaggggatggagggagtagttacaatatgttgaaagcaactaacgatgacaacaaaaagatagattagtatgtgtgtgtatatatgatatatcgtcaaccttatcatatatacgaaatgaacacccccgtacgtcctaattgtgacgactagacgtacatgcatgatcatggccgatcaacattgccactgtcgttgcaccaccgccacagaagggttggaaaacatggaagacgtcgacttggaggagcagttggcgccaccgccgccgtcgccgctgccgtcgtcggcagagccgctccatgggctgtgtaggaagccaggagcaggcagtcaccgggcgctcgtcgccacgccggtgcgcgccctatggatggtggttctcatggtcggcctcctcttcaccgtgcacctgctggtgcacgacgtcaggacgttcgtgctcctcgtcgccgagtcgttctgcatcttcttcgtcatgtccggcgtggcggcgtgcgagagaaggcagcacgacgcctctgggggtgcctgccgcgggtttagcacggtggcagaggtggcgctgtggtcgttcgccatggcgctcacggtgacgatgacgttctgggtggcggctggcatgtctctgccggctgtggcagcactctacttgctttcgctgctagttgtctccgcgtgcttcgctgttcttcttggcgcttgattggttaggttgatccttgtgcatggcacctgctcaatttgatctgggagggatcgactttcatcaatattttgagttcattctagttttccatccctgtgctttgcttttgacgcgatagagtggagatggattctaatagctcgagtggatgtccatccgtttattgcatgtcaactacttaattacgaaaaattttcaaaaaaattgacaacatagattaatatgtagtatatcactctacaaacatgtaagttcaaattcagcttctacaagttgtaacaaaaataacaaatttaattgtaaatatacatatagtaatttgagttttgtttattatttttgttacaatttgtagaagttaaattttaacttgcatgtttgtgtattaatatattacatattgatctatcttgttcttctttttttcaatttttttcataccatttaaatgacatgcaataaatgggtagacgttcactcgagctgttaaacagtttcccgcgataaagttaattaaatgcatgaacaagttatatactgggagccggtggtctggttagatgtggtagcgctatgaacgaagcatataatagtcggcagggttaggtcggggtgagaggtcgactcgttaagataggaggtggtagatccagcagtacgtggctctaaagatgggaaggcaatgcactgtggggtgtctagccgggaaagaagaaagagcatatcagagaatgtgaagtgaaggaaggaaagggcatagaagcctgataagcctcgtcgacgtcaaagaggcactggaggagggacgaccctagtggtgagggaattgtgaatagaggggtgacaatttccacgttggggccatgtccccaaaggatatccgccccaatgcggccaggacaggcggaggtttctacccacgggtgagtggggacagggcagcatttcacctgtggccattgggaaatcctatgaggccacaaaatttaaatcacatgaaaatgacccattacaaacaagccaattagagccaatataacgaagggctagactaaccttgtctcaatccatccatccagccaccactgttgtggccccaaactacgcagcatcaggtgtcagcgttccctccccatctcgcttaagcttctttgtcttgcaactcattttcgagcatatgtcacaccacgtcggcatgccggcaagccgctaggtgccagaatggtgttccgccgaccgcatgtctccattttgtagctcgccgctggctgttcccacctccccacgctctctctcctctccctccggctgccggaagctaccgctcgctcgggggtgcagggacccagaagggacggggcagagattgatttcgctccattcttcacttcaagaccagggccaggggcattcttatccaacccgcctccacccccgccctattgccatccctaatcgggaaggaatgaagcgtcgacagcggcgtaagaattctttccataaaaagatctactatgttcctattgagcgttaagaggtaacgctttatataaaacggacggctgattctatagcactggacattcacgagttcagatatgcaacatgaaaaattttgaacttcaatagtattgaaaacttatttcgttcctctatttagtgttccgtcaataacatagcatttcgacaataacgccgttacccttcccagcttacccatctttcttcttcctctcctctctcttccaagtgcacatgcaacagctagcttcttccaataataatcttaatccttcagtagcactaacttcaagaatttctagagacaggaaaacccagaaacaaaacttagatgtttggggctgtcccaagcagggcgtaaataagtaaaatgtgttgatgtagacttggagcaaattgtacactgcagggttaagatatttgtttcatttctattaagaaatggaatccagctttgccctttaatttgatttcaaaaaactgcatggttattagactatgccaattgatttctttctcatagtgctcaaataaatagaaaagcaaatcctgcagaatctaataatataaatcatcactctttgctagagcagcgtgcgcatgcttccaaagcaaatgggcctatcgctattgaagttgatattttccatttcaaccacaaacgtgagaaatttgattatggatttcttctttggtgttaaggcaaaccatcacccattggcagagcaacgagggtatccatcaaaatccaagatattgctccaaaagttcagctgcaatgatataatgaatttgtagaacgcatgcaccaaatgaaactaaattcatgtagtcattcttaaatttaacaagtcgagtgaccgtgaacactaaattcatgtagtcattcttaaatttaacaagtcgagtgaccgtgaacacttccttgatccgatggagtcacctgctaaagctcttcttattatgctattgaagtgtttaggtggaaggatggtgtcggagggatgagccccggtagatgtggggaaccatgacccggtagatgctctagggcatcttggtgtgctcgcagctgttcagggaacacataattatagatgttcgggccttctactggataatagttctagtcatgcggtcttactatttcatcaagtaaacaagctctcgagcaatacatagattttgatgagatatgagagtcaactttttctacagagttctagctacgcctttataccctaccacctctcttttgtactctctgctaaaagatattttaaactgtttacaatcatgagcatcatttatgtctttcaagccatgtgcctatgtagcggctgaagcaactatctatgagacgtcacattatgcccacttgcatagtcattgtgatttctaaagcgatagtaaaaacctaacattggagatatgataatcatgccacaacatggcaatgcaaaagcttgatagaatccataattaatgcgatggataggctcagtagccggtgcaccacatctgtggagacgtgggacccataggacacgaccccatttttagactggtgggagcaccaccatagcccttcccaggatgtcgagggttcctatggcaagccacgtggaatgaaggttcttttccctccttgaagtagaacacccgtctagctccgaggaggggtgaaggtgacctacctgatccaactagccatgctcaaaacacagcatacgtggttgttcatagatagaccaaacttcgagaggctcatctctcacagagcccaatgttagttctcaagtagccagccaactggtcccgcacacccacgaacatgccaccactactagaaaaatcatttgttgccacaaaaaaaatcgtggcatcaatactaaaattgtggcaatagatgcatgttgccacaattataaaatcgttgctagccgtggtaataaacagcgtggtaataggttattgcaatgattttgattttgtggtaataaatttagatgttgccacggaatggatgtggcaaaaagtcatattgcaacacttcacatcgttgtactaaaaattattgccaccactccatatatagcattagttttacgtaccaaattcaaagttcaaatattagtctatcatcctatctatttatctacttttttttattttgtgtcttggctaggatttgaacccaagacctatccttcacgcgcactctcctttaccaactcacatacgcatcaattctgttggaaaatgcatattgttccatttaagcctagctaactgagatttgaatcatagatttgaatatctaaaagatttcaaatgaaaaagttatcacctataaaattgtagatctcgtcgagacctataatttccatataaaatttgtctcaatccgtgtcaaaatgaaaaaattaagttaaattatgagatgacaatttttttattgcaacgaatttgttgatcgtggcaacaaaaaatagtgaaatgtaccatgtactatataaattgccacaaaattaaaaattgtagcgatagaacatgttttttacaacagtacgattttttgtggcaatatctcattttctattgcaacaaaagtactaaataaaacaacgattgtagatcgttgcaataaaaaataattatttgccaccgaaaaattatcattgcaatagtataatatattgctacgaattattttttgttgtaataatttggtggcaatagctcaattatcttgtagtgcacgtcgtcatatccaagtagctcttgtcccccgccatggttctcgagtgtttcgacctagtggtggagacaaggggacacgactagtggccctccaaaagttttttaacacatataatcacctcactaattaggtaattaaccaaagtaagtagcgtattaggccctttccgtatctaaatcttagttccgcctctgtttcagccttatcgtggttccgtggtttgtgcaacaaggaggcacgtggaccctctcacaaggctatgggttaatgcccttcctaggaaagcgctggcccactgtcagcacaatgtaatgcccttcctttgaaacgaagtgatctggccaagtagggaccaccttggctaacaggctgacagtagcccctaggaccacatcaaggcgaggagttactgtgagtgcatgctatccggtcaaggtgtcgcatcctgcgcaccacgtgccattgttaccactttttcagagggatttgtggattcctaccaacaaatacctaagacagatttcttcttccttccgttccccataggcaaaaccctaaattcacaagctccctaaaacctaagtctcgaatcaattcggccgatcttcctacctcttgatgccgtggctgcaaggttgaggagttacgcaacatagcacccccctcccctcttgccgagtccagctccgcaacaactaccacgtgcatccccagcccaaagaggtcatcatcttctcattgttccttctagtggggcttgtttccccgtttttgaattcttgctggcgatcctagtttactacaagatccagcttctccacctgacatcaaactccactgtcatcctcatgacattcatatacttgtttgagatgtttgtgggagtggcatagagcatggctacgttttaacagttcttcatcctatggtggctaccgaactcgtcgttgattgggtgttgctacttccagctccgagacaataccattgactggtacatctctgcgccaatcaactccaagtgggagaacttgcatcaaaattggttgcacctaatttggtgaagtgccctggtgcttcaagttgttgaccttgcacgctatcacccaagattcgtggaaggacctccagtcgttgacacactccagagcatcggattgatcggacccatggtcctaggaaacgcacttcgtcgttggctcagtatcttgcgcaagacaaaatacttggcagcatacaccgcacccacgtcgacaacagtgacaacatccccccttctcatgtttttgtaaattgggatgggctattgacaccgatgtccgtcgacaccgtcacactatcacctaggttgcgccccttgtgagcttgtgagcaggtcaccatcatcagggtaagttttattgttaaaaacctattgaccttcatggtctttttgatcactaactgaaaatttcatgtgcaagggcgtccaattctagatgcctttgggccagcccatcgggtccactacatgtcgatttctatcctggaggccttcactggtcccgccacctcttcccctactactgggcacttaacgaccgtcaacaacacccccacacttatcctttactcgttcctaagtaaagctaatagaacttagtagagcaaagacttcctgtaatgatgcaaacatacaaagtattccaagccatacttgtacctgtgaacttttgaagtttctaccgtatcatcttgggtggttgaagaatagaacaaccttgattcaatttgtctttacttcctctacttgaattaccttggggttttcgtcttgctcataaaaatataactttacctttactcctcaattgactctctcataacactcattgtatttaatcctcaccaaggaattgatgttgtcttttgttatcctacatttctttatgtagagctcagggtagagaataagaatggcatatttgcatcaaacattttgtaaagtcaaaaagtagattcaagaagaatactaatcatacaaccatgatcaagcttctgcacatgtgtgtggaaaggaatatgtatgtgcaaggatgggaaaaatggaatgatgactcatttttgtatgattctcctccctatactttatttagagaacctagctattttatatatcttttttttttatcatgctcgagaatattttgtctccttctcatatgagcatttgattttctaacaagagtctcaaccatttgaccaaactcaaaatgatataagcagcatatgtataaagtttataatgaagattgacatatggctttggtaggaataaaacattaattaggagaaggtaaaattatatcttttttttataaaattccaaagggttcaatcagaagaaagcaagggtcattttaacaggtgacctctcatttaccaatcacttagatggcatgtgttcctaatgatatatgttcacaagcacaaggtatcatgcgaggaataaaagagtatgcaagacatttgcaggcaagttatatactctagctagaatatctaagctcattttaaaagttgagtttaattttcagatgtgtccatgataggaattatcaaactcaaaagttagggagatgagaggataaacatgcaaacacactcgtgggggtttgcaccgggagattgtggtcttgcgagatgcatggcatccttggaaacccgtctccaagaaagtttggtggaggcagtcgtccttggtctgaccaacgatgggcaagaggcctggctgccatcccaggctgccaacatcaggaatgagcctctactcagggtatcctttgaggatatttccaacatgcctaggtcgctctcgatgcacttggagcacaacctggtttctcgcaagatgatacggatgagaagtatgccatgtcgttcgggagggtgaccgaggctttagagaggattccggccaccatggactaaaataaggagtgtcgctttgtgactgaggctgcgatggaatacattttcgctggttactttagccgcaacttggacttcaacttctagctagtggaggagggtatccaggtagggagccaggtggtacatttctatgctcaggcgatagtcaaagatctcaacattgggccaacctccaccctaccatgcatgcaccacaccgctagagtagaagatccaagagtgacaagtggttaagcccttcaatagatcataatcaacatttaagacctatctcctttcatggtaatgtctttgtacaaggattttacaataggatacatgtataaaactcccactcccactccccctccaatctctcatgtcaaaccccacctccgcccccctctcggtgcagggcacctttcgtgcagtttcatccccatctctcctcctcaccagatgatgtggtgtgttggctacgacgagcaggacagctctgacatgaagggaggcggctgaggtggcttcaagtctaggcagctttgacggccttggctgcgatgacaagtggtcatgacggcttcgatgttgccggctatggcggtcggctataggggaaagtgcccagtacagctatggcgacctcagatgtggccttgagtggttgggacaacttcggttgtgtggctacgctgatccggatcttgttgcgtggcaatgtggatggcattggtgttccctccgatgtatcgacccggttggccattatcgtcgcagccatgcttctatgtaagtagcgacatgggtgacgcctgtgggcaccacataccttcctggaggcgatgttgggatgcccaatctctcatttgtgtcatgggtagactctccgggtgaaaaccttgttttggatgtccagaatagtgatggattcattatgtcacaacttcttgaagacatcgtattggaggttctctgatggtgggatattccagtggcgttgtccccatcggacgggttcgatggcaaaggtgctagtaagatctggtgaatgagaaatctacggctcagatactatctgatgttttattccactttggttcaacattggttagtcgatggtaatataggagtgaaattcaaccgacaaaggattggttgctggttttcggatagtctgcttttctggtttgaggaagacaagaaatacgtataacttgtaatccgttggtagagacaacggttatgcataccctaaccaactatagatatagaattatgtctttaaggtggtattcttggtagttttctactacctccgtttcaggttataagactttctaccattgcccacattcatataaatgttaatgaatctaggcacacatatatgtctaaattcattaacatatatatgaatattggtaatgttagaaagtcttataatatgaaacagaggaagtagtttataatcaagctataattttgtaattcgcaattattcgacctgcaaacacataataattgattgcaacttctacgaagtaaaggccagaatgaattccattatgttaaaaaacatatttgcaaaacagggcatctgaccattgttccatgcattttgccatatacctatagtaaagttcgtcacacatttgaatctatggcgtggaagagaattttatttgatgagcaattaacgaaaggacaacacctatgactagaaaagttttgctatatgcctaattgtactgaacatacggttgctagctagaatgtttctaaatgatttcgaggctttgagctatatacatcttcaaatgaattgaagtcccaatttcagtatatgctaaatacttgatgcatgtccagagaagaatcacatggacggtgttaccttttctattcataaatgtacacctaaatcttcctgcttctcttgtatttgtatgtgttgaacttcaatctcaccagaaactgaattggtggggaatggatctgaaaggttaacttttctgaaagccaagtagatcagagcagcaatataggctgccatgaaagggaaaacaaggctgctaattattgcattaacaacccttggaaggtcgctatgaacaagccaagcgacaaagctagtacagaagaaataaatattgattccaataatcaccaatgacagtatccacgcgattcggataatctacataaaagagtaaaattcccaagagttaagaagaatgagttcaatttgatgacaaatgtatgccattttaagacaacacagggaataatgaaaactatggtgttattgaggaagtaaaagttattctatgcaataatgcaaattatgttgaagatttccgattatctagtaattaaatggaaataattcttcaagtaactgtgattcatttgaagtaaaaccattgtctaaaaatatggatgcagaatataataacacaacaagaaacgttactaccttgaaattactctcactctagaatttgaaccataattatatactccaatgtttactgaaacaccatgctatgaggtaattttacaaattgaaagctctaacatagtaacatgcattcgtgatcagcctacagttctagttgagatttcaaatctcatatattcactcttacaatgggatatatgtaacgcccatgttccaacatgcacatgaacctagacttgatacaccagaactctacacatggatagccatatagtagttcttagactatcataacaaagtaattaaattatatgttgctacatttggtccctagttgatatagtgtttcattctaagagtataactatgaaagaattacccataaatcattttgatatgaatgaaagacatagatttgcaaatatatttcaaccatagagtatcagacagggaagaaccaacaatcaccactgtctaccaactccattttatgcaaataaagatatacctggctggaactagaatctaacattattttttctttctgttgccatctatacactagctcgtatttgcaccccttttctaaaaagcattggcatgttattaagtggaaaaatatattatatatatatgagagatgctaattattatttatccaatgattttatggtttacatgttggcacataaaaatagcagcagggacatcaatttatcaataagagaagctggggaaatattgtgtgtcaaactcaatgcaaagtggacactgaggaaatgggggtatgtgcacaaaagaaaaatgttcatgaaaaggggactatcatgcttatagcttctatttacaactgtttagaaaagaggaaaagagtctgctaattagtgttttttcccagcacaaactactttagagttgtatagttaccagtggtaagtaaggcgtataagttatttacatatgtacagcaatagctggtcacaaaagtgaaatgaattgtgtaagtggcagtggggaggttgaagaaatttggttggtcaaggccaacccactgcactgtattcctttccatgagtgcttatttgcccttggcacattcacatgttgagcttggacccacatgtaactgagagaatgagggacgtgcatatcaacttttaggggcaaataaggttctaacattttggttttttattgttccatctgtaacttttagatgccctggtaagagtgtatcatacaataatttgtagtgtacgatcctacatacatctagcacaaaaatatcttttttcttaatttacaattatccgctaacatacataagggcatttagatttctcgtaaaagatatttttcatgttatatatatatcataaattctctaggacataattatacatacaaactaaatgaaagttatgtaatggaaatggactatgatcgtgtccaaaatgactagtataaccaaacagatagagtatgtcataaacaaattgaatagtaaaaactgttttagcaagcttacagatgttgcattcttgtatggtcctatatttgtgcagctgctactgaatttaatgagtggaattagagcaaacggcagcacaaatgatagtacaatctgcatcacaaaaaatcacattacagaacatatcataattattacactcgtttaatctatggattttaaagttcctattagtgaaatataatatgttttattcaacattgtttgaatttttgtgtcattgtgcctatacctagcttatgttagttgataagaagagattatcaagagaaattaccgcagctatgttgataattcgatgcactcgtaaagtaccaccaatgctgcaaattatcaaactaggtaataaggtgaaacaaggagcaacaagatatatgatgcactttctcattccggagaagccctgtaacaacatttggtaaatcttgcatgaagaaatttagggaggaaaaaaatacagaaaatccccatttggatactgatatgaaactagagcttggccagatttctatctattaccagttgtaactaaatattttaacacagaagttacatttcaatttttctaagcaaagttacatttcaaattcagtaggcatgcaattagctcgaaatattatttggtaatattgagatgatacatcttctgaaggtatgtactactaggtttatccttgaggccctaatctaatctactccagtaattaggtaaatgtacctgcatgatgtattggccagcataactcgtagccaccatgcagctctgtccagaaactaataaggccacaccatacacagttgaacttgattttcccaaaatattctgcatcacaaacatatcaaagatagagaatgaggaagaactagtaaaatggtacactttactagtttaggtttccgtttatataattttgtggcctggtgtttccttttagttgtgaaacatgtatacagtaagattactgcatgtattgctacacgttcagtattgctatttagctccacaatactaaaatactgtcagaagtcagaaccccctaaggcttatagttttcaaatgtaaggtcaatgacatcctaaaagtgttctattgaatacaaaccttgagtagtacataagttgaattcaatgttagactgctgcacgtgcttgtgtcggcaaatgagagattgttggcacatatagtaccagatattgatacaatagcgacatttacaagtagtgcaatgaacagagctaatgcattctcaagcaagaagaatgtagaagcatcctgcaagaaagtgaattcaaattatattacgaagaaataatgactgtttgaacagaaatataaagagctagaaaaagggaaaaaaaaacctccttttgaggattgtcatagactttctatagaatactgaaatactgaaattattaggtagagttcattgtacttaaaaatagagtttttcatgttatatatgcttattcattcatggttgaaattcctcaataataacatgaaagtaaacgaaaacttttgttcaaatatgctatgtctcatacgaaaatgaataatctagaggtactggtatagaattatagcccatatactaaggggcactggacagacaaaatcaacatcagtttagagaaaaaagtaaaaagaagtagcctattccagaggttaaaaattaattttaattttaacataaaaaatatccttttaccttgcgtcctttggaagtatatggcatttttctcgttagcaccaaagaagaatgtaggaagagattatgcctaatgttataaaagaacagagcaagttagtgaaatataccttttgctttacatctgacggggtagccacaataataccttttaaagagtgtgaaagacctttcaaaggttttttttttatataacagatatataacttttaaattagtaaaacctgaattataatcgttaactaattgaaaaaaaaatgaaaataatgatgtacaactaaaaagtagtggcaatgaaaaagaaaattcatttgaattttcagagacaaaagtataatcatagttctaagataatcattaaaatcatttaatgtgggagtgatacttacggaacaacaagagaaccaaacatagcaaccgcatctgaagtagaataatcccctttgggccttgggataaaaagcccctcaattaccccaccagcaggaggattaactttgccaagttccataaaaaagcaagtagccatcaccaacataagaactgatatagtgaactccattttccgagcctacaaattaaaaggatgatatgcatgtcaatctgctggctgatacaatctaaaacatattttacctttcataatgttaataaggtggaaataatgtacaaaaactatataccaaaaaaaaaaaatgtgtgatctctctctcatcgaaattcccattcattcaactatctgaaatgaatgccagtattatttatctcagatagtatatagttatttcggacagtagaatgaatgggaatattttgtatatattttttagcggaaattattttaagtacaattttgcatattccattagtgaatgtccacttctcacacataccatttatttttgtgagatcaggtttatgccacttctatcaagccacattttgcttatgccatggaggttctggctgattcagtcaaaaaccattgtctgtcaactgactattttgccactgtcttctgcagtgtattttctccctcgtcttctttcacattctctacgctcacatcagctttctctacctccacctccaccaccagtcaacgctgacaagttcctccatatttggatgcttcacagcacaatggcgttatcctccattttctccatccttcaaggaaaaggtcctggctaatgcaggtggagagggaggaagcagaagattcacggagggcagtgatagtgcaggctgatgaatgtggggaaatgtggcttgatggaagagtagaatcaacaagaagtcacaagaattagtgacaaatatgaaaagtggacattcaccgttgacaaaattttcctttacttttttcctgaaaatatcatatttagtgagctccttaattgtgtttttttattgagtaaattacactagcggtccttaaacttgtaacgaggtttcacttaggttcacgaacttgcaaaacgagcatcgagatctctaaacttagtttaatgtatcatcccggtctaaagcctcgtttgaccgtggtcttgcctacgtggcatgccacgtggacgatgacatgtatttttttttattttttctcccttcttccttctttttttctcccttctgccgctgacagcctgtcagggcctcactactctcccctcctctctatcctctctcttcggccaattaagtgagaccagtgttgtggataacggttggtacggctgtatattcggacgtcaaaatggtggcgctgacctctccgtcacgttttagcaaaacggtgtacattagtcatttcaggatgtataatcaccatcattagcgactaatcggccgtatccgactaatcggccgaataaacgggcctaatcacgtgacaaggcaagcccagccaggccacgataactatactggcccattagttatgtaacctagcactatatagctaacagaacgtcgtttgcaatcccaaaatcctcgcagctcattcctaccgctacaacctgcaagtctatggttagttcttttcatctaaacctctttcaaatccaatctaccatatttttatgtcgagttaatgtcatgttatccttatttttatttaagaatagtaggtatatatgtagttatatgcatttatctgtcaaaaataataagctattatgatttatgagttatgtacatatatttgtccaaaacattaaatttcggtcaaattccgattactcatctaatgatatgaaacttgcacttgatgttgaacccttggaatttataaaggaaaataaaattactttgcatactcctcaatgttgttcctttgctaccaaaggcatatgtcaatcttaatgaccaaaccttatacatatgctgcatgctatcattttgagttttgctaaatggttgggacccttgttagattattttaatat

SEQ ID NO: 4569 - DNA, 23100 bp, Oryza sativa
tgtttttgcatataacctaggtctactttcttgccattggaaatgcccttggaaggataaggggtttgattagaaaaaactgatctataagttccaagatctcaccatgcacataaatgcattacatcattctttctgccttattagtatgagaactctactaatatttgtccagtgtactagtatttgtctagtggagactttacaaaattttccatatgcttgattgactcaacaaagcttaatcattatgcccacactttggttgtatttaatcattatgcccacactttggtttcattattacttatgttttgactagcaaaggtgatcaaaaagtaaggaagtgaaagcggagcagtggaggccaccatcccttctctgcaccacatcaacttggcatggcagattcaatgcttagcacggttccttcatggctccccgtagggtaagtgacttaactttccgtcgttcataattttgacgtagttgtatgcgtggggatcattttggttgatagatacatacattgatagatacatactattgtgttcatccacaggatggaccccttaactacatatttgttggaaatcaaactagccagggatcgaaaaaatgctagggtggaatatgattggtttattttcagtaaagtgatagactcaaatgcgatgtgctacaaagactttattgatgatattgcgaagtcatatccatgggggccaaatgaaactgtcacaattggctacgtggatatggttcataaaattactcatcatgtcacaactgaccaggatatgcttacaatgtttgaaaagtttgttgatatcaaggtgattccaatgattattcgcatacatggtattaatgaaagtattgatgagttagaccacactcttgttaaagcaagcgcatgtgttcccgatactccttctttggcaaccccatctcaagtggatttcagccaacctagcagcagcactcttccttctcatgtcattgtgccatcagacacatacttagtaaactcatttcctatggctgagcatgttggtgttgatgaggaaggcatatacttagatgaggaggaggctgttgttggtcatgctgatgaaactagagatgaaggggctgtcaatgaagtatccgaggatgaatcttgggctacatctgaggatgaatctgaggatgcatctgaggatgatggtgtcaatgaatccgaggatgagtcaatggcatcagatgggatgcctgaacatattcctattgcaacttatgacaaaaatgacccaccaatgatcgtaggcagcgtatatccaaacattaatgaatttagattggcaatagcacaacatgcaataaaaaaggagtttgaatataacatcatccgaagtgaaccagggcaatttactgcaagttgtgctgctaaaggctgcaaatggaggattcatgcatccgtggttgctgatggtgtcactatgatggtatgtttttaatttaaatcagcatgcattctttaagtatattgtcatatgcatggagcccatacttctatgagaaacatatggcagccatacaagaagttaaaccagaagcagtagcataccttaagaagtatcacaaaaggctatggagtaggagtcagttctgtacaatttgcaaggttgattatgtgacaaataaccttgcagaaagcttcaacaacttggtgaaagattggaaagcactacatttatatgacttcttggagaggattcggcggtggttgttggtgaaatgggataagaggcaaagaataggaaagaaattcgaaggctgcattctacctcatattgtcaaggaattgaatgaaaaaagtagagatttagacatggtggtcacaaggaatggagactttgaggcagaaattgaggtcaagggaggtagtgggtttagacatgttgtgaatttggagcacaaaacatgtacatgtagggaattccagatctcagggaagccttgtatccatgctatagcattcatcacatcaattagaggaaggcttgcagattatgtggatgattgctttagtgtgcatcgattcagggcagcatatgagaaattgatcccttcattacctgacaaggcacaatggccaaaagctgatcatgggtttttcttggcaccacccattctgaagaaatcagctgggagaccaagaactatgaggtacaaaggatggactgagaaaggaagcaaaaggagtaggaggcacaaatgcccaatttgcaagagttatggccatcattggcacaattgcaaagagggtgatccagaggaagtagcagcaatgcttgctgaaaggtacatatcattgcaagtcttttattcattttagttggtggttgcaatttaggcagctgtgtaagttgataaatatatttcatgacattccatccttgtagtactaaacattataattaatggataagattagaaagtaatgcggtggttcgatttaataacctaaacacttgtgtatatttgtctcacaaatttccattctatttctaacaagccttatgacatatattttctcttgttcatagagggccaccaaagaagagaacgaagaaaactaatgaagcaacctcagagactagtatcatggctgctccaatagttacaccaataatggcataccctcctaggttagcctatcttctttatttcattctacattggatttagatcaattagttacataacaatttatttttcacagtcaaaactttaatttcaccgaggacaataggacattgaacaatagctcaggttcaagtatatcaattaggtaagtaattagatcaattatgtcaatttgctggtattatgttgttctatgcaatatattcacaattctctttttcagatcaagatcacttactggctccaaccaacctgagccatctaacatgattgtagccttgccatgtctgggggaggaaacacctacagttgcaccaaaaatgaccaagagcaagacaaagggaaagtcatcatgttctagtactcctggtagcccagctatgagcacaaggagcaaaaataagagtcctgcaatgggcactaggagcaaaagaaaacttatggactgaatcatatggcttgctaattaggttttattttggtactgtccatttctcttgtggaggctgatggattttgttgttgtgatgccctgcaaagtggtctagtcatagttgacatattttgctattgtaaggattgcttcctcatgatgtaatgatgcactgttatggaccttatgccattatgctcatgatatattgcgtagctaatttggtttgttggttgcaccattttgtttgaaatggaaagttggtttggttcctgcactattgggtatggaaatgaaattgtgggtgcgcatgatatgaactgttatgtatggatgatggaaagattatgttctgtgcatgatattgtgtgttctgtatgaatatctctattattatatatgatgctattgatgctcttattttaccataatcaatttcttgtacagaggaaccaatttcttctatagagaaaactgatgactgtacagacagtcagcttttcctgatctattatttttccaaacaaaaagttcattatattgcatttttttcagtgccacaataaatttgttatacgctcattatttagtctcataaaatacacatattgttcagttaacattttttcaattttttcaatctagctgccactcctacatctacaaggggattttagacatttggaaccacacataacgtgaaaatgaaggaaacctaacgggaggggcatggaagggatcacagcgaaatttcaggggtacacaggggattggataaaattcgggggtatagaagggattaggtgagttttggataaaattcgggggtatagaagggattaggtgagttttcatgggcacacaggggattttctctatattttagcattgcatttacatggaattagaatgaggagtattggaagaaggaagacggcggcggagcatggggcagcgtcgaggaagacaacagcaggtacattgatttctgcccatgctcccctactgcttgataaaatgattcaatttactgctacttactcattggtacttgtaatactaccatgaaagaccaagaattctgatcgtttttattttctgatacagttaatgatttatactaaatttcatgtgttccttttgacactggattgacactatttctatgatccttgtgtggcctatgagcacctttccgtggcttttttaataattagaattgtataaaccaaaatgaatgttctttttatctatactaattcgagtgtaccatttagtcaaaatgttatcactatagtaatctctggttgccgttgtattcaccatattgtagtatcgaaattcttagtggtctcgaggggcatcatatttgtgtaatgtgaactcttcccaagacaatggaaacggtatttgttgattccagttcgcactctggtaggtgttcacactaactcgatcaaatgaaatgtacgcattagtactacaacaaactattattagcttttcaatctctggatgttgctagggctgtatcctagacaggttctgactaaaccattcaggttttagcccttggcatcttccaagccatttgctttcacatattcagaattgactgacattcatttattgttacaactaatttcggtgatcagctttcctggaaaatatttgctgaaaatatatgtatcagtaccaaaatgtcacatcttaattgctgaaaacatatgtacaataaccaaatatatgtaacagaattgcatattttcagatattcacatatctactttattctgtcaatagctgaaaatatgggaaacatcgccaaaatctaattgagttgtcaccagcacatacattatccgtgtcaattagcaataccattcaatttaaagatttgtacagtacttgattaatgaaatcttgaagttacttgctcatatgagtcactaaagttctgctattttgatctctttgaggtctacctccatgagatttatgctaaccatgggctattgtattcctctctgagtctctataatgcagttctacaaataagaatatgagaaactgatgacatatttatgtgtagtgtcctgttgtcctatagggcattcatatagagcttttgaatttctgttaatggaggcagaaaccaaaatgagaagattgtaatatgaatttcttccttgcaatttgtttctatgtagtagaatatggaagtaagattcacttcaaacttttaaataatttagtaaactttcttgcaggtaaacaagcattttgatagattctatagctggtgaggcatttattttcgtagtctacatgataatttgatcatgcacatgagttgtgcccttgatatgaacacctgatagagcccgagataacctgtgatggccattgatctgtgccccttggcctattgcagtggacaatatcgttggaagctctacaccaaatccatttgcatgaacaggtgatacacaccaaatccccttggcctacccagtgacatgcactggaatcttagcaactgtctgatcgttattaattcaattcatcactcgcattctataactctgtaacatcatgacaacttgggctttgatgattggggagaccaatagttgtcttaatagaagaaaaatcaccatcaccactaaatccattttcattgcactcaggcgtgcacaaatgtatagagatatggctgcaagtgaagggagagatcaatttgttgtagtttaggcttcaagtacaacaaagcactgccttataatctattttggtgttcacatttcaggaatcatataaaagtattttaaattatgtataaaaagatcagattgtatgacggtagccactgtgctattattaaagatgtcaattcaaatataatttctctggaatttttcctatgctaaatgaattatctggaattagatccaaagtcttggagcaagaaacacaaggtttgcttctccagcagtgcactgcatcttatattggcactctagaaatacactgtgctgttttttttatagacctatacaaattgtcatcctaccatggtctatgaaactctatttttatctgtataatttgtatggagtgcagtgcatagaaaataccttatttattgttctattttcatatgtatatatattgcgaaaacgtgtcttgcacgtgcacgataactagttccgtataaacaactcagcgcagttacctttattttttggcccaaaactacctagtttgaatagtggaaggcataagaatgcttaagctccatatgcagcatgtcatgtagtttctgttttgttattaatgttaccgtttaccgacgactatagtcacaaatggatattcatcttgcctgtaccagcatatagagaatgttcgattggtagaagtaatgaattgtctgctttgtttactccaataaaagtgtcttccaattccaaagaatctatgctgtcagtgctcgtcatgacaagaacaaggcacaaagtcgatgcatgactgcggcatcagaatgtaacattattactattattatttattactaagaggagcccacctctcttgtccagattttggcttccaatttcgctctccgtaaggtccaagttaggctattttcgtttgcattgtttgtagcgatggcaagcgattgagtccaaggatgtttgctttctttgttccttgtccgttggaacgagtgacaaacgaggctctgttggcggatccgccctcgtgctcgtgcgcgcaatcgtgttagtcctataagaacgtacggcgcgccattgagcatataattaatctaaactgctactaattcttctccgttaatcgccgaaagcaagcaaaagttttgaacgatatatcactgcatctgcatggcgaacactacattattgtactactcgaaattgctcgtgaggtgctcggcctacgagaaagatggtagcggcggcggccgggtgagggtgaacggcgcggctcaccgcgtgccgctccaggtcggggctgcgctggagacgaaaatcaacaggtcgctggccgggctgatgaggccgccggtgctgtcacagccgccgacggaggaggaggccgagggcaggaggagccagcggcagaacatcccgagtgagaagcagacggtggacccgttccggcaggcggtgatcgtggaggggggcgtgcggtaccggcagacggtggtggtgcggtcgtacgaggtcgggccggacaggacggcgacgctcgagacggtgctcaacctcctccaggagacggcgctcaaccacgtgtggatgtcgggcctcctcggcgacggcttcggcgccacgcacgccatgatcacgaacaacctcatctgggtcgtctccaggatgcacgtccaagtcgaccactaccccatctggtatattatattagtatttgtgttcgtccatggcgtcctgttcgttcagagaggccggggcaagaaaatttatgctcatcagacagaggttggttgcaggggagaggtgctggagatcgacacgtgggtaggctcgtcggggaagaacggcatgcggcgcgactggctcgtccgcggccgcagctccggcgccatcttcgtccgagcaaccaggtatgtcttctagagatcatccgccagtcttaataattagttatactagaaaatatgggtgccagttggcgcgccatttctaatagtagtctgtttagggtaatgtgaatattttaatgtgttttcattttttcagttagccaataacattgtttcgacttaaaatattcctcaactttttcattgatttttataccattcaattagattgacttacgaatacttgttgatttgaccggttgatcgtgagtagataaacttttagcgttattttttacataacatcataacagatacatttaaatatattaaaaatgtaataatacaacttggatgctacaaaatttgattgtttaaattagtgttgatcaaagctcagcacttcaaagtaaaaaccaacaagtattaaagtccaaagtgttttgtgtttttacccttttctgatttttctattggtgatcattagtttgtgcactgtttcctggaattttttttgctctttattgagtggattttataataattggctatagcttactggacgtaaaagataggatttattccattataaaaaaccctttcctgatttttttagatgcccttgattttaggtgagccacgctttcgctagatgcatggcttgagagtgtaatcattttatactgagtttactttattatttaacctagggattgaagatttatttgataagttatagctgccatgtagtaaagttagctggtggtaaaaaccatcagcttaagaaggatattattacacgtgactttactaaaataatatgctttgtatttacatacaagctcttagaattataatttgtaggattaaaatataaactttttatctcaacttttgctttgaattttgttttactttcaactacttataatttgacatatggttattcaattacatggtagatatgcgctcgtagagcattatgcgcacacacaccgcaatcatatatccgttctggtaaaaaagatggagaccacatcaaatacctaaacccaatgattcttattaaaaatgtactccctccgttccaaaaaaagacaaaccctgggtttccgtgtccaacgtttgaccgtccgtcttatatgaaatttttttataattagtgttttcattgttgttagatgataaaacatgattaatactttatgcatgatttgtctttttaatttttttcataattttttttaaataagatggattgtcaaacgttggacacggaaaccagggttgtcttttttttgggagggagtactcaagtaccagggtttgaacctgtgaagtgaattcttgcactcatggtctctccaacgtcataccacctgttcttctccattttaacatttgattttgctatttatttatttttcaatttctagaaacatagggcattaacagggttaaattactttgcctaaaaacatattttcggtaagctcatgcaaagtaattttcagtaattttccccgcctgtatagcaacaaccacgaagcatcgaacatagggcattaacagcattaacagggttaccgagcaaaatttaccgaaaatttaaatatttattggtattttctttgaacttggttgatatacaggcggttttcgcacctcggtggtaagcggtaaccccgcagtaagggaaaccatgccctgggtattaattaactcattttgttttgttatactttactagtagtaactcagttagtcaactgcttttcttatccctagcgtcgtttgtgcagtacatgggtgatgatgaataaggtcaccaggaggctgtcgaagatgccgaaggaggtcagggacgaaatctcgccgtggttcatcgacaggcacgcgattgacgaggtggccaccgacaagatcatcaagctcgacaccaatgccacatatgtcgattccgacttgaaggttaattatattggttctactgcacaaactaagttcctttattaattttctcgataaaaaatatttctttattaatttaattgatttgcctttctatattcctaggctccagaggctctgcaattttcttcagtttgtcacaatctcatatgaagcaattaatttaacgcaggataggatcacaatatcttattcttatatatgcacattatatttgtagccgaagcgcagcgatttggatatgaaccatcatgtcaacaacgtcaaatatgtaaggtggatgcttgaggtaatattcatcattttatagcggttaagtttgttgagataacttagttgtataataacgtgtcagtgtcacagagtgtacatttttttaagaactgtcacagtgtttacaaggtggttaagttatctagaaaatgctgcatgggttatctgttcctatgtacatatgcatatatgtttgaccggccgttttatttaaacttttcataggacatgaatagtagacttacttttaaaaaaagttcataatttttttcaaatataacggacggtcaaacattggacatggaaactcacagttgcgcttaaaatgtgttagagtgagtatttgctaggctacttcctcatttattgtgagcatgtttcctaagcttcttgatctcttttaacagtgcttataagaactttatacataagtcaaataaatccatttttttaactttattaaagttaatactaaattaatcactgctttggtttccgtgccactaaccagcttagctattctatactatcgaatcttaaagttcgctcagttttctccttcaaaatatttctttatttgtttctccttttataaaaacatgtttcaaatttgtaaaaccatgtatgataccataacattacctttttaaaagaatgttgaaaattttattatagtttggatgacgtgtcaaacttattatttaaattagtcgtatgtgtttcaaattagatgcaaacagtcataaaaacatttcaagaaaaatgttgaggcaaaaggaataatcctatgatcatcccacaaaactttacttaaaatattactggtataaagagataaaatagtaaaaaaaaaactcctcagccccatcccaaaataagtgcaattacatgatttaaatttatcccaaaataaatgcattcctatgtactagtaatcacatcaactaactcttatttaaatatttttccagcttaccctcatccgtcctttcactttcattcacctatcatttaataagggtcatagatcattttatatttctcttaagttgtatttgacctctagaattgttgttattttggaatggaggtagtagaaatatgttagggagtaaaatgagctactctctatgttttatattataaaactctttaacttttttaagtcaaacttctataagtttaaccaagtttatagagaaatatagcaactcttgtaacactaaattagtttcattaaacctaatattgaatatattttgatggtatgtttatttggtattgaaaaagctgctatgttttttataaacttgatcaaagttagaaagttagagaagtttgaataagacaaaaaaatcaaagtgtcttataatatgaaacagatggagtagtttagaaatgataaaattttataaaagcaaaatttagttggtttcaaacatgccatcggtaaaataatattacaaggtacggtacatattttatggtgtaagtaagaaacgaatggaggtagtacgttggtttctctcccatttggtccggttgatcttcattctctttaaaaaaatatttatctttacttgtttctccttttataaaacacggtttaagttcaaaatttgtagaaccatgtatgacaacataatatattttttattatagtttggatgccgtttcaatcttgttatttaaattagacgtaggtgcttcaaatctatgcaaatagtgataaatattttttttcaagaataggttgcggcaaaaggaatactcctatcatcatacttcaaaactttacttgaaatatcacttctataaagagacaaatagtaaaaaaatagaaagatctttagggagtaaagtgagctagtttaatagagatgatataaatttataaaagcaaaatttagatggtttcaaacatgccattggtgaaaaagaacggtgtagtacatgccattgatccattcccaatttctatcgattcccacttgttttattaggcataacataaagatcgacatattctaaatgtctttttatggcgtgcagactctgcctgaccaattcctgcagcagcaccagcttagtagcatcattctggaatacaggaaggaatgtgggagctcagatgttgtgcaatcaatttgccaacctgatgaagacacgattatgccgggagaaaatgttagcattgtgatgggaccttcactttcgcaagagatcatcaatggccaccatagcttagctggtgcgctccagcagtggccaacgaagtacactcatcttctgcaactaaaggcaaatgacaagtatgaggagattgtgagaggtagaactacatggaagaaaaagtcatatagtatatcaaacgtcttgaagttttaaaggaaaaaaaatcaagcttattgattatgtctattacagatgggtatatatgtatatggtgtactgctctagcagtttctctgtgttggagatattgtgctcgccatacacatgtacatgttgggggtctcaagacaaacattattcacaaatttagccttacatatctccagagtacctttatacaaaattatctttcttcttccaatatatgtgatttcacttttctaaagcattccataagtgtctctcagtagctgtaccaaacagtaagtatttcataaacattttcttactccttatgtttttctcgggggaaagaaatatattaattaaacgacgactggattacaatctcaggacaggcgttcagaaacacacttgggagcctgagagccaaacaacactttgtttcaggcataggctgagtagagcaagaccatgcgttacaaaattactatgccttccgatcttctggatttgggcaactggagcttgctgcaaggccgcctttgcctcctggatgaaatgccaaaataaaagactcatcgggtttcactgagtgagttccattttgcttttacatttttcttttgtctttttgtcttttgaagcaccctaggtacgaaaacaagtgtggggtgatcttgtgctcacatgacgcattcacatacaagattacccatgtctgtgctacaccgtgacgcttgcacattcacaagatgagacgaagcaaccattgcacaaggctgcacgtcttcacactcacatatgagcgttggtttgcacgtttatccttcatatccttaattccttgagttggattaattttgccttatctaaaattaactcaacaattaaaatgagtattgacatgatcaactagagtctccgaattgcttgtaaaaatgacttgcataccttctattccctgcacacaccttctatgacttacatactcatgggaccacgtgttatctaagttattgattaatgagagatggcctaatgatatgaaacttgcacttgatgttgaacccttggaatttataaaggaaaataaaataactttgcatactcctcaatgttgttcctttcctaccaaagccatatgtcaatcttaatgacgaaaccttatacatatgctgcttgctatcattttgagttttgctaaatggttgtgacccttgttagattattttcatattctcatgaccaaagtcttgtgcacttagccaccaaaaattttgctttttctccgcactgtaggattagcaacacattccattcactttcatatgctaaacttctacaccagaagtcggcatccaccaaataaagactaaaaacattgtatggtctctcctctaatgatccatgccaaatgagacatgagctaaaaaaaactctgctcaaaagagaatgaagcaaattttctcaagcatgatgaaaaaaaaagtatagtgatgttctctggaataaaagtgcaagcaggaggatcataaaaaaaatgagtcaccatcccattttcattttttccactctcccatttccacccataaatataggtgaccaagcttggtcatggttttatgattagttatcttcttacatcctctatttgactttacaatatatctgatgtaagtatgtcttttcttattccctatcctgatctccacataagccttattagaaatataggatgagaaaatgcaacatcaatgccttgatgagtgatttgagagaaattaattgagaagtatagtaaaagttatattgtaacgagcatcaaagaaaacccaaaggtaattcaccagaaggagtaaatgtgacttgattcgaggaccattccattcttcaatcactcaagatgacatgatagacgcatcaaggttcacagacaaaagtttgtcttggaatatttagtatgttatatcattaagcagaaagtcattactataatatattcatgagctttactcagggacgagtaaaggataagtgtgggggtgttgttgacggtcgttaagtgcaaactttaaccgtcaacttatgcataaaagagatcaaatatactatcgagacttagtggtaggagtttactactaaccacttccactagtgtatgattgagatgtcaactagagggggggtgaatatgcgatattaaaaataaatagcacctaattaaaactaacctaagttgctaggcttggtgaaggataagtctaacaaagcaactaggttatgttttgcaatcctggggtgataagggctcaagtatgtctctatgaatgtaaattgcacaaaagtaaatgcaataagtgaatgagacaagagacaaaggaaattttacttgaggttcggaaactcgctggtttctaatccccgttgaggcaaacccaacttcaccgctcaaaaccacgaagccaccacaagcccccttcgccaaggggtgggcaaggttggagccggcccacgagaagtggactatcaagcctcaatcactagggtagttcttccttcactccgaaggtggtgaactccaaatcacgcacaaaccggcactaggccttctgtacaatctccttggagaggtcaccaggcaatacctccacaagtcgtctatgagagggcaacctctaagagtaacaagtaacaacctagcttgaagatgatcaagtgccacgctagctctacaatgaagcaatgcacttgtcttggctcaatcaactctcaaacacaccaaatggatgaacacaagctcaagagagtgtatgcaaattaagcaagtgccatgagagtccccttgctactgatgggggagtatttatacccacatccacaaaaactggccattggggtcgaaatccccaacccctgttgcctgccggtcagaccaccatagggtggtcggtcagaccgccaattggtgtaacggctagaagccgttacggttcatttattgcataggcacaactagcacggtttgaccaccataggtcggccggtcagattggcctcggctctggcagctctagatcgccaagctaggggcatccaaccgactcaaaggaggcccggtcaaaccgagcctggcccggtctgaccagcatggggcctgcggtcagactagccatggtcaggggatgtatgagtaaaagtagttgaaccaagtgacaatgcaagaaatgttagttctctttctttgtcgagataattgacgatcgaaatcggtacttaatgacggtcaacattaatactcatcattttattcatattctttatatgcggttggttggtcaagtattagagatcattaacaggatcattgtaactaacaatttcattgagttaaataaaagatataggtccttagaaatggaaaaggtgctaatgctcaagtcacatcatgacacctaatgatcaagatgaatagtttgcttggtcaaaggatgaaaaaagttgaaatatgcaagcaaagatcaattgatgagaattactgtgaagatattgaagaggtggggtatgaagtagctatccatggaaagatattgaagggcaagaaatgattggtcgtcataggccatgtggtggtgaagggcaagcaatggcttggcaccaaggaccgaatctggaggtaaaggacaagtgaaggctttgtcgtgatgtattgtgcgaggccatttaaagctacaggtaaacatcatcaatcttttaaagaatacaaggtgaaatggttttggtgttaacatccctcaagacaaagaaagaaagaaatcatgaaggtattcctgttggtatagttttctttctatttgcgtttgagtataggattggcgtattattaagtgggatgcaatgtcgatgtgtttgtttatgtctcagtgctcaaagtttcatatccaagtgctacattgagagaaaacccaaacttaaccaatcctttgagtggttttagacattggttttaactgggttgggtacccctctaggtaagctttttatagagtccaagatcataaacaatgaacttccgggtgcaagaagctatggttatttcaaagattatagaggatttggatttttccctttaattactaacaaattatggatttcgagccctgctctacaccctctacataatcttgtagataaaatattattttaatatccatagaaacaatgataatccatgttttacactgttagagatataattgattagagttactttcaatcttttccgtgtttggataaggattggtttagttcccaattttattttcttaaaaatgtcacatcaaatctttagacacatgcatagagcattaaatatagataaaacaaaaactaattacatagtttgcatgaaaatcgcgagacaaatcttttgagcctaattagtccctgattaaccataagtgctacagtaacccatatgtgctaatgaagcttaattaggctcaaaagattgtctcgcggtttccaggtgagttatgaaattagttttttcattcatgtccaaaaccctcttccgatatccaattaaatatccgataagatatctaaaaattttcttttctccaactaaactgggcacaagtagtcagataatagcatagccgtcacaaaattatgtaaaccctagctggctgtccgtccttccccctccacagcgtcagtggcggctcaccgcaattctgtccccaatccagtgtcatttgactcatttcctcttcctgccctcggggagtacgtgaggacctaaaagtacctcgcccccaaaccctagaaccccacaccacacccaattcgcccacccaaaccctagtcctcccgatgctgtgatccgccgcgcgtgccccatggctctagacggccccgcggagcgacgggacgaggcccaggccgcgatgggtaatggcaacggcgtggccccgccgccgttgcggccggccggccggccctccggggcgccggcgtgcgcagatcggcggctgcggttgaaccccaacatggagcacaagccgcaggactacagcgacgtccgcggcgagtacgcaccagctgtatacagtgcacttgagaggcacctcccacccagtgtccttgatgccaaccgggaaatcaagctgcagctcatgcgagaggtcctcgggcactattggccccatggtgagcgcaacaaggtgaggttgtggatcttgttagatagaaatatatatgggccttgcgtgtttttttaagtgtttgctgtggcccttttgtcgatagaattttgttttgtttttttttttttactacggactctgaaattagagattcagaatgggcgatggtgaagaaagtaactgctgagttgtatgcccattaggtggaataatgtggttcttgtgccagcaacttctggcaggcaggtgttgtggctggagaagggtacgaggtgcagccacaaatgctggactaaatccaataaccaaaagatttgtctgttcattttgcataagacaagctgtagccagcccagacaataccagacaattgctgtgaaaaatttgatctggatttggcatacctgctgttaatatgtgccaatgccccaatctagtacaccctttctaggtataactggatgcatgtgatgatggaagatcctatttaagaatgcatgcaattttgtaacttatattagatgaacataagggactaattaaccatgggcaagtttggtttgatgcgaaatattgccctaccctttatttggtagcttcaaactcttgctagctatttggattggatccccccctcccccgaaaaaaaaaatcttgccaaatcaatataattgatacaactttaccctaccaaaaatttggtagtgccaaagcttgcccaaaggtttggcattaccaatggtttggtagagtagagaaccaaactcaccctaaatacatacacaatttgggttagagacaaaatattgtgataatcacttcctttctaaataattgtctctatgggttaatcactaggcttttccttacctaatcgtcacttggtccaccttaaaggtgtcataatatccttctgtttgcctttatctgctagttatgccatggcactttccttgatcaacctgtgcttatgaaaaatgtttggtggaagcctatctcttgcttgatctgcttgattgatacaacattatggattggctgtttctaggacatcctaaaattagtcttgttcaatacttatattatgacgccatcgatccgaactaatctatcttgaactgcaatttggatctatgcagtactgtactaattgaacttcattctataaaggattctaaaaaatcatattgtttatctgtagcttaagagttctttttccttgtagcatggcaaattgcatgatatatcttggttgtcttggaattcgaaatttgattttagttttggtgattgagaaaaaaaaagagtaaattcgactggcagtatataaacttttaagatttggtgcaaaacaaggccaaaatgaccacatgggcaaatctggctgacttgacaaggattccatctagctgagcagtggaccctggagttttcaggagccaaatcaaagtcttcatgcacataaatacaattagggtccttattcatgaaaagtgaagtacaaataggtcaaatagtcttacataacacaaacaaacgtttagtcatttcgggctttttttcatggcatataaatgcttgattacatcccgagaaagatgatcatatattcagaggaagtgaaaaggtgaaagaccacctggtcatctggtgttgcctgttgccaccttcagttgctggttgcgtgctacccagggatgctacgcttgcaggccatgagttgcagccctgtcaggcatcgtcgccagtactccatgctcagggggttggggctcagctgttcaggggccattctgcaagggagtgctattggctttgctagactctaactcactggcagttccacttcacacgcgcctccaacggaaaccctcaagatgttgaaaggctttgttgcatgtgcactcccgcattgacgcaagcacacgcatggtcttccggtgggtgactgcacctaggcttcttgggctttggtttactacatcctttttcctttttgcaaatttgttgggtatgccagtgtccacgtagcatcccatgggtccgcccctgtagatgaggtgtacttcattggttagttgttccttgatattgctgtagaaacgaaagcatgctatgttatggagcttcttgtgttgttccggctaacttgtaatcgaagaatgggattgaagataaggatgtgaatcttatcccgtgtaaatagatggtacgtacccggataaggtgggatccggatacctctcaatagccagttccctgtgtctatataaagggaaccgggaaccctaaagcaggtgatcactacacgctactcctaatgtcgtattgcgaacccctacacagatctaatccacataagtggactaaggtattacctctccctaagggcctgaaccagtatccctgtgtcaccatccctccatgatcttttgcaccccataaatattattgctaatccgtagaattgacaaggtgagtcaacgtggctgaacccataccaggatagctcacaacacaaaccatcacttggttgtcatccttgttaacaccaaggcaaccagatttgccttcttggattgtgtttgtcttggttcgcacctatgagtctatcatattttgctagttattgcactaatgtgtatcctccattcaagtttgtttaccacaagtgcaatcatatttgttaaaatataaagtgtatttggtatgaagcatataatttatgcaaattttgaggtaataggagcaaagttgcagaaagaaaagatagccatttaaattctgctgatattacttgcatttgcaagactagaatggattggtatcacgggaaacggatgcaaaaattaagcaatgcttaacatcaatatatattttattgtttacaataaactttgatgttatgcctagtggtaggactttttagtataagtttatgatgttcaaagaagctgttactgcataccacagagatcaggtcaaaatatttgtggctgcttcagatatttgtaattgcatattaatttcatgtattaaatttaattcgtcatgagatgctataccttagttttgcaacgacgagggagtttgagctggaacatgtcaaaagaaaacacatgtagtggtttaatttttccttaagtagtatgagtgaacaaagaagggtcacctcgaattattttttgcatttccagagtttcaaccttcccattttctgcagctgtaagattagttctgttgagattgtcatatgaagtgttcttttattgcaggttcaaaggcacagagaatacagacagagaatactcaaccattataaggttagcgtttcagcatagctgacattattcgaattatctctaaatattttgaaatgggggaatatgcatgttttttcttgtgcataactatatttgcacatagaaatatgcagtccaggaattcaggaattatatcatatattgtatgatttgttatttcttttgagcgttaagcagggtgtgatatgagatgtttatggaacaattgtattggtcctgtacgaccagccatatgtgatttcccaggtgattgcatgagcaaaatctttgttcttgaagagtgcagctggttcctggtacaaaagggcacaattggttggacaagaggtccgtgaagagtgtagggtggtaggatactggaagatcatagataaaagaattacaatccaggcatccagtatgcgctagtaattcaatatttacaactgtttgaatcaagtatgcatgactgtgacagagcactacaggtaccatgaataatttagttatggagagccttccgagatttggttatccaatcagcatttcctgtgttggttgccttgtgtgcatgatcttagaaagctgcttatggaatatttatcttattatgtcaaacgaatttggaattaaatttctatgtttacatggcaaaatataaaaaaatatacttcttttattaaatgaagtatacttcttttttattaaaaaatatacttctttctatgtcgatatggcaaaataaatttctatggcatgagcggtaatgaatccccagacaggagaattaaatgaattgtgagctgacgtgggtttcagtcaacaatatgtgggttccttgatttcactaacagctagagctcaagcaagtggaaatatcaatgaaactaaatggcaccatgtgtttgttacagttcattcatgtgtacactacagttgtagtgtatggactggaagtcatcaatcttattgagaaattgaaactaaatctatttgttttttgtgctagtaataataacttatattttttttattttcctgacagccacttcataaagagctatacaaaatgcgcccttcatcgttctttttaccaacattccttgaagctattaggaccaatacagaagaaagctttagaagcattatgactgagccagttcctggtgtttattcatttgctatgttacagcctaatttttgtgagatgctattacaggaggtatggtagcatataacatacaattttgatattgctatatcatgttttgttacaaacttacaatgataaaacaatgttttacaccttgtaggtagagaacttcgaaaaatgggtccacacaatgaaatttaagataatgaggccaaatacaatgaacaagtatggtgctgtccttgatgattttggcctggaagttatgctgaaccaattcatggaacagttcatagctccaatgtctacaggttatcttatcgactgctatccttgttaaatagaggcagaatcactagcattttcaaaatatatttcctatattgattttatgctgtgttaatcttcagtattatatcctgaggttggtggaggaacattagatacacaccatgcttttgttgttgagtatgggaaagacagggatgttgaactcggtaagttaccattataaatttataatattgttttatacttaatagcctgtaaaatcatatgaagtaaaagaattgttcttgattgatcatgtctgcattcagctattccatgtaactatggatactatttgtattgttgttcctccctgttgagaaatcaatcacatatcagtttttgagccaatggtttggcctttcctacttaaaatggcaatatgttgaaactagtttcaatgactagatgataaatcaatatgaccaactttcactgtcaggaacttgtggaactgctatcaaaggtagaggtcacatcttctctatctagtctggagtctggaatttctcttctctctctgtctactatattttggacagagggagtatcttattgtgcactatgcgcttagatatatttgtactactatcacctaggggtgttcatcgacaggaaagattagctatcatgatgaaaaatgaatgctatgctgtctcttaatgaagtagaacaaagaccggggctgatagaatggcatgataaaaccgttttctttctcagtttttttttttgaggagggggggggggcagta

SEQ ID NO: 4570 - DNA, 28121 bp, Oryza sativa
ccggccagagggcggcaaggggctgcctgcaaaatggccggccccgactggcttttttttattggggccccttccgccccaacagagggcagcaagggttttcctgcaaaaaaacctccctccgtcaccgcccgtctctcccccgtttgccacgtcagcttgccgccccagaggtgggcgacagggtctatttttgtaatttttttggtcgatagattatttctgtaaatatttaaaaaaaatctaaaaatgaaaaaaattcggggagtgggaaatttaggcctaatgcagaagggacgatgaaataggacccaagatgagtaatttaaggcttcttctttatttttttaatacatatgcgaagcatagagtatatatacttttttttcaaaaaaatcttgagtatacatcttaatacccttgaatcactactgggcccgcccattggtgcagtcgaagcaacgactgcaattttagcagctgcagtgattgtcaaactgaagattgaattcgatgttgttctaaagaatgggcgtgtaaatatgagcactccacgtacagttaaaaatatattgcatgtaaatatattccgggagaaacgaccattttcacgtgcaggacaatcacagtcagccacagggcatgttcagaactatttcattttgcaagccgaaacgtggaaatgaacaagcatatcgcttacagatcataccatttatcttacaattatcattaagagttatgagatcactaattcaatgagaaaacaattaaaagaggatctgaattaattttcctacttcagtaaactataaaatccttaattttccaactttacaatttcattaagcatggccagcacaaatctctatggttgatgagatcttatgatattgggatttcgatccaaactatgaagtgccataataaggctgagttcttttcccaacttttccaactcacctctcttgttttccacacgcacacttttcaaaccgctaaacagtgcgattattataaaaaaattctatacgaaagttgcttaaaaaatcatattaatctatttttctaaaaaaaagctaatacttaggtcttgtttggttcatgggactaatccattagtccatctattttagtcccaaagaatccaaacatgggtgactaaaagggactaaaagtgcatattgagactaaaatccattagtcctcttagagcatccccaggagctagacatatttcatcctccaaatacccatatggatagtcatctaaaaaagattcctcattcatatcccttcccactccaacagatcatccatatcccaccctcctatattttaatatcttccaactaaacttacttttacttttgtatttttaagggacatattttgaactactaaattttaacggtgttatttatcgcgataatatttcaaaatgagtatatttaacggatatatttttaatagataattttttaatttatatatttgaattgagtgaagcattttttggatatattcgcagcaacatcaataaaatgaacacaacaaaaatatatcaacatttgtactctattcctatttccttttctctactcaggcagcacagtcatgaacatactgctactactctttctgtagaggaagcatgtggctagcaggcgcggtggcgggtgagctggcgaggggcggcggcgggtgtgtggccgagggttggcagcggccgggcgggcgaagggcagctggcgaggggcggccgcgggcgtgcggcggagggtcggcggcggtgggtgtgtggctgagggtcggcggcggccaggcggatgggcgaggggcggcggcggacaaccggacgagggcgcggatgggcggggaggaggcagacggcgggaggagaagctcgagggcactgctgcgggtgttcgacggtgggaggagaacctgggcgcgggtggctgacgacgggagctcgtgctatcgcgaaacctccagatctggtacgcctattcctccccaccttcactgctctatggctccagcagccagtgtaccacggcgtcgcctgctcgttccggaggagggcaggagctcgcgacggatacggtggatgggatatggcgtgaggagagagaaacgccaaatctctctaatatggagcacacgctatttttagatgactagatggaagatctgctggagcatcaatttccttaggacggagtacgggatggagttgctgctggtcatgctcttagagttatttataggaactaaagtggcaacctctcttctctctcccttggtctatgtacctttagttcctggatccaaacagtaggggactaaagtttttagtcaagagagtaattttagtctagagactaaatgatctaaacatgaccttaattaatcatatgctaatggactgctccgttttatgtgcgcagaagatttgtttccaaccagtaggaacgaacacagcctaaggtatcatcagtctgttacacatatttttaggagcaacccaacctgtttatcatcagtaatttgccacaatgtgctgtaaaaagtgggactgtttaagcagagttccagcatgtgggctgaaggtatgtgtctgaaactgcacataaaattcatatataaggggataatgaaaatgtcacataagattcataaactcaaaggttgctaataatttaaaacaagatctcgataaatcatactcccttcatcctaaaatataagcatttttagtatagcgacaagtcaaacgtttttaactttgactattaatagcaaaaaaaaataaaaacatcaatcatataaaattgatgttactagatttatcattaaacaaactatcataatatgcaaccctttttatttaaaacatcttacttttatagatattgttgatcaaagtagtatctcggagactgttcagaatccaaaaatgcttatatcttgggacggagggagtagcataactgtacaagcgaaaatattcagcacaactgtaaaatcctaagttcactggttgagttcaatattttcgatgccaattttttttttgacaaagggcatatagccgtgctttactgaaagtttagggccccttttgaatcataggattgaaaaaatagaggaataggaaaaacacaggattttgataggaatgcaaatgtaaaacagagaattgcaaaacacaggaaaaacacagaaatgaccgtttgattggactgccggaaaaacgcaggaatcagatgagagagatagactcaaggaagttttccaagaggttagagtggatgttaaatttcctatgattttcctctagaatcgtagaaataggaaagtttcctacgtttttccttttttcattcatacgaatcaaaggcataaatagtgtaggatttcaatttctttgtttttccactatttttcctccaatccaaaggggccttaaggtttgagatacagcagttcacaactgggtttgccagctaaacaaacaaagcccagaaacacaaaaaggccttatcctgcaaagagaagtactacaaaaccaaaaaaggggcagaaacggcaagcacccgacagctacagaagctaaagcacaagattctcacacaacttcagcttcccacgttcatgttttggtttaacaaattgtttagtgtgccccaatatcaatacgatctaaaattacacaattatcgaacttcaatacaaagagaagtggcatacaattaacaaaacaatatgcagatttacactagcactaatacttttcacacgcaaaaccggttgaaggtgaagccacaatttttacctgaacttcacggaatcggcgacagcgcaataagacatcatcgaatcagggttcagcaacggcggggatgaccctggtgggggcaagatggggcaggcatgacgaggacaaacagcgcgggacactgtgccgacaaagcctccggatacgattttgctaaacgttagatggccataaggctcaaggctcggcacggccatctggcccgacccaaacatggcatggcatgactggtgacgggttcgtgccggcccagcccgacagttgagccatgcctgtgcagatgacttggcacggtggcgggccggcccagcatggcacacggtccaatgagtagcaagaaaaatagtagagggacccaaaataaacttagttgccatataaacttatcgcctaaagagaagagggatgcaaaataaacttataccaaccatataagacttggaaaaagtacaccgaaggtccctgaacttgtcatcgaggtaaaaaacgtcctcaaaccgcaaaaccaaatattcggcgttccttaactaatcaaaaccggtcacaataggtccttcggtggttttgaacccagttttatccgacgtagtggttgagtcagcgtgggatccacgtgggcgccacatgtcaggatgccacctcatttctctctttcccctcttctctcgcaggccgattagcaacgggcggggctgagcggcgcccgacagaggtggcgtgcgagcgcgcggcggctggcggagcagagcgacagcgggcgagtgcgtgacggagggcgaagccgccgtacttccccactgcagctgccgtcatcgggaggaggagccgccctcgaccacgcgaggacgcagccgagactaatcgacaagacaatgatggacgctccgccgagcaagcgcacttgcatcaccgccggcagcagcggcggcaacgacgatgaggccgatgccgatcggctaagctagctaccactgtcggcggcggcgaaaacaagatggcggtgcagtgggacaagctcgagtccatcgcctacccgctgctgctcacccaccgcaccaggacactcgagaggttctggatgtccgtcaacgtcgcccgcgggatggacatgggatgccctccgccacgtcgtccggtgggtgcactgcggtgtccagtgcttctccgcgccggtggaggtggaggtggtggcctagctcactgctttgtcggcgcccggcggctcgtcgacctagacctccccgctgcctccaccggtgactgctactactaccgcctccggaggctgcacctcaccggcgtctcgctcggaggccgcttcgtcgagcaagtccggttgcgacttccggtctggaggacctgcggctcagccattgcgccacgagcttcgccgatatcgcgtcgcggacgttgacgaggctggtcatccacggcaatgccggccgcggcagcggaagcagtggggagctagcgtcacggctccccgactctcctccctgtgcctcctctctcactggcctccaccgtgcctccgtcgtaggcctcggagccaccgtgctttcctgctgcagccgccgcccgccaccgcccgcggccatcgcagctccgccctcctcctctcccgcgatagagaagactgagagagaggaagggagtgaagagaggaaagagagatgaggtggcatcctgacatgtggggcccacgtgggtcccacactgactcagccgccacgtcgaacaaaaccagggtcaaaacagtcgaaggacctattgtgactagttttgattagttaagtgatgccggatatctggttttgcagtttgaggacatttttgtaactctatgataagttcagggaccttcggtgtactttttcctataagacatagcccaaagagatgagggaggcgaaatagacttattctatggagaagcataatgggctatcatgctttcgggctaacccggcacgacccgagtcttattgggccgtgcctaggccgttggttcagcttgtgggcgggcacggcccggcccgacgtgtaggtcgagccgtgccggcccgattgacctcgattcgggcccagtcgtgtttgggctgtgctaggccggatggcccatttggccatctataccaacggaactgcgattcgagcaggtctcacacgtagagtcggtgccactccttcagatcaatgcattagatcgcttctcagctgttgaatgaaatgcagcatagttagatgaatatagagctctacccatctcacatacaggcaccgggtgaggcttgtaccacgggaggccattctattttgtactataagtacagcactaatacaaggcaatcatctttgtgtgctattctctctttgcttgcactctttcaggatagaaagactggaaaggcatgtgaaccgtttgaaccggtagaaccgggcgattttgagtgaaccggctattaaaccacctggttgaaccgacaaggctggaccactctcaaaatgggccacatcaaggcccaattacttaactagcccaccttaccatggttcttttggcaaaaataagaggaaaaagttgctccatgaggactcaagttgagtcactcaacccctggtctccatgttcaaagcgagctgcgctagccaactaaccatccaagcaactatattttacaacacatatatagggagcatatattttgtgaatcgtggttaaacggtctgaccaacggaccggtgaaccaagggatcgaccgggtcaccagtcggtctggtttttcatactatggcaagtacccgtgcgcgtaggtgctctcaatagagaatataaatagaagagagagttcactctgctatctatcccggagatgcgaggttaaccagcacgagagaaacttaatggctcttctgtaacggctctccgccaggtacgttaaaaaaacgtaacacctagaaggagagcaccagtctcgtcttggcgcgcgtgtggcaatcccaccaccacctcaaccgcccaacgggtgctcttaattagcaacctatttaagtcgaggtccctccacattgctttccaatatgatattaatcccttaacactaattatgaattcatgaaatttactagaattaaattggacctagtccatttaattataatgtttcgtgaattatgtggtgaattagaaaaatgccaaccatgtcatttgacctgtccaatttctagatttatatggttactatgtagagatgcttttatctggaataataaggctcctttaatttctgatcagttctttgaagatgctcttatctggaataacaggagatatcaaaagtcaggaggataaagtgaagatgctgcttgctggcaactctggattaccaggaatcggctaatataaaccgtggaagaaggctcggctgctgggtgcttccacgtcagaatgaaacagtatgggatttactgttttcttccctttcagttgcaattggtttagaggaggggaagtgtttacacctaaatttggcacctagaagtaaaataggaaatattgccaaagtttagaagtatgtcggtttcctccgagtaggctggtctaaccgccgtgtgttggcaggtcagaccgccggttgagggccggtcagaccggcggcatgtggccggtctgaccagcaggtccgagtctgagtgtgtttcaccgggtctcgaagtttccttgctcgggaaggaatgtttcaggtttcctttggattctatcccgagttggacgtggatgagggtttgtagagggcaagaccaacccctatataagggacatgccggttcaattgtaactaatcaatctacaatcaatcaattgaatcgtttttcatattgcttttagttttctcttagtttgtccatctctgttgatttgcgccgtaaatcatccgccgccgctgtgagagtgcgacacttctttgtaggtttgtcctgaaaaccttccgttttacccacgagacgggtagttatctaggaatcggctccgctagccggtttagttatcaaaacctatcttggtatagcttttgctagatcgaagtgattggcgactctagaatcaccgcaaggcgtttaggtgttgtgatcgtgcttgtcaacttgtcatagaaagttgccaacaggaagcttacgtgataagaaatacgatctgctaattctagaattctacgcaacttttcatccgaggcatcgctactcactccgcttttctggtctctcttcacgcggcgctccgatcctcctgtcctctcaccgccgccaccacctgctttggcttggtcagtgatgatgatggggagctccggcgccggatcaagcaccgtctgtgagcgatccctgtattgatccctgtattaattcttttatgttctagggttgtgcggtctaacccggttcttggtccgacctccttctgctgcgcttcttcgcccgatctggtttcgcctgttgttgatgcaaggtacgaattggtttggattgattcagtgatgtttcggcgtggattgctgataccgattcctattgctattaattttggcaggaatattgatttgatcaagcgtggtactttcttagcgctcgatattcatgatctagggatggcaattgtgcccgtttacccgtttgtagaaaccccattaagattgggtatgttcttgggtattttgttgggtcaaatgctatacccgatgggtaaacaggcatgtgcataggcaaatactactcattacccactttgtccgtttacccgctaactaatctgtcatgtggggtcatgagttaatattatcctcatcaatttataacacatccttgcgttactatgatcttatagtagggtcatgagaattctctatagccatcggggaggatgccagagaccatccccaaatccaatctctccttactcccttcctattcgctcgatgagaaaatggatcatatgccactatatatgtggggtttcgtgaaatgcaactcaataaaatataatgaataaaataccacttagtatgttgcctaccagataaaatgccactttgagttctaaccattttatgaccaaaatacccctgactatagagaagggggagcgccagggagggccggccgggtagcaatggaggcctcactgggttgatattagtgatataccctataggcaatcatagagatgattgtatcatcgactttgttccttgaaatagataactcattattggttaatgaatatgtgattctttcatgagactctttatgttatgtgttgctatttctaaaggatcctgatcaaatatcatatgtggaacaaatatgtttagatgatcagcaaatgtattaattgatgatcatgtctcatggatcatggtatagagataccaaattaataatgtggacacatgttagtgaacatgttgttggatagacccaacatgagacactgcaagagccatatgtgttgtgtcatcagtgatctcatttagtgttgatgttgaatccttagacctgagattatcatggttcccaacatgtgtagtagcttacttagggactgctaaacgctactctgtaattgggtagttataaaagtagttatcggatatgctatgaaacatgtagtggaatatgaataatcaagatgggatttgcccctcctatggagagatatctctgggcctctcgatgttgtagattatggaagtgcatggccatgccaaaggtgattgaggagtcaatcacaagttatataatctatcaacaggttcgagtgaatgattgagctattagaggatggcacatatctagccttgagcttaatcgatatcgtgaggcaaaggagttcatacaagtatacactagagattcagccaatatgatctttatgtatgtccggtgggtcaatacgttctgctaggggccgctgttgtcgcgtggaccgaaaaggagttttcgggttacagccgaatatacatgaacctacagagtcgcacgcttaatgggccagaataaggggattggatgtagatccaatataagcttaattcggatagggatccgaataggagtcctacgggccttggaggcccgagtgatggatcctatatattcgtgaggggtgtgaccggcggaggcattgcatcacgtgagaaaccctagccgtcacttccctccccgagcaaaaccctagccacgcgcgggtgctagcacatctgcgtatggcgttccggccctgtacgtgtggataccggtagaggcgctgctggtttgcggtgctgatcggcatgggagtacggcgaggagaacacacgaggaggagaaggtcgagccggtgcgatcgactacttcctctacatcgacgcgcgctacttcgcaagaattccttcgacttcttagcgcatttttccgctgtacagcgcgttgagtggtaatgatctatgatctaatactttcatggttactggtttatgcgatagaacattttgatttatgctatcgtagcctacgcatatcccaacagttgaaccatcgcttgtgtggggaagccacgtatggccgccatggctagcccatgcacatgtcgggccaaactcaacatggtcagcgttgattcggttacaacacttccaaagagaagggcccctacgtactgtccggaaagatcaagcatctcgatcacggatctacctgtcgcctaccacctcaacctcaaacagaaggtgatcaccattgctgccttagccccaaagagaccgccttcgttgcggaaaccagcggtcatcgtccccgtatttgacaatagggtcagtagatccatgtcatcgctgccactacagccgttgtcatttagggcctcatcgtttggattttttcgtaataagccaaaacggcttattagagaataagaatgaatttgtagctaaaacttttatatatatgttctcggtgacttaaaagccaatgctgaaaaagaaactacgttgaaaatatcttaaaatcaatgtcaaaattaagtttgaaaattcaaattttggctttttctttggttgaatagaccatccgatggaagcttacatcttgctgggacttatggaatgagaaggctctactgccaccacggtccttgcaaccgcacagtctgctccagtggtggcgaagcagggaaaggactggaaggaagcggtggtagtgcaacatcgtcgacacccgagtcactcgacaagagcgacacgaggacaagatatctggtacaggggttcacaatcccaataccggatcaaaaatcactcatgggcgatatctttagattttgtggaaaccattgataaatcgacaaaatccggataaatcttgtcaaaaatttaaacttctgtttgattctttttaacttaactaaaaacggagcggtttgtttttccgacctggttcaggaagttcggaattcggattgtaaaccctaatttggtataactctgttaaagtgtaaaatagatatgattcaattatttagaagctctgaaaggaaggggattattttgtttcgaaacacaatacgggtccaggtaccaatataaacacgtgcacactcacccttaaaaatgcacatacacatcctacctctatgagtatcttcaagattgagctagcatatcacatatcttcatattcacaaagtcaccattgggtctcgcagtcggtggtatgtcgtgtaccagtgaaagaatacttagtcgtaaatgcgaatgctcatgttaagacatgtacctaaatggatagattttaccaaaaaaaatgaactagctgagctacgttcactttgtgaaaagaagaggattataattagagatgaaaactattggaaacggaatcattttttattatttttaatgaaacagtcggaaatggtcagagaaattctctatatttaagaatttcactgtttagtattaacttcagtgtgatggtgacaaaaattaggaaaaactaaattttaaaaaggtaataatcgataaagatatttctattatattaattatttaattttatggaagggagtagctatatttatggactcatattttttttaaaaaaaagtcagcatacatttacattgtaagtctctaaattacctatgtaattttagtgtgtttacaatgtaaataccaaaattacaagtaaatatcaaaatatcggtatcgatccggtcagaaaatttcctaccgttttcatctttaattataattcatctaagatcagacttcttcctttgttacacattcttatatgattcttataatagtgttgctttccactttgcctatcaactacagcttgttgctccactaagccgttgactatagcaggacttgtaaaggtgtacaaaagatatacacagtggcagacacaaaatattctgaaccttggcgagtcgtcgagcccggccgattgctcaggatctctgggcccctaggtctgccgctgaatgcaccctatctgaactcttgtcaatagatacaccaatatcatgaagaggtcctaggaacgtggaacagtaacaattggtgggaagaatatcagatggaatccaccaatttagtgaaaccatgacactaatactacactaaatatgcctacaacttaaaacaatttaccaaatgcaagattgatagtacactgtattatgtaaaatttcaagatcaatcttaatttcgctgggaagttatgaaattgacaaataacgaagcgagcacggtcgaaacaatttaattcggttgcttacgatttgatatcactagttatgaatttcatatatttcaaagaattgcgtagtattaaaattagcagattacctacacaacacatggtatgttctataactttctgaaaattcttcacagtttgtacagtggttttcacaatttgattgggctggtggttccgcggtacttgacggtccctgctgagtgcccagtgcacacggtaccatcgagctggctagccacgatgagctgccgattcactattgctctcactcacgaatttcgattctgtcagcgaaatataattacactcagattaacagatagccagagagggtcattaaaaaagctagtaacttttcacattatgtgcatggtggttattcacatgaaagggaaaaaaaaagactagaagtgctttctcttctttctttttttttcttttttcttaatctgatctgaaagcaaaatttagacccgatccagaatcccttggtcctcctcatttgccatggccttgtcccctttcttgtactccccatagacgtaggacgagaaggcccagaggcagagcagcatggccaccgccttctccggcccgaactcgtcgccgaacaccaccacgccgccggccacgttcaccgccaacagcgccgtcatgcagatgccgccgtgcagggacgtcgtcaggaacaccgttccggcggtgccaagaaagcacagctgccagctaagcaccgccgccccgaccaccgcgtagtaggccgccggcgacagatcccacgtggcctccacgccgtcccacggccacttgccccccgcggacgacaccatgccggccgcgccgacggccgtcgccaccgcctccataatcacctgcgcctccaccaccatccggaagcccgtcaccccgccgtgccggtacacgagctcggccgccggcaggtagagcgcgaagagcaacgccgcgccgagggtcgccgcgacgccgacgaggtagtccgggctggtggcgtccgcgccgccgccgccgccgcccgcgccgtggcggagcgcgaggagcagggacgagagcgtgaggagcacgacggcgttgaagttggcgaaggagagcggcacgcggacgagcgccgcggcgagcgccagcgtgaaagccagctgcatggagaggagtagcgccgtggtggacaccggcaggtacgaggtgccgcacgagtagagcaggttgttgagccccatcaccagcccgagcaggacgcagtacatcaccaggcgcggcgtgaacccggcgaacggccgtgacgccggccgccgcgcgcacatcagcggcagcaggagcgccgggaatcccgccgactggacgagcgtggccagccaccggtcggcgccgccgtgcgcgaagtagaaccgagagagcaggctggacgagagcgacccgacaaacaacgccgcgtagttcgccgccagcagcagcgcgccccgcgccgccctgctcttgagcacagggaactccacggccgccggcggggagcagagtaagaggcggtcgtcatggtgggcgtgggcgaggaggggagtggtgggagagtggagcttggcggctgtgtccatcaagagtggaaggtaagggagggggagagggacaggatgggggtttgcagtttgctgccttccttgatgtttatggtcgtctgcaaaggcagagaggcatatttcaagggattttgcaaggtattttctgtgtaaattgagcaccgttatattaaacccaagttggtggcacacgacatggactcgtcgatgatggatcgtactacgggtactccagtggagtgcaattatttgctctcaaaaggatgccgcccttcgctatcactgatgtgtcccttcttctttttttccccttttcttttggggtcctacatggcaacatcctccgtatagattaataagcttgtgtctgaatttcccttgaatagttatgtattagtactagtctccaacgatcaatcatcagctctgtatgtattactagtaggagtatctctgtactctctgaagaacgaacgatggagtatgtagtgtgtacaagtattatttctttcccctctgtttttggatgattgctggggaataatatctcgcttgtctcacatgtgagacacaagggggagagaaattcctgtgtctgtgtgtcaggtgcccggaaaactcgctagaaacgtctgtgctatgcacccagcagagcactgaaacagcacattttttctggcatccggagcgttgtcgttaccagggagtgttgggggcgatttttcttttcttcacagctatgacgacatcgcgtgatgaactggtgacagacaagcttttgttattggggggatattctgtgctgccaggtctgttctttcgtgcaaacatcttctgaaagaagtcccctatagtgcagtgcaaaattacgcagaacatccgtgtgcatcaaagtataatttagcatcaaagtatgcataatttatacagtatgcttccaaacacaagctacagaaggcttaaacaaacacatgtacacgtcgcaatatagtactataatataatagagaaaacaggacgagaaacagcaggcgtacgttggacagggagaagctttggtggaaggtttcggtgggcatgaaatcaatcggtcagatgggatctactccctccgtccttaaaaaaaaaaaatcctaaatttccgtgtccaattgtaattgtccgtctaatatgaaatttttttataattcgtatttttattgttgttagataataaaacatgattaatattttatgcgtgacttgtttttttaattttttttataatttttttaaataagacggacggtcaaacgttggacacggaaatcagggtttgtcttttttttttttttttttttgacggagggagtatatctgtatctatgtatgcagaagaagaagaagaagtgaagaagaagatgcatggtccatctgccggcggaggggcgcgacaacaaagtgatcgaaaaggcagcgacctacctatgcagatcgtaaaacatgatcggacatgggcccagccgttgcagcttttcaagagccgattgcccacagaccgtgggacaaaaacctgcccacttgatggctttccgcatctcgcttctctcggagtagctagtgggcgcagcagcagcgcgtggtggtgggtaggcgatgaatgtgaagttcagtggtgtaccagtacagccgcgcctgggtcgtccctatcaacaaatagaaggggatttaggctctgaaattaatttaggctctattctgtgctactttctttttttattccagcaaatcaatttattacgcctaagaaaatgtattacgtccatctgcgaaaatattcccaccaaattttctaatagtatattttaatcaataatgctacaattaattaactaatacataaatatatggtaaattttgctataggacattacgatttcgtgattttagccgtaagacactgtacaaactcccttttgggagaagacactctctaaacatggttatttgccagcgaacaccgtgccgattaaaatagtatattcgtgctgacgaggcgaaagctgaaagggggctcaaatatttacacagagtgaccaaattgcccctcatttctctccatcttcttctcttcttcctccctccccagcatcaacgcaacagaggagccggcatcgaggtggcggcctagaggaggcgagggtggcagatccacgggcaaagcctcttgctgcaccgtcgacgcaccacctcaagccatgggcgcattagcagcatccgctgccgctaactccggcccatgcactgcatggctctgatgctccgcgtccatccctgcatggcgccctagctcctcccagcactcctccgcgccaccgcttctccggatcgaggacaacaccaccttctccgtcatcctcctcaattctgattccgattctggccagcgtcctctcctgcaactgtgccattggccgactcattcctagcttcctcgtggaccccatcgtccaccccatcggcttcctgctcggcatgccggttttctccaccccgactcgtccgcaccgcttcaccacgccggtcgatgccgcccttgcctcctccaggccaccttggatccacctccaatgccggctcccctgaaagaggatataaggagctaactgcggaagtggaggagtagtggtggagccacgttaaaactgtagggtcagctgaccccacatgtttttgcaacatacaccttgatcatgtgaaaaatagtgaaaaagtacataaaacaaagaaaatttgtatggattgaccccacatagttgcatatttatgcattttgaccccacagggttgagaacttggctccaccaatgtggaggaggcgaggaaggagggctggccagggagccagggcgcgtcgctgcttgcgcatgctgaagggagtcgggccaccatgctactgcgacggaggtagaagggggggggaggagggaggaccgaccccttagcgtgagcccgggaacaggatcgtgctgccccgccgcccgcgcgtgctaaggggagcggggccaccacaccaccgcgacggaggtggaggaggcaaggaaggagcgtcgggtggttgccagcagcgagcggaggtggtgttgtggcttgagtgtgagagggagtgagttgtgggggaagaatatgtcaagtgggcccagggctatttttgacctttcacgctatttatctctcctattcaaccagaaattaatattttaatgtttgcagtgtccattagcaaataaccatattttgagagtgcattcccccaaagatcgacttttgacgtgtcctaaagctaaaaccacaaagtcgcagtgtcctgtggcaaaatttgcctaaatatatctagcaactaatagacatgtaatacggatataatacacatatattgtatgcattagtgaaaagtgcaggccatacaataagatttacagtaccgtcataattatggattatattgttaattacacaagcacatgactccactccccaagaaacttggactcttcacttatcgctaagctgccttcgaggttgaagaacagtccatctttatggtagcactcatggtggatgaagtggtagaggtcccgctatatgtttttagtgccttcatcatcaaagctagttcgatattcgattctagacaacagcatgcacgagaatatatagcaatatcaattagatgtgcattctatcattaaacttatactttgagttgagagaattacattaacccggaggaacacgcaagtataatatccacaaaggacacaacctttaggttccttgtgacacttcattatgacatacatatagaaggaattagttatacacgcaggcaaaagaaagtaagtaaataagtgtgtagagtatgtttagtaattatattctcatatgtatgcactagcaacttctccctccttgccagttcttcctcgccttttgctttgtagttgttgtacgcactgtacacataataggataataaagtttgtattaatgaacacaatttaataattattaacacttcatgatagtacacatgcaaggataagaatatcttactattaattgaaagattgttagaaattgtctatatgacttgtgattataatcgagggagtcgaggactgtaacagtcccatgcttcgggtagagcaagaataaatgtaatgatcgctacatagtaatgatgatttagttaatcatagattaaataaagatatatacacagatctaccagacttacttaaaattttatctggctattatgactcttctatcttgaaaatttaggaatgcttgtccaatatagatggccacaataagcaacttggttttgtgcaagccattcttatattcctttatctctttaggtgtcttgttcttaagctatttggaattttcttggagagtgatgatatgatgtgtttgacaaatccttgttcggtccaggtaaccgatgggttgtcgtgtcttctcatcatccatgtattgcatcctaaaaaaatgattattaatcattttcgggattatattgtctatttatttctttgtatgaatgtgcatttatactcacaggcaccatgcaaccacaaagttcacgtccatctttttacggcggtacacgacgtgaaggtcagcgaaatcgagccataaaaaacctacaccgctcatgaaagcttggggcgatgttcgaaacgttatggacgtaagcccttttttgctagcatccctgtaccatttatgtaatcttctcatctcctgtggaccttcttcaagcatgtgattggaccagacgactttccattttcaaacttcgccggtacttcatccgttggaatgtattcctctctagcaagttcatcaaccattttctgatcaatcaagcattccttggcatgttttatcccaactcggaaggtggttatcatccacttctccttttgcttattctctgacttgggggttgtggcttcgtagcacactaggcactttggacttattgttgctgttgtcatcatccttgggtgtgtctatgtcctctttggtggggcattggtcttcatacacatcgagttctatttcttcccattccatacccgttgtgtcttctggatcatgttggacataggacacaagttgtacttcggtttctggtctgtccatcaattgatactatggctgatacagctgcttccccttggctatttgcttgttggcctgcaagttgctcacttcaatgtgtccatcacaaggtgccacctcatgttctttgctatctttttcaacctcatgaggggccgatttcttttgtggaggtgttggtggtttcagcggagcatcgatggaggtcccaaagattatatcctttttgtgccatagtattatatattccaccgcatccccaagtacagctaaaccatcacatgtcaggaagtctaaatcgtatgtcttgaacccttcattcacatgttgtggttgcattttcgcataatcatctggaatataatcctcatgatgaatgcggccagggatagccattcattttgcctcgatacaacgggccaagtgcaattatctgaggaactatataaaccatgatgtgctccatcatattaaaatatgatgcaggaaagcacatctcaagtttgcacttggtctcatgtgagaataaacaatttagtgataacacttcaggattgatgagcttctgtgatattgcattaaaaaagtagcacatctttgtgatagcaacctttacatgttctgatttaatggcccttatagcaatggcgagaagcacggtgaatatgacatcaacaaatcttatagtcatgtgaattgtcacaggatatcaacaaatctttcatgaagactagtcgcctgatgtttgatgagaaatctatgggcactttaacaccgtaaaggcacttgcaaaatgccttcttctccttaggttaatgtaaaatgccttcttctcctcagatgttaatgtgaaataggctggagggagatatactttttaattcttctcaccttctatcgggtgtagctcttacttgattcccatatttattagataggtacgtgatagtacactattctttgtcttgtttggtatgtcaaggacaattctgacagtgttatcaaacacatttttttttcatagatgcatgaaatatatggcatagcaaatctccaaatctttccagtaccacatgtactcaaagaaaatcgatgcttcttgaatgtgggacatgatttatcatctggtttcttacgctttgttccctccgaacattttttcagcccttttccgaacacgcattgtattttctttgtaatggcatgtatttccttcctagttttatgttttggtggtggatcattctcttcgataccatcgaattctgacgtcatcttgcggtatttatgatttatgtgtaagaaacgccggtgacgcatgtaaacaagcttgttggaacctagaaggtaactgtagtaggacccatttaagcatatcacacatcatgttttcactttaatctgccccggaactgaaacattgcggggtaattgttaatggtaataaaaatgatgggcctttactgtaaagtattgtcttaaatactcgtcccacacattcatcccagcttcccataaatcttcgatatcttccgtcaatggttcaagaaatacatcaatgtcaataccaggctatcgtgggccttgtataaggacatagagtaaaatgtacttttgcttttgacaaagcccatgtaggaagattttacatggtcagaaacactagccaagtgctatgtgagctgctcatgcctctaaaagatgaatcgtgatatgcaactgttgaattagcctaaaaccagtaatgattataattccatacctcagtaggtgtggaataaatttcttccaaatccctctcaatccatttgtagcccagcccaaccgacggacgggcccacttatactttcatcctcgcttcgtgtaaaagggttaacccgggagtagcatggttggagggacaatgccttataagcttgtttcacccgtgctaaactagcaaggtggtactgttaacagtgaatttgataagcccggagtagtcatcggcttagagtcagcatcggcttcgaagtcctgagattagccgatgagagttgtcaagtcgtcagttgtcggattcttgctatattcggttaaagaaattgatctactaaagaaagcttatccagaagagaccgagttcaaagagaatgcggcatggcaagttatctattaattaggaatagtttgttagtttccttttatctttaggaaagtgtgtttagtgtcctataaggactttatcttttccttttatctttaggaaagtttctttcttgtccgacaaggacttttatcaacccatgggtataaatatgtacacccggggtctatgtaatctatcttcacgatcaatataattcggcgcatcgccaccttttaccttttctactttattttatcgtccggcgggacttggcacctgacgcggggctgcattggtgttcgatctccggctaaggggtaagtccaatgttccgtcggcccaggcaattgtatcgtttacgtcggtgtcgttcaaggctgcatcagtacattcgacctcttggattgctctggtttggatgatatatttgcctaccaatttatcaaatgtctctgttaatctagtcttagcatatcaatttagctctatcggctgcttctcgttttagggtttctgccggtatcggctaaatctcgttgctagattagattagcttagacatctaccaccctgaaaactcagtcaacggcttgattgtctagatattatgtttcttttcatacttagtgctgcatcaattaagtttggtctactaagtcgtgcttagaaccgtaatctctagcctgcttcttgattgccaataagggtttcatcggggtttcagccggtgagttatctggacgttgcatcggctcataaggattgcatatacatataaattggatttagtcgatgacaacaaaggtttcactgtttaatctaatcttgtggatttcatgacatcggacctccagccgatgtgtgctttaaccttcggatcgatgcttatttatcatatcattatttgccgattggtttctactcgactatattgttattacatcatcatcagccgattgcctttatattattatctacattggacatatagccgattgcttaaaccctatcgctatcggctggtatcggcatcggttattatcgactatcggctggaactactccatcggcttgtcagccgatcgactgttttgatctactatttgcatatcttgtcagttgcaggatcaaactgactggcacactcgcatctcatcaagatttggacctgcacaggagctaagcagatctcccaggccggtgtgttcgaatttttcgtcaacacaaattggcacgcttggtgggaccacgaattttatatccacatgtatgaagaagaagtcaatgccaagatcatggtcacggtggagaatttaatggaggaacaacaatattggctcggggggcaagcgcatcagttttagcatggtggagcacatcagtatcggctcatgaaactgttcaaaaaaatgttatatagaaaaatgaccaaactaaaagttgtaaattttgataagttatacaactttgttgttgacattttttccatttgaaatcatttactaccctgaagttattttgagtcataaaatgaattattatactgcacttaattattttgctatagttcaacttacaaatataaacatttcatacgaaaaatgaaaaaaaaaaactcatcggtgacgggctttagttaatgcccgatagagattaagtcatctcaatcgggaattagtatatagcccgtcaatgatgagtcatctgtgatgagcctagttgttatctcaaacgggcctcaagttggtgcacgtcacggatgatggtcatctgtgacgggccataacgttaggcccgtttgagatatggaatgttatctcaattgggcctaaactacggcccgtcactgataggtgtcatccgtgacgggcttaagttttatgcccatctaacatgtctgtgcgaccatatctcaatcgggcacttttcggcccgattgagatgactttcttgtgacggcccgctatttctaggcatattagaggccgtcacagatagaaggatttataatagtgcttaattctattgttgtcttgggagctttgacgttatggaaacatcgtaattgttctgtcttcgacggtacttctcccaacatggctgaagcattgctacttgctagagaagagttgtataaatggggtttggcaagggctaagggcattcttgcccttgtgccgaacactgaatagtgtttgcttgtagtaggttgaggttgtcttttggtatcgtgaaggtctattgtgtgtgttgtaagggttcttaccatctcctttattcttcttaatataacgatatgcagctctcctgtttgttcgagaaaaacaattgaatttgacataaacatccaaatctctaacaataccacggtaactaatctttaacagttttgaaggcatgaacccactacaccatgacttagtatgatgaggacatccgcaccatgcatggatataatcacgccaacggcaagcacacaagctgaaccagtgattaaggatcaatcgctcgagctcgtgtccgtcaacttaattaccatgtagggttgcataagaatgatttactgaattgggtagtactactaaatgctagtggtgatgttattgtgattaggaatgacggtagagatgaacaaaagctcaacgaggatgcaagatagaatatttcggttcagtttgctgcaccaccccaaattcaaacgagcatacccgttgatctaaaaatccatgtggggatttgatagaaagatctcggaattctctttccgacggatccaaccaatctgaatcgtaagagtggtttgttcctagaaaccaaaaccaatggtgttgcatcacctccacttgggcagatgggtctggtttgtcgtagggcgacgtgccatgtcatacacactgtcctagatcacttcatgtataaatactaagccacccccttaagttcatttggtgttttgttagatcataatttaggcattgttacttcatcatgtaattgtgtgcagttggctacatcacttggttacttgtctttggaacatcttagtaatgagtacccttaagttatcattttttgttttttatttttttttcttgccagttctcgattgctcataggaatgagtaccttcgtggtttggttgattgttctccatcaaaatcactaaccttttctgaagttggtgtactggacgctgaggcgcaacgttcttgaaatcatgattagtgagcatcgtttcttgcaatcaaatttatcaacatcttagtacaattcatctgccatgaaaatatattcttggcacctactaattactgcatcattctttttttacttgtcaatttggcaatcgacacaatttctaatgcgtatatatatatttgattattacttttactaactatatgtttataaaagatattaaactagtatataaaagtgcatttcatgaaaaatctattaatatctttttttggcactttgaccatactttttcataaattctattaagtttatgagattatgaatgctattttcaacataaatattcatctaccatctttatattctgaaactaagtattaaggaaattgagcgtcaatgtttcaaaaaattaacatgaaaaagtcaaaagatttttatttgctagtctgacatttagcatttttgtcgtacaaactaattatcgttttgcagcaacgcaggtagtatttgtgtaggaaatgattaattacaagaataattatgattacatgattcatgtaatataagtcaaataaatatatagtttctgagaagaaaatgaagagaaataacttaaattattatgaggcaggaatgatggagattccaggaaagtgattcgatatgctgcagaagctagtactaagatcgccgacaatgatcagctgatggatcagttagctctttttttttttcgcgtactgtgtagtgcttctccacattcttaattacctaattaggtttagctgctctcgggaatgtcgacatgaccaaaaaagaagtcggtacggcgcaacctaacagactagtgtgatgtatcagagcgaatattaaagtgcttagtatttagtttaggggcttaatctgacctcacgttgtacgcgattgccagtctatagttctatactgccagtgagccatcagctgagagcgtatgacttcacatatttgtttatgtttcttcttattttaaaaaatatcgtatgacagcaacatagatacacctggtggtagctactgcaagactagctagctagtacaagaaaaaaatagggtaattttaccatttctgaggaggtacatagcgatattattattttctagtataaaatttagtacatatagagtatctaaagatataaaaaattttagtgtaaaatttagataacttaaagatactttcttctcaataaccgtaaaattcctcaaaaaataattaagcaagctacaatagtcggacaatgagtatttgcatggttcacacggtctatatgtttttattttccttctgtagcatacaccacacgcacacttaataattttgcctcgtaatggtttcaccttctctcgatgggctgggcaggtcggcttaaacatgccccatgggcctcctgttgccggtcgttaaacccaactcgaccgtcaattgttttcaataaaataaagaaaagacaacatatgctattgttcttactttttaactcacatattttcacaagttttgttggtttaacatgtttcgcaattttaagtcataataagatcatcctcggacaaggagatcatcaggaacttgggcccaaagttaactttggtccctaaacgttcccatccaaagcccctagaaacacctgatgaaaatgcaagtattaaacaaggcagttgcattagcatcggaaagaatctccacaatgttcaaaattttgtatgaggaacaacgaataatatcaaagtttgtatgagaaacaagcactactaaagccatgttgatgtaagtcacgtcttgcttgttgcagacatggcttcgtaagccttcatacaatcagatatgaagaggtaagtattggattgtgcattttttttatttgtttggggaagtatatacgatgcgcattttttatttgtttggattgtgcaagagcttattttggtgtacttgcaagaacatgatggacatcaggacatagaggcttcacttaacatggcagcacttacatttacaagtggattgtctacaccttacaacaatttacgaatgatatacaaacagcaggtactagtgatgccaaaacaatcatgacttaagccaatatgcgtttcttttgtttatatcgattttatattttttccaaaccgtatggttccaaccctggaggatgtttgcgctgcaatcagatgttcgttttccagtatactttgctccttgttcaacacaaagattatatatgctttcctacagagaagtaaaaaagatgtaacatcacatctttcaagtcttcctgggacttgactaactcttcgagctaagatgctacaggattcatttgccattctgttactaatcctcaagaaaaaaaaaaagaacatgtaccgtacaggaaaaatttgaagattgaatccaacaaaacttagtcaatgtggttagactgactgtgtcggaatcctttcctcaaatactctgtccctagccttttcagcctgcaagcaaataaccaacagaaagataagaatgtaaaacgttcagaacatagtataaaaaacaaaatcaattttttatatatatcaggtatatgacttcaagaggacttcgttttgtagactgaaacgtggaaaattggttcatagaccattgcaatataccaagacaaggaaacattgataatgtccctcgatgtagtttttagctaagtaggaccctttgtgcattttggtacattaaactcttttgaaatagatttacacaagtaaagttaacacactttgggtatttcttaagcttcttttgtatggtggtacaacataaaacctccaaaactgactaccatgttaaaaccgtaacaactggcaactgctttttttttttacttcatttgactgcagactatattaaaagtttaacattccaaaccggattgaattgagcttggtatcaggctcactttactttttctgcatggtttctaatatcccaaatcactcacaagaatctgttagtattgttatccaaattttgaggcattacggtttagagacagcctgtactgataaaactttatggagaagaaatggaaaaaaggaacctaccatctttctccagtttgtcattgcagtaatgatagatagaagagtgacctgtgtcgctccaccagctaccatgcccatccaaaaacccattcctcctagatgcattgcaaacccaaaaaagagagcaacaggaactccgacaagatagaatgcacctaggttaacataggcccctagatgctgccatccacagcccctggaaacacctggtgaaaattgaaatattaagtaagacagttgcattagcat

SEQ ID NO: 4571 - DNA, 21868 bp, Oryza sativa
cccccgctccgtcgccagcaacctctcccccatctgccatcacgcccgctcgactacttgagagaatcaacgacagaagagaagagaaaaaaaaagaaaagtgaaatgtggggcccacaccattttctctcacttacatgtgggccccacatatcaattttattattttcctgactaggatgtcacgtcaacgaaaccaggcatctatactgtcccgggaccttttttttttacgattttacatagtttagaagtatacatttctggtattgcagttaggggaccttatacagacttgacgtaaagttgagggatggccggtgaacttattccaaaactttacagccgttttagcatgtaaattaaccgcagatggggcacaaatttttatccgtccgatatcgaacctcgcagcctcgactgccgtcgagcccgctactccgtgacgctccgtgctctgccccgccgccaccgcacaccactctccgcttcgtttcgttgttgccgctgagtcgccacgtctgcgccgccccatcgccggcgccgccgcgatccgttccgcaaccatctctactactctgcgccacttatgcaaaccggcctcgatcctcaccaccatctgctgcaccagcgtcggttcacgccgggtccgttgtctacccaccttcgctatccataagggaaggaagagctgatacaagcggagagggaatctagggcgagaacgatctgcgccgtcgcctcatactcaccggtccatactctgcctccgaccctttatctctcgtcccagcttctcctttctctgtacattcagcccacatcattggctcattgcttcaacaccctgcgagagattcggcttgcctaggctccgtatcgatatggctttgtgattcagatttgggtctattcatctttttccccttcgccatgttcgttctgtttcagagttcgtttttgttgcaatgactagccagatagatgtcttacccttaccaaatacccaaacggcctgaaaatttttgactgtatgaatcctcggtgttcccaagaataaaagtgaaaatattttacaggtgaaaaaaaaactgtattcccaagaaaatcttccttcaagaactgttggtaaaaggaaatgtgcgaatgaaaattcatttgcagctggaaaatttctgttgtctcagcaatagtttcaagaaaaatctaggtcgctgctcggtgaacccgtcgatttgttcagcttaaggaaagaaaacgataagtgacagaacatggcttcaaatttcaagtcttgcaatatctgacagttctacttctaacttgtgcagataaaaaaagtactcctgtatcgaagcagccaacagtcatccgagcagcagatgccgttcttattttcttgggcttaggtgaggcgcagttgttctgcaaagaggaattaatggtttaattaacaccagctcaaaattccaagtggatcggcctgacttggtttaagctgaatttgagcccatgaggtaatcaaagtttgggccaaacatgaactttttggcccaaaaacttgtcgccgtttgggctattaccttttttagagtatgtgggctaatactccttaccatattccgttgcagtcgattccattccatacatcaacacaagtcgaaaacccttcaggagcatcggttggatacgcgccgcacgcagccctacagcctgctgtcgcctcccggagcactcctcctggtccctggtaaattaactaggtttaattcctccatgcctctgatctcgtatttcttattaatcgatttatcattatcattagctctaactaattcggatttcgttgcatcctcgtgatatattcatgctgtttttcgttttgcgttcgtttgagcaagatagattatagatggataaacgtctcctactctctcatgatcaggctatctggaggcaggattaggagcacaggccatggatgagaaagacggcaacaatggccgatgcaatttcagtacggaagatcctggggaggacaaagccttcgctgcctcgcttgtagatcaagatcaggatccggatcctactgatgctgccctactggataatgagtgttccagagttgtagatcaagatcctcctcctgatgctgctgccctcctgtatgatgagtgttctgcagcgtatggtgctcatgtagccaagaagaacaaatccgaggcaagtcatcttgctggccgaccaaaataaaacactacttttgaatgctactactactgtttcaggatgtgtcctgtatacaaaatagtggtctgattccatttagtgacgcttaattcttgtacatgaacttggtacttgcagtgcatgcgggtgtcggacttgctatgaaaatagatttgccgttggaacttcaaagttataatctagtataccatcatgcaagctccattagcttatgaatgatttcaaataagaccttgaccacataagatgttctcttgtcacttctgcttgaacacttagcatgtcatcttctttgtgacgactcgtactgttatgcgactctccttaccttctgtactacatatatattagagagcattctcacatttatattttttttccatgttaggtcaaaggagcaaacgtggaaaactgggcatgtgtaaatttttctttaatgggtactacagaaacacagaaatttgcatctgagctcaaaaaagcgtgtgtggccattgggatggtaaatccgtccactctttcctgggcaccattactttggcaacatgtgacacatctgacattgactttacataataggatttgaagtctgttcatgcagtgttcgtagacttgaactctcccaataaactagaaagtactttgcatgatgtgcaagaactgtttggcggacaaggagtggaagtaaaccagataaaccttctaattgtaattcttccagaattcagacgttctgatggtatggaagttatgatttgcatcaaccgcacctttatattcttttttttttgttgacagttgcatgcgatgttttgcagcgaaagtcaaagatatctgtaagaaccttggattcttatatcaatgttgtttgcctgagcatgctaggacacccagcaagctatacctgaacaatgttgctcacaatattcgttccaaggtttctctctcattctgtttgatgtgttattgttcttttttccttttgcacaactctcatgctagagtttcttaatcatgttgctgagggcaaaacacttttttgttcttgtgaggagaagagggtaaatggcgactctgagaaagtctatggttctgatgagatgagagaagatagtgagtcagatctaagtgatttggaagatatgggagatgctgactcagacatcatttacttggaagcattccctacatcagatgaagagatggatgatgatgatgattatggtgatgatgatgaatatgtaccagtatctcctgatgaagagatggatgatgatggttccgtgcagcagatgagagagaatgatgaattatgtaaacagctccagcggctggaagagaatggacatgaacaggccgccaatagcgcagaaggctgcctcaaaacctacaaggaaatagagactcatacagcgttagcaggaagtacttattctgagttaagtgaaccgccttcatttgaagccttcctgtgccctggtaaaactcagtttctggtctagtccaaagttaatcaatctaccctaggccagcagcttgttcttaactcttttgtatctcccagtctagtccattcacctttcttaataatttcgtgtggcattcgttgtgccctttttattttgcgttgattgtcctttcttgtttatgctttcttgcttcttcctctgtctccaggggaacgcgagcacattctcaagacaggatgggaaacacaacatccatacaagaagcctagcggcgtgtcttgggatgagtactctaaggtgtttgacaccaatggctactacaaactcagcaacatgcctgtggaggataaggacttggttgctgcagaatgtaacactcctgaagtgaggcgatgggaaaatcacatcagtcatgactatgatgagctgcaggtattgctagttatttagtacttccttcactcataaggttgttttagaaattaacactgtcaaaagatttctgttcttgtagatctattagacctaatggacctttcgataacaatttttactatagagatatgtgcataccattttcatgctatcaatctgaatattgaaaaggacattgacaactgaagtttggaaaatcttttttgatcaccacctcagcctagcaactgttgtaaatttgctactttacttgattgatgccatgatattgtggttgaatcagtgtgttcttctgtttcggaattgtatatatttggtttgtcgattcaccttctttcttcaatgttcaaataatgccgcgaggacaaatattttgctgatgatgttctaagtatcatcaaacaaaatgtcatgcatactcaaatcaaattatgcatcatatagtcctcggatgagatgtgcactataccagcttgtgtgttacaactcttgtatgatagttaatgttgcgtgcttgatgcgagtttgcaagtcttccaacacaaaacaatatgagaaccacataatcggaaagttgtgttcaaaaccagggatctgatagtctgaatataatatttaccttgaacagttgacaaacatgattggggcaacctaagaacatacttggctgatggattcttggtatagttttaacgtttggggtttttggtattttcactgctatgcaactctctttatctctcgtcatgattcataatatctttatagaatcattctcaaacaggcatttgttcccttttaggtcgaacgtggaattgtgagacgttgggcatgtgtaaatttttcacctaagcgtaaacatgcagcgcgggttgtcagtgacattataggaaagtgtatagacatgggaatggtaaagccctgcatactttccttgaacaaggcattctactaatcatgtaccacacatctgacttaatatctttgtatgataggaatttggtacattaccaaaaatggatgtcgatgtaccccttacttcccttcatatacgacgtactttgctggatgtgcccaaaaagatagacattctaattgtgattatggcagatgatagaagttatgatggtatggaagttagttgtgtcaggttcactgttgattttcttttttgacagttgcatatgatatattgcaggggaaattgaagagatgtgtgagagccttagaattgtttatgttttctgtttaccctgcctaagcaaacggaatctgaagagagttgcacgccaaatacaattgaaggtcatttctctttggtctcattttgtttgttatagtgttatcatgtttttggtttattaatcaggttgtaaagagttatgtacgtcgtcagcgactgcacttaccccttgtgtcagaagtcccaacgattttttggtgctcacacgatacactatgatcttggagaggattcagaggcaggagtggattcagagggcattgcatctgtatgtctcttctgtaactaccatctcctggatttgcgttttgttgttacacaatccaattggcatcatattttttgttggagtcatgtaggtggcggcttcattggactggccaaaattcagaaagtatcatacattaatttcacatcaacctcataatggcatcataaatctccattctagacgtggtggcatgatgacgtaattctgtgttctacataatctgtagctcaccgtcactttgatccatttggtgtactaacatttttcattttttttccagcaagttctttcggtccttctacaaaatgataaaagaaagacccaagaggataatcttctacaggtagtaatacttgtattccttgattagtgtgatactattagatatatgctaacagtgcaacatcttgcacagaggtggattaatggaaggtgagatggagcgcatttgcctgcaagaaatagatgctattaaacaggtaggaatacaatatgatttgccttcctgtatcttggtttgacttgctcattttgatggttttgtgcttcttcccttgaaaggcttgtgcctattcctacaaagaagatcaaccatcactgacatatgtggtcgtggtgcctactgcatcaattggttagtgtgtttgctgattctgcttgtagtatttcctttttaccgagtgaggtgaatacacatacatgctacttggctttggtgactgggtattgtttcataggaactgaggctgacaccgctaagtataagttcttttgccgccatactactcataaggtacattttagtttggtgaatctgcaaatatactcataaggagttgtctatccttgaaaaaaatatattgagctagtattggttgactgtagtcaacctcccgcgtggtccgctaccacgttgtccatgacgacaacaactttctagctggtgaacttcagtctctaaccttgaagcttttcaccttgtaagtttcacagctctacttttggattgctttgctgtgatcaactatcagtaggcacttctgaccatatttgcaaatgcatgttcatacccagccgtcatcgtcgggaatacccaaagatagatgcaggtgagtccttttatactacctatcaatcaattattcttctttcttgtgtctgtgttttctttaaaaaaaaaggtgtgggggttccgtgttgtcgaaagggtagggggtattctggattttggaaaggaaagaaatgctgctccaattggttgatgagcacaaggggcagggcatgtccttttttgtgatttattttttacgagtaaccgaacaatgagggcatgtccttttttgtgatttgtgtgggagcatacattttgcgctagtaaacactactatccaaagtataatattttttttgttgtttgaccaagtttatagaagaaacgataatatttgtgatatcaaatgagcatcatttgtagtttacttatttgacatggtcgatgtattctttctacaaatttgatcaaacttaggatacccctccttttccaattgatcatcgtacaattgttttaggttattctgaaatgatcatcatactagtattcattttttaagtctattcattatttgtgcatggaagtaatggacatgtgatgtcttgtttgttattgggtagaacatagtgaggatggctcatatgagtttgttacctcagtaaacgtagtttttcttggtcttgttgcactcatgtaatataatgataattgggaatggagggagtacttcctagaaatgcttatattgtatgttctgcttatgccttgcacatcggatcacttatgttttattactcactgcttattccattctatctagttgtaccggcctactacgcagagcgtgctgcattcaaagcttatcgcgcagagtgtgctgcatccaaagcttcttaagaagagcaaagcgagatgagaatgttgctactctagcaaaaattaatcagatgtttatctaacttattaagatgtctggtgtattttgaactcaaaaacgagtgtgcatatggtaacctgttaccgctgttgatcagacgtgttatggcgcttgtttttgttaatagttcaatgctgcgggttttgaaattgcatgtagtattggtcttttttaagacagaacaatccttgtacattttcaaatttaatatttatatatatcatgatttgaatggaagtactatctccattccaaaatatagcaatattttttctatgtatttggatataacattgtcctaatagcttgaagtagttatatttttttgtgctgaacatggacgcgttgcacgtgctccggttgtccggcacaaatccatcgtctccgcctgtggtgttcgataggcagcgctttcagtttggttaatatggctgctcaggttggatttgcaaggaaggagcgattgggtaagatgaaacctggaaacgatttgtgccgatttgagaatttggggtcttttcgccatttgcgcaaccaatctacactaaaaaaaagaatataaatccaccagaaagtgatgaattgaagccaaaatgataaaagtgatgaatagaggacaaaattaaagatatagaatgaattctaccgggaaaccactaccagaagaccgaacgatacataacacacctaatttcactgttctacgtctatttttcgaagtgtttgcaagtatgagcggcaacgggaatcatcggaacctacaaatgtacaggttatgtacattaaccaaacatgcacacagagattagtgcacagctcgtagagaaaggggatcagatgtaatctgacagaactgatgctgagacccgcttcaaggatgaggacactttggagatgtctgaatcggtgtggccggctgacatgaagaggcgtattccgacgggaagtttgcacctatccaaaggtgaccgctttgacgccacgataaaaactgaatcttccttcaatacctgttggaaataggatgctgtaaatatatgcaagtgaaagttcatttgcagctggaaaggttctgttgtgtcgacatggacttaccctctcagcaatagtttcaagaagatctatatcggtgtttgatgaacccgtcgatttcttcagtttgaggaaaacgataggtgacagaacatggctggaaatttcaagtcctggagtacctgacagttctgcagataaaaaacatcgaaggcatcaaggtgatcagcaggcaccagtaacgacatattatgcctgaacaaattcaactattgaatcccataatgtgtttcacaatttcaatgcagctgttttgaaactaccactaatgggaaaaatacatgataaaagtgatgccacaacattacatgctaggtattaaagcattaaaaactttacatctacattaatcacattaaaaagtaagtaaatgttggtcaaataagtatataaataacaagataatcttcttaacctttatgcaggaaagaaatgttgctcctcaggtctgcaagaactgacgggttcccctccaggtagctgacagcagaaaccgcagcgctggcaagataaggtggcagagaagccgagaaaacatagccagaactgcttagacgctgcaaaagcacaataacttaataggtcaagatatttaacaacattctattgcaattgattttccgtcaatctagagttgcattacctgatgatcaacaactctaacacttcctgtacaaaagccaccatcagtagctaatgcattccccattccagcagtgataatatcaattttgtcaatctgcacatgcaagaaaatgtaagaaataagatgtgccaatatatccaattaaaatggtcagtaacacaattttcataaattaacaggtgtctaccaggactccatggattatacctattctttttaatcttctactttggtgcgatgagagaacaaaaatgtcaggggtactcactggaactccataatgttcagcaaggcctcgtccagactggccaagcacaccaaaagaatggctttcctccagaataacacggaatcgatatttctccttcaatctgacaatctcatccaagggagcaatttgaccagaattctgcaatcgtcacagtaagagaggatatatccaaagtcatatgtttaaacgatttcatgattttctaggtcgtaaaaattcatgagaaaaatgagaaaaaaccatactcatgtccaatcagagttatcataaaaggcaccacacctggtagatagattctacaacaatgtatcgtctgatcttttctgctcgtttatttccacgtgtaagtttttccaaagtgtttgcaagtgaagccatatcattgtgtttaaaataaacaacagtgcttcttgacagatgaagaccattttgcactgcccagtgcacaccttcatcactgcaatgcatatagaaaacttgcttaggttcaaacatgaaaaatcaagaaaagaaaagtgctacctagtaaaagaactatccaggtatggagctaattgcatgaggaagaataacaactaaagaatagatacatgtaagaggtgacaactttgaagatcacaaggcagacatatacactactttctaaagggtttgtgcaggattttcattctttttttttggttggggggggagggggggggcaaggaagcagttttcatttgatttctttcttacaaaaggcaggtatataaaaaatgtgaataactaaaacatttatataagctgttgtactgaaaaaaaaagagaggacaaactctatatgtgccggtattgttcatattactatgtgggcaaaaggttaacttacgcaactatgatgtctcctttcttacaaaaggcaggtatcacactaaatattgtagaaatcccatatgaatacagaattgagtctggagttccaagaaacttcgctatttttgcctcacagtcaaggtggacatctgcaagtgttccacaatgaaaagataagtttctcttccatatttgcaacacagatcagtggtggcaaaaagagagtatacaaaccaattgttccataaaagccacgtggaccacaagaaccaacaccatatttctccagtgaaccaacacaagaatcctgcaattcacccatgtcaaatatcctggaagaagtgtcaaaataactcctaaataatagagttttggcttacaataatcttctcattgccaatcaaaccaagataatttgctgatgcaaagtttataacttctttcccatcaatggttgtatgtggagcagcagcactgtagcaagaaacgtaatagtgttaagacccccaaaactcaggagaaaaaacatgcaatgcccaagaattgcaggtattctgcaaacataaacattctcaattccagcattacacatccataaacaaggactcatcaaacagatgatatatcatgcattgcaatatctgagggaagggcaacaaaatgaatattctacgagtgagagttatttgagattggccacgctatgttagggatgctggaagttactcctaaatttgtattattcagaaagctgctgtccattattagtgcaacgcaagcacataaatggagtattgttgataactggataaagatacaagattataacagatggaggacaacttttataacaaaatactagcaagatgcatttggcagcatgtattaagtcatttgatgttcttattaacgtcgtaaaaagaagaggaaaaatgtttgagaagatactgcaagttacagaaagcagatggcgattgcgaatcaactataataacttcaagaaaagttagtctgcctaaagaatagaagattgtaagcatttggaaagcaagggatacatgatacttcaagtgattcatgatgccctgtattcgtctaaaatttgaccagatttgtggcatgcaaatcatctttttgcatgcagtatttgtcaagaataaaggttcaagtcaatattgccttcccacatgctgcactgcctagttaagttaaccaatgcttgagcttacaactgccccaatcctgtcatgctttctctcatagtttatctagtaactcactacttatgaaataatatagaggaatactgaaaacgaattatttcctgcaaggagctttaagaaactaccttcagaacagacactatcaaacataaaaacttccttaaagtaagaaaaaagaactcccatatggtgcatcaactaccgtttaaactttaattagaatgtaaccatcatacaaacctttccaacattggtgtgtcaattcgggccccatccttgatcggaggacacagaggttctggctcccattcatcacatagctcgtcaatctcctgcaaagatcaaaatgctaactttcaccaacaagttctggaaagcaatgaccaaaaccaatactctaacacaaagtaacagcgaggaacaggcagaagataactttaccttttcactgagtggcttcttgggcggtttgtagctcttcctagaaagctgaaacactatgaccgctataaggagcccttcaacaaccaggtgccctgaaaaatggaatgttaccgaatgtcgatcgcccttatcacatcacaagttcctcattgatgtggacgtaagaggcttaccatcgatatgaaccccaaagacaactgcgcgggcaaaaggggcattgaatgcagctgagacacgagcaagcaccgctgcggtggcattcactattggcaatgccatgtccatgtcctaatgcagcttttcgtaacacggaatggaaactttagcgcctcaaatctgccaaaaaaggcaatgggctgctcatcaatcaaccagatcggctgcagagcagaatcaatgttgaaattcatataagagtaaattttactttgggccaccttttactactggtgttttgctttggaccaccctttaactaatattttcactttgaaccggaaaatcttacctttgtgtcactttggagcacactcaaatcttttatctatctacatcaaacttgtcatctgtcaaataaattgccaggtataaagcggtgggaattcactgatgaatcggagccggcgtactcgaaatcgttcatatgcttgagaagagagttagggtagtccaaaatgcaacaaaggtaagattatctgatccaaagtgaatacgttgattaaagggtggtcgaaagcaaaacaccggtaataaaaagtggtccaaaatgaaatttatactccttaaggtcaaggattgaactatagacacggaatgtaatcctcaggtccaggggcgaacgatacgtgcgccacggcggttgatactactactctactagtaaaactaaggctactaagaagacaaggtgaaaacctagcttccagatctagaagagaagataaggttactgcaaaattcgagagaaggcgtgggtagaacgggatggatggggaaagagagaggatgtgaggtcggcacgggtgctcaccggagccggaagggaagcggggagcaggacgacagcacccggtcaccgctgctcgtggaacggatggagatcggcgcggcgcggcgggcgaaccagcgaggaggagacgttggggatcgacttgggcgcaaaacgagtcaaagaggggagaagagtatgcggcggccttgcgacggccagcgcaagccggatgtgacaagtcaagagagaagagacccaatccgttatgcttgcacgttgctttgttgtttggctttccaaatcacgttttcgatctgctaaagggccgtttggcacgaccttagactctagcttcatctctactcaagttaaaaccaaaccaaacgattaaacgattttagttccaccttaaaaaatgaaactggctaaaatgctctcacaatataaattagagatgtgaaactatgtttatgtttagtctatttcagacctaatttttaaagttaaatttaaaagttggtgttctattaaacgggtaagtctatggctttccaaatcatatttttatctattaagtctgggagtgaccgaaataaaccgaagtagcacaatttatatatgttatttggtggtcacttatgaaagacgatatatagcctaaaatagcgcaattaataaatcatttgtcaatttaatttaatccgagacgctttttaagtgaatatataagaagactgcgaagaacctatgttacttatttggttttcagtgatgtatgtagatattataaaatgatataaatagttctacaaatatctgtcacgacaattggaccaggtggtgcatgagtttttttttatccagagcataggtggcggtctaatctagccactaagatatatatttctatcaaacttttatacttgggagatatttctagtcgtttctttcatatatttttttggccttgtgcattatatgcagaggtcggggatcactcagttagattttattctcttgatgtaatgttattaactaagtttaaataaagcttacattatttaaaaatatatatgtttttataaaaattaaagtgtgataattattatcaatctgatggttataacacattataaatattgtttaagtactttttaccgtctacatttatatgtttgtttagacgatttaaaattgccgatgagttataataagtcaacttgtaatttatatataactagcaaattgtttgtgcgttactacggtttataaaagaacaatgatacgattgaagaccttttgctaaccttgtgcacagtgtaggaagaacattaggaattttcagagttgcaacaagtgccaaaccctaagttgacacccttgcttgtggaattcaagttgcatcaccggaagcttgggtttaaaagaaactgacatggatgggtttggaacattcaaagagtcacgaaccggtttcataattgcaaacctaggttaatgggcaataaaccgattgaaatcagagaggaatattttctcaataatagaaagccagctaaactgaattgtgttcattgtgttgaactgatccagcaatgggaccgacggcggttcaccggcatcgacgatggaggaggccatgacaggggcaggggcggaggtaggcctagggtagttatggcttgactccaaaatcatgttgaaatttcttaaactagctgggtggcccacgcaattgcgtagctagcacataacaatcatatattttttaagtatgattttacttaaaatttattaaatagatgtctcattgttaagactttaaaagaccaaatcttatcatcctcatgtttttaattatatagtttttaaaaattacaccaattgctaccccttatgtcatctccttctttatttgcttgctcgatctatcactatttctattcattcttcttggaacctttaaaaattggatttttacagtttttcgagtttattgtcacgttgggtttcgtttttataatttctagatgtctcgtcaaatgttgccattatactcctctatgtctcgtccactatctcttctctttattgtcattgagattttaaaaatcgaacgtaattatagtttaggttcatttttaatttctagaagtcccgccaaaccgtcagcggttttgccattgtactcctctacggctcgcccgctgtcttccttctttattgtcattgagattttaaaatcgaacatgattattattgtttttttttactttttagaagttctaacattggacttgtagtttcattttttattatttttagaagtcccatcaaacgatgtcactatatccctctgcagcccatccgccgcccactctttattgtcattgtgattctaaaattcgaacataactatcgttgcaattcattttttattttctagaagtcccgtcaaccgttggaggctctgcaactatactcttatacaccccgcccgctgcttctcctttttattattgtcattgagattttaaaaatcgaaaatgattatcaatatgttttttcttttttactttctagaagtcccggcaaccgctttacttgtttgcttcacggcctgcctgacgtccctccttttaatcgtcattaggattctatttggtgttttattaacaatttttataagtcgtatcaaccaccaccaactctactcttttataggcctgttacttaatttatctcgtcatgtgttttagatggtctttttttttcaatagtctttatttttgtcacaaaatttagttatttataaattttattcctaattgaaatcttttttttctatttcagaatttattttttcaaaaagatagttaatattgtattgtgttcttttaatgtttttattttttattttcaatttcatttgtttcaaaattgtatttctacttgagctctcttttagttttttctaattttggatattattatatttttttattcgaaattttaattaatctcgtattgggttcttatatggattcttcttttaacattgcttattttaattccgaatttcagctaattttaaattgtattcctacttgaactcttctttattttcttttgctaatttaggatttatttttatttttattccgaattttaattaatctcgtattgggttcttatatggactattcttttaatattccttatttttaattccgaaattcaggtatttttaaattatattcctacttggactctcgtttccttttctaattttggcttttattttatttttatttcgaattttgattaatctcgtattgggttcttatatggaaacttatttcaatattgctaatttttaatttcgaattttagctatttttaaattgtatttctacttggactctccattccttttctaattttggattttattttatttttattttaaattttgattaatctcgtattgggttcttatatggaaacttcttttaatattgcttatttttaattccgaatttcagctatttttagattgtacttctacttggactctccttttcttttttttttctttttcttcgattaatgtgggaatttctagcccctacagcgaacgtggtgtctcctttcaaggctattttaataatataatataatagatagatagatagatagattaccatataaattttacagaatatgaacaacttattagttaagccttagggttatccctattcttcgataatttctgacttcgccactaggccaaggagggttgagaggtactgcttctgggactgatgaggagtgccgagacaatggagaagtacataagcacctcgtggatgaaaacaccaagcagattgagtgattgatgtagcaattatgcaaaagaagagaaaaatctagacagttcatgtacgtacagatagggttcatgagaattttttattaagaaaactgcagatcgactcatgtacatatgaaaaacccgatcagacttcatacaacatatcaaaggttcaagctgggaggaagaactgttgtacatgctatgcattgcacgtagaatagttcttcgcgcagagtactatacaactatgcacagctcatgatcatgaaagtgacagcttgcagttaggttcgatcaagctattgtaatgtccacttgcagattaaagaagaacttgatgttattgaaaagcaaactattatatactaaaagttcattaaacttcctagaaatactttcaaagcgccacgtgatattctacaaatgcttctacgccaccacgtggcgctctaataaatagagaaaatcatataaattctaagaaaaaagcaaaacatccaaccatcaatttttatttaaattgatggacccgttattatcaaccattagattagatctatcgagtaattaacccctccctcctaatatctctctctgagtatgcacgcacataaaaaacaatcatacggcatgtacgtacgtataagcccacctataacagatttttacctttctttttctcaagtacttttattcactatataaaacacaatcgtggattagtttccttttgaagcacggcatactcatatgttacctcacctcacgcatatatattttaactcacctctttaaacgtattcctataagagaaaaaaataatacataaaccctgtgcccaaaataacctaatcctaagatttatccttaagattggattttattttactaagggagtattcacgagaaaaaaaaacataagtacgataaaaatcctaccaatccttcactcctaattctcaaattaataattaaaatatttttatgtttgtatgtaatacatacagttagaccagcccctcctccgtagctcctttcgctcatgtttatatgatagttaaacaggatttatgaattaaaaaaaatactacatcccatttaactatatttgaataaaatactatcacatggaacaatattataatccttttattatgtctttcgcatccaaataatctttttaactggcagcggtactatattcagttactgactttgatcgctaatctttttaaagaaatatataaatatgtgaactacatttttattaaaaaagttcacatggaacatattctatcccttttcatgtcattctcatttaaatagtcttaacaattagcataaataaatttaacaacacagattattctatcatatattatcccatgaacatgtataggtgaggaagatctataataatacaaggaaaataatatcaaggcccatgtaaaatcatatatttgcaaagaattattacttgcgcaaatatttttccacgtggttctcaccactaaagctattagattttctgaattagtgtcgaatgatcaactctgctaagttttaaaagagaaaattatatttgtaccactaaaatttagtagtactgattaataccataaaaacaccgtgcctactctataccacaaatcgattcaaaacttaaaagaactattttcattacctctattttctctatgttattccctaaagggcacaaagtatggaggacagggcatgctacgatattgtaaatactatgacaatattgctaaggtgatggtccagtgagaggtcactgttgttaatagagctcagttggcttagttactgatgcaatcatttattattgtaatgacaatgaatgttgaaattgtgccccacactgatcttaaggggtatggcaacgtcgatgcgaaacccatggtttaaggcataagagaagaaaaccatgacgggctatgttatgcttgatgcgttagaggaacatttatatataattttagtgattttatcatattaattgataaaagcgatattttttaatattcatacatagtttagtagatgacattagtgtcatggagcaggacgggctcagtaagtatgttgttcgcatgtatggaggttttttggtgaacagtatgtattttatggcgtacatatatggatattaggacagagaggtttctataaatacaagagatatttttaggagagattaggagagaggtttctatacatataggagattttgcagcatacgtgtacaggagatcaggattacatatctactccctccatcccagaatataagcatttttagagttggacacggttattaagaaagttgataggattaaatggggggggagggtgttgtgattggaggagaagtgaaggtaggtaggaaaattgaatggtggagggttgtgattagttgagaagagaatgttggtggagaagttgttatattttgggacaaattccataggctataagttgttatattttgggacggggggagtaataagtaagacatggacactgtgaagtgaagatggattctttattatattattgatatattaggtttatttttaagtataaatatggttctatctattaaaagagcacatacctttaagacaatggtaatatgtagtggtgatagataagtatatgtataaccgggataaagtaacttttgtttgaatatcatttgtctatttgacggtatacatattacttttatgattataattaaagtaatctatggtctttatagcgaatatggtgatatatgacttcttttaacattcttgccggcgcagttgtgcgggcttccttcctagttgtaataatgttgacaagtttctaccttttcagtagaaaaaaaatgtacgctgatgaattttgcatggaaaattaaagaaaaccacacagtaactgaactcgatgtagggctcacgatctgctagaaaaaagcagcattttgcctatgcttgataagaacatgtgaatccataagttcatacacattcagaccggcaatattcaacatcagaaaacccttatcccaattaacaaaaatccatatcctgatggcgcttggggaacagtggaaagccttgcagtcgatagcttattagggttgatcggcagcgaaggcgaatcaatcagtagaaagattgtaatgctttcaatttcgccctcatggaagctactgatctgtacatggcccatggatgcaaccgatctggacgtatcctcaattgtatcactttttgtagacttcttgaactattattagtgagatagaaaaaatgtaagaacaaaatcaaaatagagttgaaatatgttgtaagtataggggatatagatccaacccggtactagcatacctacctaggtttcatgctaacatcggcacataaactatacagcatcctcaacagtatcatgctttgtagacttctagaactattattggtgagagaaaaaattataagaccagaataaaaatagagttaaaatctattctaagtataggagatacagatccaagaatggtcaatgttaattagagttgaatggaagctatgagtcgtctaataattgatctcataagggttttaaagcatcattggcatgcttttatctttttaagaattatatccgtactcaaagttgagtttacaaattcaggtccgattcgagagttgaagaactagcttataagcatccagttggtgaaaatatatagaaactaggttttttggcttttaactagtagtttattctttagattctatagctatcgcttctcaaaacctgaatgagaatataggctatttggttgagctggatattctagaagtagttatagctgctgaaaacttctcaaatagggtattagctccaccactagggatgaaaacaataatgtttcaaggtatttgtggtgccagcttcccaatataagaaagaataaggaggatgggttgaccgaggaaaagttaccacatacccttcacacattggtgtctctcggcctattcacggccttcaccgtacatcgacagtccttcggatatacatgtcccgcagacacccacggtccatcagaccttcacacattgatgtccctcatccaattcacccccccccccaaccccaagcttggctacttgtgtttgatcctaaaatgaaaaccagggttgacgaaaacacaaggttgtcgttaggacctaggactatattccataaggagaagagcttcatggcaagagtaatgcaccgtgcccatagcccatagttccagcttccacctaagaaaaaggtgatgaagacacacataaaagtacaggccatccaatgcagagtatcttcgaaatggggaggattggtgaggagtagcaagcgtggttcttttttcgggtgtgaggaaaccgggactttaataggatgcacaaaacttgcaaagacacgggactcacctccttttctcctccacgtcaaggtttggcgtagctagaccgacgaggttactcgccacgcaagcgccctgtgaagggcctcatgctagcaatagttgcagtggtaaagcttcaaaccaagaaagagaccaagagaaacactacctctacaaatttgataaggtattttgacagttagtaaatcaaaaacacatatacttctttcatagtcagaaaccaaaccttgcattccattacattaattagttaatcaagaccaacaaaccacacgttacaaagtagagccagatacattttacatccctgacaac

SEQ ID NO: 4572 - DNA, 40573 bp, Oryza sativa
gggggcgaggacgcagccggcgcccgcgctgcggaggctgtcgtgccagcagctgaggcgcgcgacgggggggttcgcggcggggagcaagctcgggcagggcgggttcggccccgtgttccgcggcgcgctgccgaggtcggggcaggccgtggccgtgaaggtgatggacgccgcgggatcgctgcagggggagcgggagttccacaacgagctctcgctggcgtcccatctccttggctgcggccacggccacggctcgccgtccatcctcctgccgttcgcctactcgctctccgcgcagccgcggcgccgccggatgatgctcgtgtacgagctcatgccgaacgggtcgctgcaggacgcgctgctcgggaagaggtgccccgagctggtgtccgagtggccgcggcggctcgcggtggcgcgtgacgtggccgccgcgctccattacctccattccgtcgcgcaaccaccagtgatccatggagacgtgaagcccagcaatgtgttgctggatggtgagctccgtgctcgcctctcagattttggcctcgcgcagataaagtcggaggagagggatgaattagagagtgctgcaattgagggcaatggaaatgagagtagcaatccttgtggcggatgtgatgatgacatgtctgttgctgatgaaaatgctactgctgttgctgtcaatggggaagacaatgctgccaagtcaccggaagatgatgaggggtttaccatggcttctcctgcagaggcagcatccacttcaggatgtgataagactagtgtcagtagcggattgaatggccgaagctgcaatggtggaggtgctgcagcatcaggagctgggaatgactggtggtggcgtcaggacaatggtggtggttctggtggtgtcaaggactatgtgatggaatggattaggtcggagatcaagaaggagcggccgaagaatgattggattgcaggagcatctgcaaccacccctgccacctcaacagagagaaagaaaacaaagcgcagggcgagagaatggtggcgtgaggagtatgctgatgagctaaccaagaagcaaaaaaggcgagcacttgctaagtcaaggagtgagattggtccaatggctagcatgcagtggtgggagagggactgtgacttagaggagaagggacgatcaaggtggagaatgatgaaaagctggagtcgtaggagcagcaatggcaatggcagcattgattggtggattgacggtgtgagaaggagcagcagggattgggctagtggggaattcgtgcccaagagtggtggagcagtgagcagcacaccaagcatgcgtggcacagtctgctatgttgcacctgaatatggtggtggtggacctctatcagagaaatgtgacatttacagctttggcgttttgttgttagttcttatttctggacgccgcccactccaagtgacggcctcacccatgtcagagtttgagaaggcaagtcttatttcatgggcaagacatcttgcccgtgttggccgcttgcttgatcttgtagaccctgcgctgcgggatgttaaccgtgaccaggcgctgcgatgcattactgttgcactcttgtgcatccagagatcgccaagtcgccgtccatcaagtgaggaggtgcttgaaatgctctctggtgagggtgaaccaccgaatctcccagtggagttctcaccgtcgcctcctggtgggttccgtttcaggtcccgcaagaaaggtcggtgagtttattttgttggttagatgaaataggtagtgttacttttctgctgctgcttgccttatcttgtacaccactaatttgtgtacactaccactaatttttctgttgaattgatttgtttataaagatcttgatggggaaaagtgacggtttcagtttcaaatcttaagaactaaggttcacataatgcaaaatgcataattgcagtttggcaatttatgtacaacactaacaaatttatccatttgatgtatctttgtacaaagatcttgatagggggaaaggtctcagtttcagttaacatttgataaggactcagtacccatttttcgaaatgcataaccgtggtttgatcactcctgaattgcaaatttagtatataaactatgatatcaatacattgctgtacagagatctttatgacagaaatggttgtaatttcaattcaagtttgacaagaactctgtccccataaatggcatacatcatacatgatgatagttggttaacaccaggaatgtggaatgttgtgcgtgctagaaagacagcttcagaatatttttctattttggattggaaagctcgcttcttttgctggtagactgggaagcatcttgcttttggatgtatagtgttttgctgggccctgtgatagtagctgtttatttcttcccctggacaacgactttctccaggcgtacccagttatgtgataacttttcatgttcacagatctcttccacttctttttgcactgagatggcattataactttattcagctagtatattctacatattgctgcaaacagcttagagaatgctatatgaaaagggcttctttagaatcttttgctagtgtagtgtggtcactggtcagaatttggtaaaagatggtttaggtatatgcatacttttcttgtgagatctgattgcttgatgccgtagagttgcccgtgctttatctacaatgtggtgtgcatttattgtcacctttggatttagggtaaccaattcaacaatgcttttatctacaaagtgatatacatttattaccaccgttgggtttatgataatcaattcatcaatgccttatctaccaagtcatgcattttattatgaccttcggaatgatgataattcggtcggtcatgccgtcagggtatccacatattatggactaaacaatgtataaatgtatttatgatggacaaataatacatataacatatactataatttatgatggagtagtataatttgtagagatatttacaagtttaaataatatcaatattaataacatggactagtgttagtgagctcggctacaattaaaatatcaagaggtggggtgaaagtaaaagaaggaagaggaatgcttcatgctttggcaaatatcccatagtaataattttcagatatccgtattattatattattatttgtacatgttagaagctttagtttcgtatttgtatctatgaaaaactatccatatttgtatcattatcagtatctgtaccattatcagtagacgattatctaatctgaattatatccgcatttgtttttcttcgaaacggactaagattgtgttcttttaagaggttcaggcttcagcacccgaagcgagataagccattagcacattattaattaagtattaattattataaacttgaagttaaatttatgtgatttttttataaaaagtttactccctccatttcatattaccccctccattccataatataaggcacaaccactttttttagatgttccataatataaggcatgcgtgcatgtagacaattaactatgaccacctctccaataaattattactttttaaaatcctacactcttatgctctctaattctattggatgtatgtattgtatttattaagatgataataattatttcttggtctttggtttagaggtggttatgccttatattttggaatagagggagtacttgtcgtcttaacatttacgcccctttacattttaatacctgttgtttctacattccaaagcacttttaggggtgatctttctttctacccttcatcaatgcacttttatctttctcattggcttatgttctttgaaaaaaataattgagatgtatttaatcagtggagatgtatttaatgaggggtaaccatgtaatctgccatatctccttggtttgagtgagatttgctagaacgacaaataatataaaacggaaggagcatataagaagttttttcacgaaacatacagttagcaatttaaaagatgtactgtggtaagctagtagctggagtagtaactaagcataaaactatccactctatttttatccctacgtggaagactttgatcggtcccccaaacatcttagacgtttcaaatgcctaattaagtcctcggaagttcacttcaggttaaaaatgtcagacgtcaataagtccagccaatggacatcaaacctagatgtaggctatgttcaatgggaaaataaatctcaaaagtaagaaaaagtattttgtttgattcgacctgcagtcgggtatgaaatgaagcacattagcactcactagaaaatactatccgagaggctaatttctgctaattgatgttatctaaggatgattttgaccaacgaaagcttggagagctttggatggacacctttggggcaatttataatgcactggagaaagccgcattatgtcccagtagtctgtttcttaatactgctgtcgctacccggctcagggggagaacggcagtgaagaaatttagcatgagcgaaaattaaacattaaacctgatcaagcagattattgcccatcagagctattcagcacgacaaaacaatagtatgacaaactatcatttgctaatagtatgacaaactatcatttgttgttacaacttacaagggggtatactagtatgaaaaatatgaggtcaatcaagaatatgtgttaagcctgtcacgttctgcaactgcaagcatctactaattttcaggatagaagggcaggcatgctaagctcgagccaaggggagcataacagcatacacaactctgcaggttttgtcattttatttatattcctctagaaggatgatgtacttctggccattgatcttctgcaggtgtgagattttcctcagattggcgagaaaaacttccctgtcctgcagtacaagaagaataaccaagacatcaacattttgcccatgcattgatttttgggaagtgtaatgactgtaacagggcattgacaacaaagtatttgacacaataacagaaatgcggactatggactcttactccctccggtcataaatatttgacatggttgactttaaccataaagtttgatcatttgtcttattcaaaaatttaatgtgaatttgcaaaaatataagtcatgtttgaagtaccttttaatattttattaaaacaagtcccaacaaaataaatgtaattataaaataaaatgtaataagaatggttaaacttcagggtcaagatcaattgtgctaaatatttattactggagagagtagtaatcaacaaaaaaaagtatgtgctccatacagtgcctttatgtgatgtgtgtgtcacgaagaaagatatcaagaaactcaagtagcatttgataaattcaaggccaaaaaaataaaaccttgaattccaaaacgtgcagttagaatatgacgtcatgctcagtactgtatttgtataaaaggattactagatgtaacagtccagaacagaacaaatcagaaagataaaacatcctacctctggacttcttagtcgaggcgaaaatctgggcataaaatcttttgaaaaatctcgcattgcgataggtgcatataaacgaagtaccaccctgatttcctccactgtaataggagatacatttgtatcacttctcgctgaggcaaatggttctgaagttggttccaaggaacacgaggtctcctccttcacgactatcttcttggtatcctgtaccaaatatatcattagagaaacaattcagtgcaatgtaattaaatggttaaaaacttcgttcacatgttttgagtgaaatgaagtaacttacaggctctatcttcggctttttaggggtagcacaagtttttgaatcatcacccctttgtctcctcttttgattggatttggaaacatgtggagtgctataaggatgtccgagaactgttggtttagaatggttgtcttcctgtggttcacttttgagttgatcctgctgtttcggagcaagtactggcgatggtgactcatcttcctgtttagatgaaacaactgtaagcataacatatattccacaaaagcatattatatgaagattttcaacaggaacaatgattaaaaattattacatccgtgtcttcatcgtcatcatcagactcgttttgtcccgcggcacggcggagcaacttctttagttccttaccagatttgctcaggcctacccctccatgtttctcattatcatcctatgagtagtcacaagttcatatttgaaaatgtattagcaatactgtggtaaatgcatcagcaactgtaagccacaaaatggtgtactagcaggatattgcacgaatgccatattgccatgttgactgataagtatgatccccgaaaaaaaaatgataagtatgagcacaagtgcatctatttctgtccacacctgcttaatttctggtggagcagggatttcaggatcagctaaatcacctccttcctctgggtcaacgtccacagcttcatcatcatcagtaaagatctcttcatgttcccaatcatcacctgataaatagcagggtccagctaaagaacttcagaagcccattaaagggctaacatacatgcattgatttacagtaatggtttactttattatacgtaacaattaataactatttggaataaatagaaataacaatgtccttatgatacataatttataaaaaaaaagaatagtatctagccagcttacccttttcaatttcatcatccaaatcaaagtctctgtctttactaccttcctcctccctaccctttgtcataggcacatgcgctctttcttccccactgcctttatcagatttattttcatccccattcttgttgcctttcttcaggtgaacctgatctgtttctccttcattagcatcatcgagctgcgtcacatctgaactaaaagcagcagctccatttgtagccgccttcatcatccaccgtccatacccagttgctgtgcttctcctcctgctcatcttctcttcagcttcttccaaagtcagctgtttgtactgtgaaattttactgaagttatacctgtaaaggcataccaaatatgcaagcattaaaagagtgattcctgtttgatggggctcacagtattgctattccttgtcaaaaagattttggtggtgattattgttgaaaatgaagtggaaaataaatcaacatatatatcgtgagtaccaggaatcagcgggaacagcgtgtacatccttgccatgcatcatcaacaaataatatgtcgaggctgcagattgtaagccctgaatttgaccttggtactgatagtcacctgtatcatcttccaaaatacatgactttctgttgctgcaattctcctgttatttgacaaatatgcgtgccacacgttaagaggatcaaaagcaaaaggcagggttaagttcttgagtttctatcagtcaatgaaaacaatttattgcagataggtctctttacatgtacattttccatgagataagcgatttaaagtttgtgccattaaggccatctaatagcatgcgaccaatcaatgatcttagatatttattgcttcgctccttgttgcttcgaatttatcgtgttatgcagatggaaaaaaaaaactatgatgatcatccatgataacgaattaagtagtacccatatattgccggtaggttgccgtccttgctgtccctcgggatgaagagaccagctgcggctccccgcattctccctatcggagaagggcggcacaccggtggtgaatttgccgatcgtatattgcttctctccggtggtatccaccaggacattgtactcctgcgcacgagcaacgggaacatcaaaacttcaggggaagggcaagcaattcccaaaacagccaagcggcggcggagacaatgccgacgcgcacggaaccaaaagccctagggtcgccggcgcacggggagtactaagcagtagtgcattacccggatgaggctggcgatgggggcggcgcagacggggcagcaatcgccggagcgagccatggcgctgccgcaggagacgcagagggtggcgtggcggcaccccgtgccgtggaggtccgacgacgagccgcagcgctcgcacgccgccttgagcacgaggccgtcggcggagacacccatgccgtgcgccgagcgcgctctctccgccttcgccgccgccgccgctgctgctctgctctccccctcttcgtagggttttggtttggttcggttccgttttgggcggagcgggggaggcgacgagagcgaggccgaggccgaggcgcggtggagtactggcgtgacgtggcgccggttagctagaaggggggaggggctccgagtctgtctcagtttggtggggacggaaacggagtcaaactgatctgaccggtgccccgcgcggcgacaaggtagtggaccgtgctgggctgggccggaccgtgttccatacacgggcttccattttgcagtggaaaaagtacgctgaaggtccctcaacttgtcatcgagatataaaatggtccttgaaccacaaaaccaaaccggatacaacgcatcctccaacttataaaatcagtgcaaactgatccctcggtgattttgactctgttttgtccaatgtagcagctgacttagagtgggacccatgtgagccccacccgtcagcctcttcttcctctttcctctcttcatctctcctctcctctcctatacacgggcggcgggggagggggggagcagctaggtgtgggcggcggacggcaggggagcagctggctagcttgggcgcgggcagcaagcacaggcggcggacagcgagggagcggctggctagctgggcgcgggaggcgggcacaggcggcggtgggaggagctgcgcagggcgggcagggaggagcgacacacgggcggtggttcctcgcactctctgccaccagagccgccagctcctcctgtgcgggcgctgacggacgcccgccgccatcatcaccatggccgctggacaccgacaccgatgtggagcggtcccctccagcggtcgcgcccgctccagcttcgactccaaccaggcgaaagagccgcggatcgtggcgccgcgatggtgcctagctcgtcgggaggtcgaggcaagccaccatcgccagactccccaagctcccgcgagctcaccggcgacaatgaccgcccctcttgcgtgttccttggtgagaaaatggggatggctggtcgagctcggtgacgacgccgcgcgcaccggcctgccggcccttctccccatgccccatcatcgagaagatggggacggccggtcgagcttggtgacatcgccgctcgtgcctgagcgccaccacccagctcctccccagccggccgccgcccgtgcccgccgcaccggtcttccacgcccagctcctctctgtcgtgcgaccggttgagctcggtgacaacgtcgcccacagccgcgcaccagcctgccggcccttctctccatgcgtcgccgtcgagaagatggggacggccggtcgagctcagtgacgccaccgccctcgcctgagcaccaccacccagctcctctcccgccgaccgccgcccacgcccgccgcatcggccttccgtgtctagctcctctccgtcgggcggtcgcccatcctcacccgccgtgcccagctcctctcccccgctaccggtcgctaggaaaaggaggagagatgaagtgtggagaggggggggaagaagaggctgatgggtggggcccacgctgagtcagctaccacatcggacaaaaccggagtcaaaaccgtcgagggacctagtttgcactggtttgtaagttggggaatgcgttgtatccagttttgtggttcaaggacaaatttataacgtgataacaagttgaggggccttcggtgtactttttccttttgcggtcgcgcaagcctgggcggcatttcgcatcttggcccgagcatgaaagaaatttgcaagaattataggatattgtgtgctccataaagggaaatttgctaggattataggatattttatcctatatcatcttattacaaatgctcattcctatttaattttgttacaaaactaccctggtgcgcacgtgattaacccgatcaacatgttttcttaaattatgagttaatagtggtatttacaaaaattaaatatgtctagagtatagtcttgattttttttgttatttcacaaatatagtcgttcatgagagctggaacattgtcatgttgagtttctctatatgaaaaaaaaataatgaaatatgaagaataagtctaatgcaagtacttcataattcggctaacttagcttgcagtcttcctacaatagcgataacaaaatgatttggttaagcacgtgtcgactagggtgatttttgtaacaaaattaagtaggaatgtcaaaattcaagtgacttatggggtggttttgtaattttcccttctataaaagatgaatgaaggtgaggaaatgctttttttttttgctcgattatatggaagacgcacatgcactcacaccgtgactaaaatggtttaagtgaattttcttcaaacattaacttcctccacctcataaaaaactaatttctgattatgaatttaaatgtagcctgctttcagcttttaaattttatatgggacgaaggaagcatgttttagtaactccagaaaaaaaagtatgtttcaataacttatatggggcggggtagtagttttccgccttggtagttggtagtagtatacagtatatttaaacacatttatcacggtcgaagcgggcaataatacacagagtacacatctgatactctgatagagcttggcggatcgaatcatccattttctgaaggaacaagctatcgacttgagtcttgcaagcaagtcagcaaccaatgtctaatggaacggctcaacttgtgttatacgggatctctctttaactaccatacgctaaattaagcggcattattggtctctttaactaccatgtgcgctagttaagcgtccttgtttgtctttattgtggttaacaagtcttctcccaacggtgctctcagtactaacagagtgtgaaagccattaaacatatggatcgatccagccaagccagctgctgcaagttgatcgagtggacatgcttgagaattgagatgagacgctcgaacagtgcacgaaagcagcagctaccaaactacgcttgtcggctgatcaggctgcttgcgcgtgcgttttctccaagctgggcgtctggtggtggcctggtggagagcgctgtacgcgcttgacgctacacaatacactcgccagctgagctgagctgagctgctggccctgcgcgtcttaatagcaggattaagctgcagattgacctcgcaacagtcggagatgacatctacacaataatacaaacgttgccgatcgattcctggtgttactggtcattatcactcgttgttatcgttcatttatgaatttaaaaacttaactttaagttagttttaaggttttctcataatgatttatttttcaacattaacttttaaaccattaaaaacacatatttaagcattttatatacttattacaccatttatttcatattataagttgatttgatttttttaatagtcaaactctttttaagtttgaccaagtttataaaataaatatagtagtattttcaacacaaaacaaacaactatactatcaaaatatattttatgttgcatttaatgaaactaatttaatgttgtagatgttgctaatttttttataagtttagtcaaatctaaagaaatttaacaaagaaaaaaaaatcaaaatgaacttatatgatataaaacacagagagtattatttttctacctgatgtcggatgatgccatatctacagttggtgggttgcgtcgtcacgctgtgtctgcctacctgggccctggggaaaaatatgaggtattcctacaaaggcggcttagcgctatagtcaattacccgtgacctaatactttaatactactatcattccccatcatgcagtctgcataaagcggtgtttcaaccttcgcttgagattgagaagttgtgccatcttcaaagaatcaaagtcttcgacgtacctgtaatttttaacgtatagactgaaacaccgggtgagagcatgcaggtgaaactctaggttacgaccggcgcacgcagcttggattaggtttgggtgggagggtgcagccgtgtagaccacggggagacggcagaatttaaagcgtacaaaagcatttctttttgcgaatttgtggtaagtttgttattattggtacatgatgaaatctcaaatgacaaagtatagaataatttctaccatgttacaatattatacatccgccttgtggggtcagaagcggtaaagattagatccgaagcttattcgcccggaacttttgacagtgaacacatgccaaacaacccgatttgccggtaagtaaaaaggtactaccaagtaaaaagggaaaaaactcagtggagaaaaaaaagaagaaaagccaacgtgacaaccgcccatccagaaagcaaagataagaggtcgtgaggtcgtttcgtcactatagggagtgtacttggctatggagagtccatcgctcgtcactctcccaatctaatgctgatgctgatatgattgccaatgtgttacttcctccattttacagtataaaattttatagtattgttaatatttatttatatgctaataaatctagacatatatatatatatgtgttagatttattaacatatatatgtatatggacaatactaaaaagtcttatatcgtgaaacggagagagtatgtatacttcgagaattgtcgatactctcggtagataatgccatggcagcaaccaaccaccaccagtagtccagtacagtagtaccaatatcatagtggtggtagttgcagtcaatagcatggtctcctcctctcgatcgatcacagcctgctccttccggcgtgtacgtcgctgccggcgccggtgtggcggcggacgaagtcggtgacctgcgcgatgaactccgcggcgcggtcctccttgaacagctccatcgcgtggtacccggcgccgtcgagctttgcttccacggtgacaccggctttctggagtgcctccaccagcgtcctctgccggtcacgcggcgggtccttcatccggccgagcaccaggcagggcggcagcctccgcagccgcgcggcgtccacgccggcgagcatggtctccgggttgcagtactcgtggtcgcggtcggcgcccagcggcagcgcgagctcccagagcaggtcgttcgccgggagcggcagcacgcggtcgtccaccgacgactcctccgcggccgtacgcttcacgccgccgtggtgcggctggttgaggatcagcccacgcagctccacgccctcgtccaccgccgccagcgccgcgcggaacgcgatgctcgcgccggcgtggctgcccatcaggaacaggggcctgcagcccgcggcgtacgagcgcacccaccggaccgcgtcggcggcgtcctcgaacgcggcggggaggcggtgctcgggcgcgaggcggtagtcgacggaggcaacgaccgcggggatggtggccgcgagggccgtgcaggtgttgtggaacggctcggacgccgcgcggaagaggacgtacccgccgccgtggaagtacagcaccagcggcagcctgcctccgccgtcggccccgacgcatgggccggacggcacgaagaggcggacggtggtgccgttggcgtcgttgagtggcgcgtcgttggagtgcacaatgcggcgcgccggcccgttgaccccgtcgacgggctcccccgccggcgccggcgggaggagcctggccgcgccgttgcgggtgagcgagccgtcggggttgaaccggatgttgaggtacttgtacgggtccatttcgcgatcgagatcgagcaccgcgctccggaggaagtagtactgttggtggtggtagctaggcaactcgccacggagcatggcgcgcgcagcgcagcggatatatagctcgcgcggcgggggcgcgggagactgtatgagggagccgacggtgacggcgactcaaaatactactccttccattcggtgatagtttttcttgcatcgtttgaccacttgtcttattaaaaaaatttgtataaataaaaaaacgaaaagttatatttaaagtattttagataataaagtaagttaaaataaaataaataataattataaaatattttgaataagataaatgaacaagcagggcaagaaaaaatcaaaatcctacggaaaggagcgagcactagtggaacggagggcacgccgcggtggatcgcggatgatggagcagcggcaggatcgggtacctgacccggggacggggaaagggatagggacgtgacagagtggcctgtgtcgcatttactaatggcgccccatctaactccgcgaggtacgcacccgcgtccagcgagtggccgggaaacgggcacgcatgcaggctgtctcgcgtagcgtggagttgcgcggtacacggccaccgcggctgcttttccgccctgcacggcaggcggcccgcaaagttgcaacttgtgatctgcgtgtgttggatcattgatgagagttgataggagtaaatagaaatggcatgtcactccccttgatattttttttccaaagcgtaaaatagacgcattcacttgtaaacacgcgtgcagccggctgtatttgtgaagagaggaatagaaaagattaagaaaataagtaaaacgatgtaaactattagttcgcaattagttaagtattaattattttaatcttgaaaaaagaattaatatgatttttaaagtaaccttttcatagaaagttattttttaaagaaatataccgtttaatagctcggaaagtgtgcgggcgaaaagtaatgtttttcccttctcgttcaactatcaaacactgcatatagtcctataaacacacataaacattctatctttattggcacgttcaacaaccatagataattagatatcttattgttcacatatcacttcattaataaaaataattagtcgtaaataccaacacatattctaaccgagtgtagcttagtttgcgatatatatatatctactattataaaaaattgaagatgtttttgtcggtacattgatacgttattcttgtttgagtcggtttttaatttcgttcgcttttggaaatatagggtctgttccgctgcacgttacagcccttcttcacagccaagctgctgcttgtggatgcagcgaaagaactagcgactagttgccttcagctgcctagcagctactgtaacaagcagccgaacaggtccatagatttgtgtttgagtcattcttttttatatttgttcgcttttgaaaatataaaagaagtcgtataagaaatatcattaaaacactcacatgctaacttgagacgaaagtccaactcctaatcgcaactcatgattttctaaaaagaaaattcaagcgagtttctagagtaaattcaccctggctaaaccgtataacaataataagattaaaatggtcttcacacgttgcaacacatgggcaatttttttctagagagtgtgtgtataaagtacaaaatgtacaataaatatatattgcacgaatactacttgcgctagtgtttattactatactagcctatagctcgtgcgttgcaatggaaaaacaaattgagtttgtagcttagtaaattagttaataagtacttattagtttaagtaatagtataatttttttgttgaacaagtaagtgaatttaaaatttggagggaatcaatagtgaaattgggagaacctgttgaaaggtgatcgaatagtatagcttgtggggcctagatgttagtggtaggggtgtggaaatggacaccaccactattaaaatattttaagtagtatatatatatacggcttatgcataagagttaaaaataataattcaaataactttgtcacattttatttatactgcgttaaaaaggcttttttatgtcaatgatagttatgtttatttgatagagataagtgtcgattttttaggtcacgactatacatggtatggagatcgttggtaccaaggtatatgcgagattgagataaaagagatggagacaaggattttatacagatttgggcgccttatctgacaggtaatagccctactcttgttaaccgaagccgatgttgcttttattcttcataatcacacaagtacaataattgggataacctatctaactatcatcgacttggtggcatagatcaccaacatgtattcgatgacagggtagtctttctcctcgagtacgaactcatcgagatcggagatggcgctagatccctcttgtcggcctctgtaagcactagattgggtttgtctaggcttatctctgatgtcgatgtctggcggcgtattggtttgttctaacttgtgtgtcccctcccctcctaggggatgttcccttgtccaattagaactagggagaccaattaatatgaatacaatccgagtattacttatagttttcatatagaactttatttatcattccttatccggaacttcttctatatataaggtataattccatataaaacttggtatatagtgggccccgtctaacttagtcgattactattagttatatggtatccataatcatgataataagcattaaacgtgaagataacatcttaattgcattattcacataaaagatattgttcaaagaaattgcaacgtagaattttacagtatgtttatgacatgtttttgcagatgcaaatgaggcaaaagagaataacgaaagtgggttctcaggaaagagcatgaagacgagctaggtttatgcgtgctccaagagttaaggaagagaagaaaaaaaaatacctatgctattttatattattttaaatgataatgttagtggtggtgttcgaattgattccaacttcacaagctgacatatggggctataagatcaacgcatgtgaatgcacgtttttgcttcggacatggcattatatatctaattaactaactatgcaataaaattgtattttttgctgaaatttttatctctataacatccgttgcaatacatggtccttttgctagtaagagaaaaggttatacctaggagcatatttgaaccactaaaatgatagcttatactccctccatttcaaattgatctatatatagttttttttgaggttattcctaaatgatctacatatttgtattcatttattaagtctattcgttatttgtgcattagagtaaatggacattgatgcatgcatccatgtacacaagtatttataacccacatgcaatatcttgatttgctattggctaagaaatagtggggatggtacatacattgagtttgttgctagagtaaatatagtatgggaaagttattagcttttcttggtcttggtgtacctatgaaatatgtagatcaatttggaatggatgaagtattattaaacatatggccttcaaatgaaatacttgtgatagtatgataatagattctaatatctgaaaaatatggtcattacatgcttttacttcttgaatacacgatatagatgatttattgctatgaaaaaaacttttcaaatgacaatactatgtttagtactccctccatttactttggatagtaatattttatcttggcacacagaccaagaataagcaattctacttatcatccatttaaatataccactagtcattcctcgtaaacaagcgattcgttaatatttacatttctcgatgcccatgtaaccaatcttgtgtggaagaatggagagtcacgcattaaatttgagaaagtcattaagatgataggttgttggattgaaatatgcctatcaaaaataaatttttcagatttagaaatatgactatcaaagatagatggagagagtaatatttgtcactaaagttgctctatgtactgtaagagaagaaaaggaacaaatttgagtgtgatatgctcatatgttagatttgtccttttcaaaatataatatatatatatatatatatatatatccctccatcccaaaatatatttatcttttgattgtttttgtttattccaaaataaccgcatcttttaaacaatcattgcatcgggttttatgaaagtaagagataaatatattataccaatcctaacccaagacactagacatagttttcataaactccacatcatcaagaaactagtattagacactactctttcaatacaaacaccattgtttcatacttaaattctatactacttatctcatatgatatcttaaatgttgtgtgaaaccatgtctcatgcaagtcctggtttcttctctttccttatttattcacttggcacatcatctttcattctaagtggtaaattatttaatgctatcgacacatcctagttattgggttgggactggccttaggactagatagtgggagacaattgtattgatatttgaaaaaagtaaaaggtattttagttttttatttggtatgtgtagaagagatgataagagggagtaagtgtgagtcatgtttatgttttttttatgacacatattgtattaaactattaatgctgtcaagtgctataaacaattttcatagcaattgcatgatatttgacgaaacgagggtcgagggatatacccccctcgagtctcatggactggaagggttttctcccgtactaaagtttgttagtgttcactttcatgcacttctcattttaattttttttactgatatgggctgcaagcctccctttttctaaacacgtcactcttgttgaactcatcacgcatgactcgccgattttgcaccgagtcccattcaacaatcagcttgcgatatactgtagaagttctaattagcggctgaataaacacgggtccctatcgtttggcttatttcctaataagccaaaacggcttattgggaaataaaaatgaatttatagatgaaacttttataaatgtgttcatggtgacttaaaagccaatgttataaaagaaactatattgaaaatatctaaaaatcaatctcaaaattaagtttaaaaatttaaaatttagctttttctttgactgatttagccatccgatggcagccacgggcggcgtacattcagacttcaacaccagaggtgtacggtacggaggaaaagccacctcgccagcaacatgcccatcgcatcgcgtgaaacacggtgcatattgttcggtagcccctgcgagattttgtctgcaactgcaaagctccaaaagcgcactgggctgggcgagtgagtgtgccaaatgccagtgtgtgcttcgtccggtggctaatttagctgacctctgagactggccccagttatgcaactagccccgcaacttttttttttctttttcggtacaccgatgacaatcatgccaaggtgcgtcccgttccgtcccctttagctgaccttgatgaacctgatgtgggtatcgccggaacagagcccggatccccaccgtacctttcatggcatcgctttttggggtaaggacgggacatttccggcgtacacacctgcgcggctggtgggagccgtcggcatcggctgccgtccgtcccctggccggctctcggcaaaccggacgacccgagaagcgcgcagcccgtagctatcggcctatcgcgcgcggcgcactaggcaggcatcctagtttcaccgggttgcgctgtggtatgggcggtgacacccgtcgagctcccgacccatgcgagctcgcggcgcgcgctaaaaaaacgaagcgacgacgccgcgtcgctttcgggtatcggcacggaagcggcacgcgcgcgaccgcatcctcgtgaagattggtggcaacgggtttgaccgatcgggagctaagccggcgctcttccgctcttggacggctgggagaagttttatgggtgggtcagctcctggaacccggaagaagtggacggaatttggaatcggggatctttccgccatgtgcgtgtccagtcgccaccgaagaaaaaatagacgcgccgttttatccattgctttttctaaacgtgactgaaaggaggcaaaaaaaaaacaaattcttgatttatttctgtgtatttattggaggaaggctacagggaaaccactaatagaagatgagtcaaatgatacagcacaagcgcatcatctttgttgtgtccgcataaacttgccctctcggcatcggtgctcggtgaacctgtcgatttcttcagcttaagggcattagtagtgtgcccacttattttcgtatggtcatgtactccacctagacaaaaaagtgaatgaagccacgcatcacaaatttcaatctcccacagtgcaccatggtctcagctgataaaatcaataacccaccggttcggggtcccactcgtcattctaaaaaaaccaatccttatcttccttcccagcctccacacgcacgcggctacgcaaagaccgtcgcctcacttccttcgtgagcccttccctaccgtcgccacttcctccaacgccgacgcctcacatccctggctggcacccctcctctcctccccgaccggcgccccgctcctccccaggccgacagctgcgtccctcacctccccaggccggagcagctctccctccccctctccctccgttgttccctccccgcctccgacctctttcttcaccgagctctctagatccggcccgtggctcgccggatctagactcgagcggtgacaatgggggaagcagtggctgctcgacagcatcttgatgtggtaggcccgcggcggcctttccccttctcccctctagcgctggcgcgacgtccctctccgccacagctcagggagacggccgacgagctcggcggtgcggagaggaggagaacgacgagttcgccagctagggtttgagcaggggcgtcgacgagactctctctggcacggcggcagctgtctccggcgacgatcgccgccgcctcacacagggtgtggggtgtgggcatcgcacagagccacgaagcgcgaagccacgacccccacagtgcaccgcgccgttctccccacgccgcgcagcaacttttctgacgaagaacgcacgcccagttttggctacacgaacctcgttaggtcacgctctaatcccagctggtagagaatctcctacgtggcgtgggttggccaaatgccacgtgtgtgcactgtgaatgccctaacgaagatagtaagtgtcgacgggtgatacccgtagaccggatatagagggtattggggtacgttggtacaaggatctacgtagtacgacatcaagcaaacaaaagacaagaattatactggttcaggccccttgataggtaatagccctaatccagttgatgtgggattatatggtagaaaacacaggttataaagagaataagggaacttgtcggatccggcgagattgtagtcgagttgattcaactagctctcgatgacttggctcctcgtaagctccggcttcgtaggctgtggaggttatgttggctctgagattcgatgtctaaaccccccggggggggcccttttatatcgcagatgaggaggtctcctcatagaactcggaggtatcagaccttatacgatatgccaacgacccagttctgcccgagtaggattcttcccatctatagattccgtgaaaggtttccttagaatatacaggaaatatccgcctgtgcgtgggtatgccatatcgatatgtaacgtatatcgaagggcaaatggtatgcctaacccgtaaccctgacagtagcccccgacttctgcttaaattgaactcgtgcaaccatttgcgacttcgggtgtcgagactgttgtcattcccggtgcgagaaccgcggagatagaccgtagtcgagcacgccatttgaagcccaacggtcacaagcgaattttaaactgaagtccaaaaaaccggcgcgcgtaacgggaccagaaatttccggcgggcatctctctctgttccctggaatttgcaccgtcggtagtgcgcctatttaaaggaattttgggagtccatcttgaagtccgccaaacctgttaaacacacaccacctccaagcactctttgccttctctgccgccgcaagaaaccctagttcatcaacctaggctcgctttccggcgaccttcgatcagcaatggacctcggcaaatcagcttccaccagtgcaacgttgaagaaactccaggaggatggcgctcttcctagccgtggaaccatggagagggaagcaggaggtactaatcctcagcccatcttgggtcgcatggttgcgatcgaagattatgttctctgcggttttctccctccaccttccgaatttcttctcctggttttgaatttctatggcatctctcgtctccatttgaaccccaattccatcgccttccttagcatctttgtgcatctttgtgaggcctacatcggggtagagcctttccttgatctttttcgcttttactacgaactgcgttggatggaatccaacagggtatctggttgcgtcgggttccgacttcgggatggcctgaagtcacgttacattcccttccagtggccttcttctcgcagcaagtggaggaatatgtggttttatcttgagatcaaggactcgaaccctgtgttcgtggttcccgaagatcaaccggacaagattccgtcttggaccgcaaagccccccttgaccccctctcttcagtcgtttatcgacatcatcgacgatctccaagaacggggtttgttgggatatgaagtcgttgcagacttcgttggtaggcggatccagccgcttcaggctcgggcccatccagcttataactattccgggctagaggacacgacctgggtttctcctcggggtatctttctcgcatttatcttgacatacttgtgttcgcattcctcttgacttatcaaaggttggttctcgattaacaggtctgagcggcgaaaccgtggagcgccgcatcggccaagtgatgatcaatggcccgaccacaacgagtgacatccctgtgcccctttgtgaaaagggggcggcggaacgtgatgaagccatcaacgtaagtatattcgatgaacatcccgcattctcctttcgaaatcactttatgacttgattgagcgtaggcccttcctttgactgatatcatcggatcgctcgcggaccatcaggtggcgtcatctctgaaagtgaaggtcgtcaaggaggcgtctgattctgccaccactagcggtggcaatgttccgacaaagccgaggaaattctcgtctgtaatcagacaacgtcgcaaggcgtcgaccccctcggtaatttattttgtcgttaaatcatgcagcaagaaggatttttccttactttgcgttgattgtcttccaggcctcggacgcgtctcccccacctccacgacgacaacgcattgtgacaatcggcgagaagtaagtagatgaattcttgaatccctgcgcttcttattcgattgttgtctaactcgtattcgtcctgtagggaggcgcgggcaaaggctgcgcgagccaagtccggaggagcttccagtgcgtcacccgtcgtggcctcgacggatgtcgtgcccgcagctgggagccgggaggcgacgcctagtggcccagtcagcaaccccgcggcaggtcgtgatctgccagctacagtcctcacctgggaggagctccaagtcgagatggggcgcctcctcgaagccggtgctcgcggcatcggccgcgagattgcggaggcgaggtcggaagcggcgacggcgaatgcgcgtgctgacagactagtgtgcgagttggctaaagcccgtgaagacctcacgaagatgagggagttggcggccggcaatgagcgacaacggaaggggctcgaggaccgaatgtcggaactcgggaacaacctatctgagatccggggctcgttgagggtcacctacactggccttcaccagctcaccggggaatgcggcgtcacgtccacaatcccagcgaatcccgatgagttttcgctgacctctctcgcggaactggcgacggcgatgggggaaatcccctccaagcatgcggccaggattgcggaggagacgtcaaacggaatctacaccggggcgtgtcatgtcctcgcgtgtgtaaggctgtcgcgtcctgaactcgatctgcgcgagatcttggaccagggggcggccagcgacacgcgtaaggaggtgatggaagaagtcggtgatctgggggagtctgttctcccccgttttgaagagtaggacttcttgtatttcctagataatgtgtaaaactcgaactttgaccgcctttgtgcatgcgattaccatcccggcttactttggtatgctgacctcgggaacttttgtcctctgtagagatactgatgacgaggatgtctagcagcgcgggcagcccgagtcactggcagtaattccggtactcgagttagaaccatacgtctcgcctgaccatgtggatcaaccccttgatatagagggaaggatggcgacgactgcctcaggttagtagtcccttcaccccttaatgcccacctgactaggttagccatgttcccgaaagagatgtatagcttgacttagtggttatcacgtttagcagatctcgagggtgcccttgctagccaagatcgtcgtatccaatactggaagacgaagtttgaagtggcggagctcgagagaaccatgctggccgtgaagaaagagcaggttgtggaaacgctccgaggccgtgaggtatggtttaactcgtacttgaagagttgttgcacatccatggccagggtatgcagggagcttcgagtagtccgcggagatcccgaggagtcggcggccgggtacatctcgtggcttaatggggcctgtgcccagctcgatggaatcagcaagcgtatcgacgaggccttgaagcaggagtgtcgtcgatcgagccgatatgccggggggcacgtgttggcttgcctacgagatcatcgcccgcacctagaccttgaatatcttcgtgagggttttgctcgttctcggaggactccggcagagatagaccatcttgcaaggtcaatgtcgccgttggccgagaagatcttccagtctatggactggtgttggccctcttggtagtactcgtaccctgtgacaaatatcttaggaaaagatgtaatgtagcgaaagatttgtgaaaaaactgtaaggagtatttgtgaataaagaaatctatctttgacaaatgtctcttactcttgatgtcatgtgtaagagtgcgttctcagttaacgactttagtcagccgtttgagtggtacactctccctatcccccaaccttgtcgtcagaggaattttctcggaggataaggctcttggacctttgacctggcttggttgaataagctctgatcctagcccccagccgtgaagttggaaagttgatttccgatttcacagcttggttaatacgcacggcgagaactcttacacgaccagatcttatatggtctttcgtctctacaggatctgacaaggccttatcggttctgggcatttccagccgaagatcccttaggttcctcggaggccttgtcgagacggcgtaaagggacataaggacaggtttcaacgctaggtgtcatcagagtgagggatcatcgggcgaaacacgttgattgtgatatgggcctagaaatagcctttattgatactgtaagggtgcttacaggtatggatgatattgactcatacatagaatttacgtaattggtcaatgttccaagaatttgctaattcgcgaccatcgccgtctgcgattttgaatgcgcctggccgcaagacttgtgtgatcgtgtaaggtccttcccatttaggtgagagtttgtttcgccctgcttggctttgaactcgtcggaggacatagtcgccgatcgaaagtatgcgtgcacggatgcgcttctcgtgataacggcggagggtctgttgatagctggctgctcggacggcaactcgttcccgatgctcctcgagaagatttacatcgatatcttgctgcccctcctggttctcgtcggagtacttctgtactcgtgtactctgatgttgtagctcgcctgggagcatggccttagagccgtgcacgaggaagaagggtgtttccttattagacgttgtcggtgtggtgcgtacagcccatagtactgatgggagttcttcaacccaccttttgtcgtgtgacatgagcctgtcgtagacgcgagttttcatcccttgtagtactatgccgtttgccctctcgacttgtccgttgctttgagggtgagagaccgaggcgaagcatattttgacccccagcccgatgcagtagtcctggaaatcggcgctgatgaactgggagccgttatcagttatgatgcggtatggtagtccgtatccgcaaaatatccctttgatgaatttgatggcgttgtcggccttgatttcccccgtgggtactgcttcgatccatttggtgaatttatcgatcgccacgaataggaatctgtagtcgccctgtcctcgtgggaatggcccaagtatatctagcccccagcacgagaatggccaagtcagagggatagtttggagcgcttgcgtgggtagctttgtgtgtttactgtggaattgacaggattcacatcgctggaccatgtcgcatgcatctttaagggcggttggccagaaaaagccttgtcgaaaagctttgccgaccaatgtccgaccggcggcgtgtgacccacatatgccttcatgtatgtcgaggaggaggtgtctgccgtcgtcggtcgagacgcatttgagaagtaccccgtttggcgctttcttgtatagatcgttgccgaccatacagtagatctttgctttacgggttattttctcggcctctgtgtcgtcctcgggcaactcctcgctgctgatgaatttgattagtgggatgcgccagtcgtctatggtttcgatgtcggcaacggcgcgttctgcctcggtgatgtccgagctaatgtcgggggtgttcgggctgacttcgctgctaacctctttcaccgatggcttcgtcacgatatcgagaaaagtgccgggctcgagcgattctcgtctggacgcacgtcgtgctaggtcgtctggctcgacgttgtccttgcggtaggcgtgtcggacctcgatcccatcaaactttttctctagcttcctgacttctgcgagatacttggataacttggggttagagcatttataatctttgtgtacctggttcgcgactagttcggagtcccctttgacgattagtcgcttggccccaagtgtagctgcagctcgtatcccggcaagtagtccttcgtattctgcagtgttattggtcgccctgaagttgaggtggattgcatgcttgaattgatctccggagggagatgtcaagataaatcctgcccctgctccttggctgttgagtgcgccatcgaacgccattgtccctgttgcattgtcgccttggttgtctgatttgttatctggcatagtccaatcggcaacgaagtcggtgagtacctgggacttgatggttgtttgtggcacaaagtggacatcaaactggcttagctcgactacccatttcgcaatgcgatcgacaacgtctttgtttctcacaacttcaccaaaagggaaagaggagacaactgtgagtctgtgggcttgaaaatagtggcgtagcttccttgatgtcatgatgactgcgtaaagcagcttttggatctgtgggtatcttgtctttgcgtcgtggagagcttcgctgatgtaataaactggtcgctgtactttctctctctcgacaacaatgacagtgctaacggagtgtggcgtggcagaaatatagaggaataattcttcattaggttggggagcaacaagtacaagggggtttgataggtagcgcttgagtgcaatgaatgcctcttcggctttctgtgtccatacaaatttgtcttgtttcttcaacagagcgaagaaaggttgtcctcgttctcccatcctagcgatgaatctgcttagtgctgccatgcatctggttagcttttgtacctccttgagtcttgtaggcgacttcatattctcgattgccttgatcttctcggggtttgcttctattcctctgccagagacaaggaatccgagcagcttgcccgatggtactccgaacgtgcacttctcaggattgagcatgaggcgatatcgtcggaggttgtcgaacgtttcccgcagatcgtcaatcaatgagtcgcctgtcttggttttgacaacgatgtcgtcgacataagcctcgacattgttgccaagctggttgctaagtgcaccctggaccgtgcgctggaaagtatccccagctgttatcagtccgaacggcatcttaacatagcaaaataccccgaacggcatgatgaatgctgtcttctcttcgtcctcttttgccatgctgatttggtgatagctagagtaagcgtcgaggaagctcaataactcgcaaccggctgttgaatccaccaattggtctattcgaggaagtggaaagtgatccttggggcacgccttgttgaggtcggtgaagtcgacacacattctccattttccgttggccttccgcaccatgactggattggctagccactctggatgaagtacttctctgatgaagccagctttgagaagtttgtcgagctcttctcgtatggcttgtttccggtctggtgcaaatctccgcagtctttactttactggcttggcatcgggtcgcaccatgagtttgtgctcaatcatctccctggggacccccggcatgtcggacggctgccaagcgaacacgtcggcattgtcgcggaggaaggtgatgagcgcaagttcctatttctcgtttagtgtcgccccgatcttgacggtcttgtcggggttggcactggagagtggaacaatcttgatggcgccgtctggtttcggcgtcttgtttgtcttggtcactttcttgggtggctcagtcgtggcgggtgggctgggcgtttgctcgactatgtcgaggcttcgcttgtcgcattgcaccgctagctttgcgttcccttgaatagtgattgttcccttcggtcccggcatcttaagcacttgatatgcgtagtgagatgcggccatgaactttgcaagtgcagttctcccgatgatggcgttgtaagctatatcgaattcagcaacatcaaaggtgatatgttctgtgtggaagttgttggcttggccgaaagtcacgggcaacgtaatcttgcccaaaggtctggacgatgattggggagtaattccatggaagagttgatcagttggtatcaactcgttttgcggaattcccatcgcgtccaaagtgttggcgaaaagaagattgattgagctaccaccgtcaatgagaactcgcgctaccttgatgttccgaatagtgggttcgaccacgatcagatatcgtcctgggataacgacggtcttggggtggtcttctttccgagaactctatcttctgctcagaccacttcatcttgggtgtagccccctgccatgtcgagcagacttcatgttccactttcttgtattctcgcttggaggagtacgttgtggaaccgccgaagatgtgtgagacgtggaggtcgaagtctggatacgctgagtccggttcgtgaggagctgtctcttcgttcgtctcgacaacgtgtactcacttgcctttttcaaatgccatgtgcttctcgagcgactttttgaaaacaaggcaatcttccagagaatgtctgtccgtcttgtgtatagggcaccatgatttctttgtgtcgctgctttgtgggtctatgcgtttgggagggttcgcgtattctgctgcgaggacttccgcttgagctttccttttcccgtttttgcgatttttcttcttgcttgactcagatgtgtccgtggctggtttcttctctcccccggtcttcggcctatcgttcttgcgtcttagcgcatcatcagcgtgggcgcatcgctcaacgatctcgaataatctccgagtggttgtgatgcgtcttgtcgccaactcctgggtagtgtagcgatctctgacaccggatttgaaggcgcgaattacagaagcgtcggtgatttcaggaattgtgtttctgcactcgttgaaatgtcgaacatattccctcaatgattcacccgaattctgtgtcaacgcgtgtaggtcgtcttcgatcgcgtggcgcttgtatgttccttggaaattgacgatgaattgttgccacaggtctgcccacgaagagattgagtagggaggaagatgcatcagccatgaacatgcagaacccttcaacgcggttggtaaatagttcgctaacgcgttgtcgtctgctccggcagcatagagtactgtggagtagacttgaaggaactcctctgggtcggtgctcccatcatacttttctattgctccgggtcggaatctttcaggccatcggacatcacgtagggaacgaccgaaagccctacacccagcgttgggggtggtgggttgccggtggtcgtgtgtccttgtggatgtctgtctgacgatgaggaggacgcggatgatgacgatgacgatgggtcgcttggttccggcatacgattacgaggatgatggcctggatctcaggaatcctgtcgtcgtcttccgctgttgtctcggcgccgatctccatcatcatcgtcgatacggcggcggccatgaccagtattgtctagcacccgtcgttcgcgattgttgtgattgtggtggttgttgtggtcccggtcctcgtttgagcggtctcctcgatttccgttatcatggcgccatgaagagacatgacgccgagagcgattcacgttgtctcgtgtgcgtcgtgcttcccagcggccgttgatttgatctcgaagatcgccagtgccgcgaggagaaggggtagcttgttgaggtgattccctccgttccggatcttcaccattggcctcgctagttggtggctgctcctggtgtgctgcggtagcggcttcttcaaacgcgttgctgaggttagtcaccgattcccgtagtcgttctgtccaacgctcgaggtcaacgttcagaacaggatcgtaaggagtttccctcagtatcgcttgaacggccctgatgtgctgggctggagtagtcgattgattccccgcttctgtgttggcgtgcgctgacgtgccgatgtcatcgatagccaatacctcccgcggcgcactcgttgtcgatgacccatagtcctcgaggagatgtaagaccgatggttcgtgaggatcgatatcgattaccccaacgaatcgatctgaagttggagtcgctccttgttccttgccgttatccctgatggggacgtatgacttaggacactgagctttcatggcactgagaaagactttgcagctcgagaggtcgtgattctttgtcttgtgaataggacaatagacatcccgagttggagaagtacgctgaattccacgttctttgcaggcgcgaatttcagcacggacgttgaggaaaacccatcaatcttgcagagtgtgtttcttggttttgtggataggacaccaagaccttgtggcttcggaagtcatctttgttggctcatggttcatgtcggaaggacaaggtttggccatatcagaatccttcttgagcttggatgccatcgatattccgttctccgtctcgatgggaggatttttcgacatggaatcgccttggtttgtagccactgcgttctcgtctccggtcattggaggaccggttgagatcggcgtcgtggtgtaaaccgggaagacgatttcgccgacttgagtccataccagcattgttgaagcagggagtacttggctgaggctggtgctaacgttgttgtcgacgaagctagatgacatagtagtagaaccttgagtaccaaagccccctacctggcgcgccactgtcgacggatgatacccgtagaccggatatagagggtattggggtacgttggtacaaggatctacgtagtacgacatcaagcaaacaaaagacaagaattatactggttcaggccccttgataggtaatagccctaatccagttgatgtgggattatatggtagaaaacacaggttacaaagagaataagggaacttgtcggatccggcgagattgtagtcgagttgattcgactagctctcgatgacttggctcctcataagctccggcttcgtaggctgtggaggttgtgttggctctgagattcgatgtctaaaccccccggggggcccttttatatcgcagatgaggaggtctcctcatagaactcggaggtatcagaccctatacgatacgccaacgacccagttctgcccgagtaggattcttcccatctatagattccatgaaaggtttccttagaatatacatgaaatatccgcctgcgcgtgggtatgccatatcgatatgtaatgtatatcgaagggcaaaggatatgcctaagccgtaaccctgacagtaagtgacataacatggcttcaaatttcaagtctcggagtatttgacagctctgcttctaaattctgcagataaaaaaaccactctgtattgaagcatacaaccagtggtattattattaaaatttatataaaaaagtagaaatgttgactattattttagaaagaaaaataacacgctacatctttttgttgatttgagaagttcagttcgagaggtttttatatcccgataaatatccattaccttattcgctacgatttgtattcgctctgtttttatattctataatatttgattccgtttttatatccggggcttccgattcgattatgatttcgagaaaaatatggaaacgaaaacgatagtgttggtttccgtctgaaacgacagtgaatcaagaataaaaatatagggtgagctcatagtatatgtcaatagaacaaaaataaaatacatatcgttgtgcaagttaaatttagtgcatacatgatcaaataggaaaggaaaaagtctatttactctcttgactatggccttagacgaaataacccctaacatttaatttgatttacttaacccctggttctcaaatcctgatactattcacgtttccaacataatgcaaaccactttgttgatgtggcacatgggctagtgaaaaatgacgtcatcttcttaacctagtgaaacatgatctccaaaatatcctctgatctctagcaactacagcttgtccctatgcaggtatgacatccagatttgagaacccagaggttaataagtgaaccaattaaacgttagggggttatttgttccaaggcccatacttagggggaataaaatgtatactttccgataggaaaggaaacacataaaaaacaacggagtgccttgacaaggcaatatggatggaaaaagaaaacagtaacagaggcactgctctttatgcaaactataacaacgactaattgtaactgatgagcgaagccacggctgaattgctcgaaaagtaattataagtaatatagcttacttgttcatcgcacatttaccaataaataaaaaacctacagcacataaggctcaatctacctgagtgaaaggttaatctcacaacattaggagaatgcgccacgtcatacaaacattattagccgtccgatactaacaatgaaactttgcaaatggtaaaaacaaagtgcttgcatcttcgtgagacctccaaactttcaggagaagcttggcaattcaccgtgagaaccccgatctgagaagcccaagaaagaaacgttcaagaggtgagggaaagaagaaaaataaagaatttttaaaaaataattaaaaatctactttaaattatctggactcaaataagtataatacattgaaaaaaatattcaacgattatgcaactgtttgttcttcatgattggtgtcttttatttctataattttatttgaactgcactcattccgagcgttaggctgtaataattggttgtaactcgttgaataaagtccaagatattatattacattatctaaaacaaattctaatgaacactctataatgttgataattttcgatggaatacaatgagaaaagggcgagtatgagattagcatttatgctagctcttaagtctagatcaataagagggtaatgcaatagagatgccaggaaaatgatggctcaagctgcagtgaacaagatggttatccatactccaattttaaagtcaagtatatatttttaacaagttattatagaatggttagagtcgagtgaatacgccacttcatgaactagctttttctcatggatgataaatcccctcgtcggtagacaaaagagtagaaactagaaaggaatagagtgactcattgtgtcattcaccacaggtccacagtgcataagaccagcaacaaagtatatcagcagacaacgacctcctgcgctgcatgttggctcgctcggcgccattaggggtgggcaatttccccgttggggcctgggatccggcggggacccgcccctacggggacgggggcgggggagaattctcttccgcgggtgagtggggacggggccccgcaaacttccgaggatgaggacggggatcggaattaacccgcgggtgactcggaggggccgccctggatgtgagttactacttctctaaaagtagctcattgcaataatgtagatctaacaaacccattcaaaattgacatatgaaagctcaacaccctagttcccctcaaccataatccctttctttcttcaaccaacccacacaattgggggctattgaaattttatcataatattatttagagtattgcaatatttttacaaagtattagctccatccgggtgatgcggggccctggtcacccaccgggtcccctgtgggggcgggaacgggtgatgtttttcacctgactttctttgcggggacggggccaggatacccgcatgagggcgggggcgggggcattccgacccaacccagccccgccccgttgccacccctaggcgccacggtggcctgccccctggcggcccatgccatcgcggtgttacatggcaggctgttgctgcaccgatgcaactgttccctcccagctcccgcagtcgcccatccccgtcgacggccgagcaagccgttcaaccctcccacccgtaaatcatatgggatcgctaggccggacctaatactataaacaagatggtgtgggcttactatattaaattgatgaattggaccatgtaatgtgtaccgcttcgcctttcttcccccaatcgcagtcactcgacacactcctgttcatcttcctcaagcagccaatgcatgtttatctatcctcggctgctgctatgagacatgcttaagtctaatgaagcctactttactcctatcataactggatggtatggttaggccgatcaatttggctactactaacaatctcatgaaatgtcgacgtataacgaggcttcaggtaacatcgcccgatgaactatggttagactcggctaaaaaaagataatgcaaataatgacatcaattttgcttaataataaagcatcatatttttaactggttgtgttcactttttttctcactatgcaatatatgatgtttacctcttatctgtatgcaagtatattggtatcttccctaattccatcttatttatttttttcctttttcttatgtgttaacttggattaatatttttgttataattaaatagataataagttgtttttcgatttttctcatatacaacaagtatggaacattgtatgattttcaaattatattatataagtgtatggaatataatgtgtaagattaaaaaacttagtataagatttgacgttttcttgaaaacgtggcaccataagtataggtagtctcataaatattggctatccatataagaggactaccataaaaataatatagtcaaaccatttctcaactaaacttgtcaacagaacttcgagagaaggtaagaaaatgaggaggttagttaccaatcccacacaagggaaaatattgctcacacgcattgtatgacatatactcccattaatcaataatttactaatattattaaatttcacaacgtttaatgaaaatttgttcttttgtgacaatgtggtgcgagactaaaacttgaacaccatattcttctgttgtttcttattctttattgttgataataatatagctggaaccagccactagcacttcacctgaatactagcagctagttcatgtctatgtgctctatattatttatggttttaaatgagttagtactaataattgtacttaatgatgatattgtatgcatagaagtagtattttagaacttgagatatattttttctaaacataatttagaatactccgaggaattataatgtagagcatattatatttaatgatacatatattcattttttatggataatttaaatattgacatttgttataaatccaatgatcgaagtatactataaatattgtataagtgactttcactatttactaattacatgttgttagtttttgtctatactagtttctttctataacagactttgacgatgggttgtgtttttagaattttttaaatgcgtttctttaaagggatggagctatattttaaagcgagtttgattgtttagaagtaaagaatacgaatgtgcgttttttttccattatggttgattttttagagaaattttccattattttagtttttcttaaaaaatggtacttactatgaaaattccttattatatttttagtatattgtctatataatattcttatgaaaaaagaaaataaaaaatcgaactatggaatcaaccgtgcatattatataatatcccattatagttacatcatcccataaaattattcaattaaggaaaagtaattagaagtattctctgcagatgcaataaaacttccatcatagcgaaattaatatcactaatactaaaattatgattttttttgaaattataaatataaattcataaatattaaaaattttattctcattaggatgttatattgcgaaaaaacattttaagaatgttaggagtgattacactgcacttatacctcataattggtattattaataagaccgataatacatatgtacccattattagcataagacaagagtaaaccatgtttgttctaataaaaactcttaatggtttgctaatattgaggatattagtataaaaaatttcagtttatggatgttttgtaaattggtttttatttatttaattaattataatatgaaatctaaactttgactgcttttaatctaaacattatcttgtgtgagaactcattataaaactaaggcagataaaacgacgtttgaattggtttatatatttttggaatttaggatgtaactaaaatggggtgttgttatctccggcccagtcttccggaagtgctcataggggtagggtgtgcgtgtgtgcgttcataagggtgagtgtgcgcacgttgtgagcgcctgtgtttgtactgtgtttctcaaaaaaaaatgtcgaagatagattttattaacataaaatttgctccacttagaattccagcactgtcaaactattgttttactcgtgttatagcccgagtataatatatactatgtcacattgcatggacatatataactgaaatgaaacgttattatctccttaaatgtccacaataaattttattaacctaaaacttgcttcacttagaattccaacactgctaaattattgttttactcttgtcatagcctaaggctaacatgtactcagccaaaatacatcgacatatataactgaaatgaaacgtttttatctcctcaaatttctaagatagattttattaacctgaagcttgctccacttagaattccagcactatgaaattattattttactcttgttatagcttgaggctaacatgtattctgtcaaattacatggacgcggactccacgagaaatatcatatcttgccgtggtcaacatcacacaaagaataagcttcaaatgtgtatgtccggtatctctattctcgcccctgttcgtttctgtgaagtaaatctggaggttaaattcccgtcaaaaaaatctggaggttaaaacacgacaagaggatatgacaaatgttaataatgcatcaaataatccaaatggcatgtagcctaaccccaagaatgtttttagaacacgatgctttacatatgtctagaacacgaatcattaaaataacgtctatccatgtcaaccatgaaacaaaacgaggcaacaatcacatgataggatccttatagccacacgccaccactaatttgcaagatcgtgatggaaaccggtgtaaatatgcagggagtggagagttcctaacggtttgacgaagtgaatcgaactatacatggtcaagttgaggaagctcaccagacagagaggtaggtggtggtggaaccatggaagaatttagtgttgggccttgttgggacgcaagtccctagatccatccgctagatcccaagcaccttacttcactagctctgtgatagtttggtatacatgtcattttggagaaataagataactagatagaagtactgctttgttcgcttggatgccttttaatctagtcttatttgctatgatatggcccaattgaaaatattttagctattgttatgggctgagacctcatgattggggaatggtgtgaaattaacgagtaagacaatgtggttttcattgttaattacttatcaacaaattcatatgaatgatctgatttttgtttgatggtcagtggtgcttgaaattaataaagatgaagattaagttgacacacgtaaaacaagaaagctattagcacatgatttattaatttttaattattacaaatttgacaaatagatatatttgatattttaaagcaacttctatataaaaagttttcgtacgaaatgcactgtttagtcgtttgaaaagcatgctaatgaaaaccggggtaaaatctaaatattaattagaaaagtgagtttatttcaaacatagcgatatatacttggttcacttatctatacatttagttcccacctttgacactttattttcattctagttttgtcactgggtggaacttggccttggcggctgacagcttcacccaaaacccactcgcctgactaacgggatgcctgccaaagccaataaaatgattaagaagaatgaataaaccaaaccagccaatggagaggagggttcatgcgaggcactcgctggaaggcctgtttggaaaaacgtgagacttaaggcttgtttggaaggcctgtaattggcccaatgctagtgtaaaacacaagaccgtaaaatcttttccgtgtaggctaaaaagcccgtttggacgggctgtaaatcataaaacattaggactaagttcaccagtagtccctcaactttacccgagtctgtctgaggtcccctaaccacgataccagaaatatgtacccctaaaccatgtaaaaccattcaaaaaaaaaaggtcccgaggtagtatagaagtctggtttcgctgacgtggcatcttactcagcaaaaaatataaaataaatatatgggggcctatatgtatgtgagagaaattggtatgggacccacatctctcctttctttttctttttctcttctcttctcttgttgattctctcgagcagtcgagcgggcgcagcgacggagggggggagaggcagccgacggtggagcgggggcagcggcggatggagagggggagagatgcggccgacacgatggtggctactgtcggtgactagaacggagggggctccaacgtcgatgaccgctgcttcgaggaggaggcgcggggagtttagatgaaggagatggggaggttggcgatcatggcggggatgccggcaagcatgagtggagagggaggcgacgaggaggttagcgagcgctcggagagggaggaggtgggcgccacgccgcacctctccctcgcg

SEQ ID NO: 4573 - DNA, 49519 bp, Oryza sativa
cactcaggtcatccttctaagcccgattctccacttccccctccctcgcccaccccgaatctctaaccctaaccagtcttgcgtgcgacttatcgtgacgtcacatgatttcctcacctcgtgcgtgtgcgcgaattaggattcccgcctttccggatgaaacataggcattgctcgaacacgtagagggctggtccagctggtgatgagctggtgacattatacaactatggaaaattacaagagtaatgtttctattcccgtctatcagtgatggagtcggaaaattttcagagcctaggcaagctaaggattgataatgagcaaagatctttcatacatgtaagattcatcatggttccttgtatcaacaaagcaccgtgtcattctgaaatttgaggaagagctagctataagtaaagcacagatgatccaaattcaatgcaaatgcaattgattaaaatcaagtatattatcacaataaactactcactaataaaaaaacaactcctatactcgtgctggttggccaattactgagtttgctagtactgctccttggcaaatcaacactttatttgggcagcaaggataaccactcgattgttgcatggagactaaatgatcataattttttttaagaaaaatgataagatggattaatatgtaatatataactctacaaacatataagttaaaattcaatttctacaagttgtaaaaaaatagcaaattatactatacctagtaaaatagcaaatttgagtatgtatattcacagtcaaatttgttattttttataagttgtacaaattaaagttgaacttatatgtttggaaagcgatatattacatattaatctatcttatattttttaaaaatattttataaccattgttgacatgaaaaatgagtgtaccttgacccgaatgtttaaaagagtttccctagcaatgattgcatgtaatttcaccagcacaggagagatgcagcactaactacatgatagattttcctggacgccgtccccttttgtttccatgctgtccgtaagtggaaccacatggaaaaatagggggacaggcgccgggctgtcgcccgtacgggaaaacacattatctgtgcgggcggctaagccaaccgcacacgaattttcacccgcacgggcccaccgcttttaaccgcgcccgcgcgcaccatctcccactccgcccgctcctccacctccctctctcccactccactcctctcctcctctcctcccactctcctctcctctcttcccctctctcttggccggccggcggcgcgacaacatgcggccggcgcgcgacccctccctctccctcgactgcgggagcaagcggcggcgggcgaccacggcggcccctcctcccctccctcccctccccttgaagatccagcagaggggaggcatgggggtggtggatccaacggtgcgcgcccctcccctccttccccttgcagatccggtggcacgcggcccctcccctccctccccttgcagatccggcagagggggcggtggatctggcgacgcgtgacccctcccctccctccccttgcaaatccggcggaggggaggcatgcatgggggcccggcggagcagcggcatgcgtcagcggtcggcgtggagatggggtgatggcgtcggcgatcggcggatctatctctccccctccttctctctttgttatcctctttgttatttgtgattctttgtggtttgtgagatgcatttttggagttcatttgttgctgtgagatgtgttcttgtgatgtgacagttcatttgttgatgtgagatgtgttcttgtgatgtgagatcattgtgtgtcgatgtgcgactacggatccggcaccggcgacgggagcgggtggcggatctatagccggcgacagcggcgggcctcggctaggcggcggcggcggattagggttaggttttttttcttttttttttgattttttgtttttctgtgttggcagcgtaagctactgcatgcgaaaatcacgattttaccagacgactgggtgtgtgcgggccaccctcccgcacgtaaaaatcgtttagcccgcacgaggtaatcggtattgtagtagtacatgccgaggagcctgggcgctgctgggccgtagatcaacctctgttgacgagggattgcgaattgggcgatggaatatgcccccaaactttttatattttaatctatactaatacatcaaaatatattaaagggtattttctctacttttgaaaaaagtttcaatcttacttctttatttattaatttcgctagaataggcttgttagtgttcagtgacaatcatgtctacgtaaaaatgagcttaatttggctcatgatgacgatatgaataagccttgagggctttaaagatttcatttgcctgcttaataaaaattaatttaatgtaccaaggtacgatttttcttccaactttcttttataaaatatacttctgatatagatagaacgtcactattaatttattcttttgtttcttagtatttttttaaacatatggcctctatttgtgtttcacacgggacctcacattcttaagtacaaccctgtgtttttagttttgaaaaagtgaaccctggcacatacatgaattgtctacgcagagagatcgacgatcaacatgatgatcacaagatatcaaataattaagtcacgagaaacaacaaccttttattcaacactgtatatttcgatcatacaagccggatagccagtctaccaccaaattaagctagcacaacgatgctatacacagctggtagtcgattagaagcgtcaagctacaggatcccaagatcaaagtaattacgagtaacatactacagtctacagtacatgcaacataaaatagtttagggtggagtaataggcgcctagtgcgtgcatacatgcttatttaattagccggccactggctaggctttgctgcatttaggggtgaaaatggataggataatatccgatccgatccgctccaaatccatccgtaacgagaatatggtatgggttttttttttttgaaatccggtggatatagatgtgtggggatattatgatgcggatgcggatgcggacgcagtatctctaaaatccagcagatgcaaattatccgatcttcctaacggattatctgataggccgtttgccggataatccgaaattatcaactcatgtaactactctatatgttgcataaaacatgagccagcccatctaacgacccaattcatcaattaacctagctagactctttagtttgagactttcatgctctcatctaacacttcgtagctacatttttatattatggacatcatatatttatgttgtttagcagttaagtatataattatttcgatggatcgtttattgactatttattgtagtcccttgcattgctaactcgatgttgtattgattgacatgtaacatctgaaaaatttaatccgtttccgaactgtctccacaacatttttaacatccgaaataatccgctccttataccatccacacccgcttgaaaatatggtttagactatggtatgaccactatctgtccgaattcgctctattttcacccctagctgcagccgagagcgaaggaagccttgccgcattctccgaggattccatccgcataatagctcctaacggtgatgggtattcctctagccgtgggagtgccgcacacgcatctggtggcgacgtttgatccggagctctgagatcagtgagcagtagcgatcgaagttgggaccaaagggcggctgaaattgtagagcataacaaaagcagtcggcgagacttgacacggttcctgcggcacactgcgtagctggagctggtgggggtggggcattggtggtctggccgctggcgaaagccaacagtagagaatcaatggcgaggaagaacactatgggccagtttggttgagtttaagattctgagaagcagctggttggtagcaagcttctaagaacccttaatttccaggttctgacttctagctcattttatgaactatacaactacaacttcttagaatttggaccaaaagatggattgtttaaggaaggttctaattctaagagaagctgcaactccttcaaagtgccctacggaaggatctgaaaggtgccactgtggagtgatgatttatagctagcttgaatgcttgatgatgcctgcaacgagttacgagtagtatagctagcttttggtggtgagagagacgtaggtgttgcatgcattttcgtttgtactttgccagaccgtgatacttcttctgaagctagtgttgccgtgcgtacgtatagattgtatatgtggagctaatccctcaggttgttgatcgcctttgaaagtatcgcactgtgcgtgaaccaagatttctacgtcgcccacgccaatagactttgtcactttgttagcttcgctagccggccgcaccctagctataaaactacaagctagctgctcaatcgtgtgggaaaaaaaaccgtagtgtagctggtgttcgagcacgtacgtatatatatgcacatagtccgcagtcaggagtaataatcgagcctaagtcaatcgcccagtatattaatcatgtaaatgcactactgcagatatcttaattgataccggttgaaaatcttataaagataccggattttctaaccggtgcgtagcaggcgacacttatgtagagggaaaataggtgttagtttaagaatgaccggtacctttgaggttccacaaataaaaaaaaatatcggtttgattcaagcgatgcatcaagtagctcccatcacccatgagatcctcatccaacaacaaaatcatgaaaaagaaatcatagaaaaaaaaaaaccatgagcttctaaacatagatctgtttcccaggaggaatatttatttaaagaatttcagacttatttgcgtttcccaggaggatatatgtgcttctaaacatagatctgtttctaattaggaaaaaaacgttcagatttcaaaattgtccactcaaagttactttcttataatttttcagaatttcggcactctgcagtgtttttttatttcttggtattttctaaatataggacccctctatttgtgtgtcgcacctggatctaaaaatttttaggtacaaacactttgttttttattttgaaacagtgaaccctggcacaaacatgaattgtctatatacaaaagatgaccggcatgactttctttttttttttttacgaatcgaccgacgccaattttatttaatagagtaggagaaaaaatttacaaagaaagcaagacctctgtacaagctaggcgataggagcctggttagtgactaaggtaaccaagaagctagattcctagctcccgctcgggtctaaaaattttggcctcctcatttatcttgtttattactcactccgttccaaaatatagcaatttttagctatgaacatatacacatagttgtccagatttataactaaaaatccttatattttgagacggaggtagtaggttggacaccggaaaaaaatataaatgacaaagtataattgagcaccagaacatcgctcttttgatggtaatggatattcctccgaccatgagagcgctgcacacgcatctggtggcgacgttgttcgggagctcggagatagccaagcatgcagccaggggtggaggtagagtatgggagggaggtggcaagaaacccggtcaagaaatttttttagctatacctcaccaattttcaccatgtgtgcaccccctaaatacaaacttagacacctgtatcagcttaaacttaaactaaagttaagtaaattaagcaatagacaccctcctccatttcattctaactctacccatgcatgtagcggtcgaagttaggtccaaagggtggctaaaaatcatagtgcataaccgatgcagacggcgaggctccgcttgatacgattccttcgttttggtaggtccagatgcaaacgtggcatcgatttctcagaatttgtcgacgtgtgcgtgccgctcgggctgaataccacggtattgcattgtgaaggcctttagtgaaggcgatggtgggggattattggtagtctggcagctggcgaaagccagcaggagatcaagaccaaatggcgaggaaaaacggcatggtggacttggagggcgccattgttgtttgctttcgatgagtgaacgcggatgacgatttctaggttgatgttaggcattgagatgtgtagtatttatagcctaggaggctaggaagcatcgaatccgtgcatgatatagcggttggtaccttgggcatgcatgatgttttgtctatacgtactttgccagaccgtaatataatatatactgcaagtctttacttcttctgaagagtacgctgtacacgtttatacagccactagtttcttttttgccacacaatcaatccgcatatttgtcaaggacttgatcaagtacgtatgtacagttgattagaaacagtgcacgtgcctaactcagccagtacatacatatagggctacaagttcgctgaaagtatgcatgcgaagctgtgaaactatccaggagtcatctcaatacttgtgctgaagatccagttcgatcttagggataattgggccaggtgaattagccgattgtgtgcacacggatgaaatgttgaagcaggaaacacgctggtgcggcccatggaacattgcacgagggagtgcaaatgttctgggccttggcccttggggtcataggacaaagtaggaagtagatcttgatcctaagtgaacatgggggatgtggccgtgtgggcttggcaccaaagattttgattttgcactcagacctccacaaattcgatccttacgcattaataatatttgtggacatcaaaatataaaacgtggtgagtgcagtatacagctacaagcacgactgcaccacaacactaaccatgcttctcagagtttgattctctaagtagcgaaaaaaatagtgctccaatttttaaaattcccatttcaagttcccattttgttttgtaaaaccttcccctgctagaagcagctacgacgaacttgggcgctagtgaagttcaagtactgaaccactagacgataggggcatcactagacgatagggccgtatacccattgataagttgtgaagagtttaaccataggtaatctcttacccatccggcagaggcctttggtgtcccttccagtcaagaattggggcttcacaattactagccaatatttctctcatgcctttcctcgttcatggttcgatattctggtgtcctaggcgtagaggaaccacaccaatccatcccgaatttggtggttaaactctactgcggtgacgatactgtaggggagtcctgcggcaaaatagctcgatgccagaatgataaaaagcttaacacctcttatttgactttttcactattttgaaatacgaaaaagatccaaatccaaaatgcaaaggtcgtcttattcaaaacctcaatcatcacatcccctctctcctacttcacacctcggaacgcactgttcttatagagagaaaggggctttcccatcttcttaacccgaaatgaaatggctgaggagagggaggttccttttggggtacccccgggaagagatccagtggagacggggtgggcctgtagctcagaggattagagcacacgggactcccggatcactatggccgggagaatccctctcactttaaaacactagagttttgggtactaaaaaaacgagtggtttctgggctcgcctcttcgaggggcctccgctcgtggacaaactctttccgggtcttacccaccctcgagtccaatctcgggtgggcgcttagatataccctattcactagaccggaatccaatccttggctagccttcaatggctaatgctgaaccatggaccggttgacagacaaaggtctagatagccactcgtgtatccactgtgtggttctgagcctgagactatgaaccacatcctgatcgcctatgcatacttgtgacatctctggcaacatatgatgctttgcagccggaatttagggtggtgccccaaccaatcactcggggtgtgtttagttcctgaaaaaagttagaagtttgaacaaagttgggagtttgaaaaaaaagttagaagtttatatgtgtaggaaagtttttaatgtgatatgatgtgatgaaaagttaggaataggggagaaactaaacacggcctcaatctagttggtgtggtggctcagtacaaggaagtttctgcccaagacgtggaagcgtggcttcgactcactcgtcatcctgatgatatggtgtctttggaaggagcggaacgccgaagtgttcgatgacgtcctcactttcgtgcaagctctgatttcttccatcttgcaagaacctgtctctggatgcatggaagagtggggactcatgcaactcggtttgctgttggcctctcttatttccgcggtgatcctgttcctttccctcgttggctttgtggctggagtttttttttagctctccataacctgtgctccaccctaagtaaattccaacctcttgggccactactagtgtgtttcttttttcgtttttgctcttttctaatacattgatcagcaaggcctcttacgtgtttgaataaaaaagttcaaaagggctaatctctcgatcgattgcctagcttgacaagtattgtactgtgcgtgatctaagacatttgctaccgctgtactgtgcgtgatctaagacaataacgttcacgtcaagacttttgttagctctctaaaaaatgattttagatcatgtgtagcaacaaaagaactagtgtcaaatggaggtgttggaacaagcacgtacagtcgatcaggagcaatgtatgcgcctaactcgatccggctgtagtatgtaattgatggggtcatccttttattaataaagttctttaacatcgagggcctccctgctgtatttatttaaagaaaacattgatggggcacatacatacgacgcaagtttgctgagagcattgaaacagtggagaagagtcttccctcttcagtactgtgctgatcctgtacgcagatgtaatgtatgggcgtgcgcacaaagtgtcaccggagcactaagttttgtctgggcccagggaagttggaaatacaacttgaaaaaataagcccatttaatggccaagtgaacatagctttttacaagtactacttccatttcatattatataggtcgttttgatttttttaagtttgtttaagtttatagaaaaatatagtagcatttatagcacaaatttaattttattaaatctaatattgactatatttgatagtttctttgttttatgttgaaaatattgctatatttttctataaacttaatcaaagaaaaaaattaaattagaaaaaagtcataacgacttataatataaaacagaggcagtagtatatttgaggttggaagtatttttataccagcaaagaaaattgtagcagctatctcgatttcgtttgagagctgttatcaaattttaagcttctgacctctgccattggattcaccatttccggttcccatcttcgtgcattcgccttccaatgggggaacttgtgtagctgtgtacatgaagaactggtgaagtttacatggtggaacaagtcttctcttttgtcttgggggaggggggttagcaggagttaggtaaatcattttcagaccataatataatagcactctctttattttatattataatttgtttttattttttccagtcaaacttctttaacattgtaaacgacaccaaattagtttattaaaaataatatttaatatattttgataatatgtttgttttgtgttgataatattgctatatttttctttaaacttaaatcaaacttaaataagttttgacttaaaaaaatatcaaagctcttataatataaggacgaaaggagtagctatcagtatgaagagggaaacgaggaaatattatcatacacctgtacccactatatttcgattttgtaggcatgcatgcatacacacagatcagtacaaaattaattcttccaggctagcacgtacgcataataacgcgtaatatgatcaagtcatgtgtgtgtgtgcgcgtgcacacacatatagcacagtcccagatcttataactttattattcttaaacatacatggatattaagaccctagcttatagctacctcaatgaagaacggcacgtacgcgcacgcacgctgctggcagatatatattgggtcatccaagtttaatacagcatatatgtagaggcaaacacgcaacatatatagatgctgcatgcctatatatagcatgtacatacatacgtatacttacgtatatatgcatgcacgctatctctcaacgtactgattaattaacacaagttacagcggaaaccttgccgcatgcttttaggatgttggggacattgaccttcagattgacgagggctttcaccttgatggcctcgcaaaggcagaaagcggcggtgtcgctcgggaggctggagagttgcgagcagcactgctggttcaagagctggttgccaagagcaacattaaggcacacaccaagatcagctaacggcagcgggcacttgggaggcggcgctggtgatggtgtcgggaccggagttggtgcgggcgtcggtggcaccaccagggctggtgctggggctggagtttcggtcggggttggcgccgtggctaggcatgggctatggccatgtagcactagtcccccgttgacggcagaagccaagaccaaaataactgatgcaaagaacaaggcagagttcattgcccgtttgcttgccattgttggaatatgtgtgtttgatgcttttagggtatgtgccttgtagtatttataggtatgtagcttgcaagttggtgtagcttaagtcaatagaaaacggaaagctttttgaattttggcgcactgattaacaaatacatttgtcagtctctagtttagcttaactccatacacctcattctcttctcatagtacaactcgtgccacaaactcgatctctgcacataatctcacatagattgcacacatgcgttgagtacattattcaatacattattcaacactgtatatttcgtacaagcctgatagccagctgtctagcacagcgatgctatacacagctggtagtcgattagaagcgtcaagctacaggacaccaagatcaaagtaagtacgagtaacatactacagtacatgcaacataaaatagtttagagtggagtaattaataggcgccagtgggggcatacatgcttatttacccggccgttggctaggctatgctgcatttaggccttattcggtttggaggggagtggggaaataatttcacaccataatagatgtggaataaatcccctccaatccctccctcataggaattaaccgaacaaggacttaggggtgaaaacggatcgcataatatccgatccaatccactctgaatctgtccacaatgaggatatggtatgggcttttaaaaatccgatggatatagatgcagatacggatattatggtgtggatgcggattatccaatctttctaatagattatctgataggacatttgccggataatctgaaattatctactcatgtaaccactctatatgttgcatataacatgagccatgagccatccaatgtcctaatttatcaattaacctaagctctttaatttgaggctttcatgctctcatctaacacttcgtagctacgtttttatattatggacattatatatttatgttgtttagcacttaattacataattatttcgatgggtcatttattgactattgtattgttgtcccttgcattgctaacttgatgttgtattgattgcatatacatgtaacatccgacaaatttaatctgtttccgaactgactccgtgccatttctgacatccaaaacaatcctctccgcgtaccatctgcacccgctctgaatccacttaaaaatatggtttaggctatggtatgatcactatatgtccgaatccgctttgttttcacccctagctgcagtcgacagcgaagaaaaccgtgtcatgttctccgaggattccatctacataagagctcctgactgtgatgggtattcctccgaccgtgagaacgccgcacatgcatctggcggcgatgttgttctggagctctaagatcagcgagcagcagcggtcgaagttaggaccaaagggctgctgaaattgtagagtagaacggatgcaatcggtgagacatgtcatggttcctacggcacactgcattgctaaatctggtgggggtggggcattggtggtctggtcgctggcgaaagccaacagtagaggagtagtggcaaggaagaacactatgggtctgtttggtggagcttaaaattatgagaagcaactggttggtagttagtttttgagaatttgaaaaagctggtttcccaacttatggcttctagttcattttctgaattctataattatagcttttcagaatctggacaaaaactgtactgtttgggagggcttctaattttgagaaaagttgtagcagttagaaactcctccaaacatgccctatgaaggacttggagggcgccattgtggagtgatgatttatatctagcttgaattcttgcaattcagcaaataattttgaacacccaataacaaattaactcttttattgggtgaaacaacacgtgtgttcactctaaataaatctgaagtgtcagtcctagggtggtgaaaataaatgtcctttttcactctactagaatatgattctaatactaggttagccaggtgtgaagcgagctagaggcggcctggctgccccaacatcccaataaaaacacccctcctccctatatagtgttttgcctttagaatactataggtgtgttcggctgcaccacttgaaatatggtgcggccatctttcatagtactttgtgttagcgtagcagttatatggcttcattgcagtggctacaattatacagctgaacattgcagtggctatatttttgttattctctctgtccaaaagtcttggtcctatatatttcatttcatggttttttcaaatcagatggactacaaataagtctccatatatctaaaacttaaatgaaaggattgtctttccgttttaacgtgctaaatattctgattgattgcgtggcaaaaaagcaaactagtggcgctggttttggatcaagtacgtatatatatagttgattattagaaacagtgcatgtgcctaactcacccagtacatggggtacgtacgtacatatagggctaagtatgcatgagctgtgaaactactatcaaggagtcatcaattcttgtgctaaagatcccgttcgatcttagggataattgggatcgtacgtgcacacagtcgtgcttgtagattttggcttcaattaatatattccgattgcgtgcacgcggatgaaatattgaagcaggaaacgcgctggtgcggcccacaaaacattgcacgagagggagtgcaaaactactgcaaatggtctgggccttgggtcataagacaaagtaggaagtaaatcttgatcctaagtgaacataggcgatggggccgtgtgggcttggcactaaagattttgattttgcactcagacctccacaaatacgatcattacacattaatatttgtggaaatcaaaatttaaaacgtggtgagtgcggtctacaagcacgattgtaccacaacaccagcaacgcttctcataatttgattgtctaattagcgaagaaaatagtgctccaatttttacagtttccattttgttttctaaaaccatcccctgctggaagcaactatgatgaacctgggcgccagtgaaattcaagttctatccttgcatggctagccttcaatatggctgatgctggagctggatgatggaccgcttggcagacgtttagatagccactcctgtatccgttgtgtagttctaagcccgagactacgaacctcatcttgatcgcctacggatactcgtggcatctctggcaacagatgcttcttgatgccaacatttaggttggtgccaatcttgttagctagagtggtggcttactacaaggaagcttctgtccaaggcgtggaagcgtggcttcgactcactcgtcatcctcatgatatggcgtctttggaaggagcggaacgctcgagtgttcgatgacgtcctcactttcgagcaagctctgatttcttccatcctgcaagaacccgtctctggatgcatggaagagcggggactcggcagctcggtttgttgttggcctctctgattttgtggtgatcatgtttctttccctcgttggctttgtggttggagtttttttttcgttaagtagctctccataacctgtgctagctccaccctatgtaaattccaaacctcttgggctccactgcctagtccgactgatcggtctgtatatttcctttgactctttatctgcataccatctgactccgcgctgctctgcaatacaagcaacgttcaaatagggtctaactctacttgtatctgattgctctttacaagatactgctacctgttcgctgatctaagcacatcctgctcactgctgtactgtgcgtgcatctaacacatttgcgttcacgtcaagacttgtttagctctctaaaaagatgattttagattgtgtttagcaacaaaataactagtgtccgatgaaggtgttggaacaagcacatatagtcgatcaggagcaatgtgcgcctaactcgatctggctgtagtacgtacatacattgatggggagcgcacgaagcgtcaccggagcatgaaggggttgtttagattgatgtcatttcaaatcatactattttttttataaaattgttaaatatatgcatctatttagttttctaccaaactctagtaaatacataagtaatcctaccaaaacttggtaatattgttaaattgctaaaatttggtaaagtttattttggctacaatctaaatagtccggaagttttgtccgggcccagggaagttggaaacacaacttgaaaaagttaagcccatttaatggcccacttgaacatacctttttataagtatttcttccgtttcatatcacataagtcgttttgacttttttaagttaatttatctgaaagtttgattttatataaaaatatagtagcatttatagcacaaatttaattttattaaatctaatattggatatattttgatagattctttgttttatgttaaaaatattgctatatgtttctataaacttgatcaaagaaaaaaattaacttaaaaaaagttaaaacgatttataatataaaactaaggtagtattatatttgaggttggaagtattttgtactagcaaagaaaattgtaacagttaggtgccggaaattcccgatcgaccgggtgtcgtttccatttaaggggtaccgtttccgaccgtacctttttggctatttttaaattttgttttttttttcgaatttctttctgtatcatattaatgtcgatactgagtagtttaaatgataaatatggtcaattaacagccgatcgagaatcgttttcgaagagatgctacagattccgaccgtttcagatcgttttcacccttagtaacagttatctcgatttcgtttgcgaaatgctatcaaattttaagcttatgatatctgccattagattcactatttccagttcccatcttcatgcatacgccttccaatgggggaacttgtgcagctgtgtacatgaagaactagtgaagtttacatggtgcaacgagtcttctcttttgtcttggggaggggggtttcccgcaggagtcaggtaaatcattttcagaccatagtataatagcactctttatttatatattaagttgttttgatttttttagtcagacttatttaacattgtggacgacaacaaattagttttattaatattaacatttaatatattttgataatatatttgttttgtgttgataatattgctatatttttctttaaacttgatcaaacttaaattataaaataagaaggaaagagtagctatcagtatggagagggaaatgaggaaatattatcacatacacttgtacccactatattttgattttgtaggcaggcatgcatacacacagatcagtacacaatcaaatcttctagcacgtacacataatgatatgatcaagccacgtgtgtgtacacatacatatatagcacaatcccagatcctgtaacttaattattcttaaacatatatggatattaagaccctacctccatgaagcacggcacgtacgcgcacgcatgctgctggcggatatatatttgggtcgtccaaaagtttaatacagtatatatgtagaggcaagcacacagcatatatatatatatatatatatatatatatgctgcacacctatgtatagcatgtacatacatacgtacgtacgtatatatatgcacgctatctctcgacgtacttattaaacacaaactacagcggagaccttcccgcatactttaaggatgtcggggattttgaccttcagattgacgagagcattaaccttgatggcttcgcaaaggcagacagcagcggtgtcgctcgggaggctggagagctgcgagcagcacgcctggttcaagagcgggttgccaagaccgacactaatgcacgcgttgagattaattaacgccagcggacacttgggaggcggcgtcggagatggcggattgacaggggcaacggtgggtgaaggtgttggtgccggcgatggcgtcgggactggagttggtgcgggcgtcggtgtcaccaccggggctggtgctggggctggagttccagtcggggttggtgccggtgcttggcatgggtttactttgcccattccagcagaagccaagaccacaacaaccaatgcagagaacaaggcagagttcattgcctgtttgcttgccattgttgcctatgtgtgtgtgtgtttgatgctcttagggtatgtagccttgtagtatttataggcatgtagcttgcaagttgctgcagcttaagtcaataaaaaacggaaagctttttgaatttcggtgcactgatttacagatacattgtccgtttttagtttagcttaactccacacacttcattctcttcccgtagtacaactcatgcatgccccaaacttgatctctgcacaaaacctcacatagattgcacacatgcatcgagtacattcggcaaataattttgaacatccaagaattctttttttgggtgaaacaacatgtgtgttcactctaaataaatgtgaagtgtcaatcctagggtggtgaaaataaacacccttttcactttcgtagaatgcaatactagtactagggttagccaggagtgaaaagagctggaggtggcctggccgcccccaacatcccaataaaaaaaaccccctccctttatagtcttttgcctttagaatactatatttttttgttattccctccatccaaaagtcttggttctattttattttctgggttttccaaatgagatgagcttatttgtagtctccatatatctaagacttaactgaaagtgttgtcttttttttaacatgctaaattaaattgttgactggaacccaagcaggggcggatccaagaacaaaaaaattggagggggggctcaattacacagtttcttcaacctccagccatctaggagcctttagtttattattcatggtgaaaaaattgaagggggtgctccgggggtatccatgggtcttgtgggtgtagaggggactcgagtcccccctgcacccacgttggatccgcccctgaacccaagcaaccatcttaatattcattggttgcatgtatgcatattgtttcttagttttgttacatgagggatgagggatgagtcaattctttttggtcttgatgataaaagaaatatgacttagaatttagggttagaaaggggtgtatagtagttattctaaagtcacgtcgaattggatatgggtgacatagaaccaattcaaacacggataacgtaccaaaattttaacgaaaacattttcaatttttataataatagagatagagattaagtacgaagggagatgaccatgtgaatagctaaggagtgagagagtggttgagagcgagatttggtgaaaattgaattgaggggtggtggttgggtggggagagtagttcttagtattccgagtaattgtatcttatgacaactgaagacaaatggagtaaatagtaatccatattgtcaaaatattttgcaattattcatattggttacaacaaactaggatatagacattgagtgcttaaaatgcttcccgccttgttccagtccttcacatttattttctttaagaaaaaaaaactagagtttacttcaaacaaacattgcatggggttgaagatagaccatgtgttatgtacaaaacagtaagagaaacacagagggactgcctaacaagtatacacacatgtattcaacaaatggaacgttctctcagagacattgtaggatgatcccaagacttttggctcaaaatccaatcaatgttgcgtgcggttgggggttggagcagtcggtacgtcatgacaaacactattgatcatatacattgctccctctcttgttcccctccattgagaaaaaaaatgaaaaaaccacctagaaattactttaagtttaacattccacgccataagtcattttgttgcaaatgctcacccctatactcggttttgttgaaaatccaccctagtgcacacatgcttgaccgaatcaatatattttcataaattgtgaaccgtcaatgtggtcttcacataatttaatacttctagaagaatagtcttaacaatttctttttgagattctacatatagaattgctaatgaaagcttaaaaattgctgcacctagttttgctatatgcagaaaaaaatataaagaataagtttaatgcaaatactaggacaagattgactcaattagcttaacctgtggtggctctacatcagtgataacaagctgatttggttaagcatatgtgcactaggatggtttttacaacaaaaccaagtatagggtggatatttgcatcaaaatgacttatgagatttaagtaaaaaaatgtcttatatatgagatggaatatcaaacttcaagtgacttttgatatgttcttttttaaattttcccttaatggagcgatcgaggttggcagcgaacgcacacaaggacctgaagaaaggttaacaccgcgcgtcacctcacctccgtcgttgatgcatgtacaaaacctctcacggtcaagagcgaagtacatgagaataccgggttacaccacagagaattggagtttcctcacttcttccttttctttttttaaaaaatcattatattaaacattaaaagtacagtacatggataaaagatacatcttcagccattaaagttgattaaagaacttccatagtaggataaccattatgatgatataagtaagaaaaattttgacaaactgttttagtagaactattaatatttgtccctagattttttttaaaaggtagtcagccatcttattcatttatcttgaaatctatcgaatattgtagctccacctaaaattgatttactcttgatagaagaggaaacaagctccagggataactggataaggtttagttatataattctgctatcttagaagtagtacgtaccaggtcctgattgatttgaaatgataagttccttacatatgcaaattgtcagattgatatacctgcaagtttagcttgaatacaagaggtataagaaaagattttgcttgaataaagatagccttgagagttatggagtcatgaatgaaaatgccaaagcctgattgatcttccatccgggaggcatcaacatatatagcatctattttcaggcaaaacattaatagagatattaggattatcttccagagttcccatatagtcatcccttgcttcaaagctcaacattttagtgaaattattagacatgacatctgctgcattacatataatatacttacataggttcccattcttaatttccttttaaagtaatatcattcctaactttccaaataaacccagagcattatagcatgattttacgtagtattatcagatttaacagttgctagtaagcaagctagaatgtctgaaatactttgcatgttatctactatgagagttgatattgtcctctcttctgttgatgaggctttggctagcatcagggtttccaaaaccgtcggggccagggttaccgcaccccggcggtaagcacggttaccgcgcggtaaccgcggtaaccgtgaaaaactgtataaaaccgtacaaaatttatcaaaaatttaaattattttttaaatttatttgaatttaaggaggttaccgcggtacttatattaccgtaccccgcggtaagcccggtaaccacggtaaccgtacggttacctacggttaccgacggtaagtcaaaccctggctagcatccactcaaggactactaaagtatatgaaattaactaggagaagattttgattggttgagaagtaaatctaggtgaaaatattattatagtttagaaaaaaaatttaaatgctagaagttattttattttagaatggatagagtactctacgtccggaagcaacaggcttgaaattgaataccccgggattagattaattccccctgccgtgaccactagccgcacgtgtccctggcaacgaaaatgctagtcctcacagttttcttgttttagaagctactgatataaaaatgttttgtaggtaaaaatttatatttgtgtttacaaattaaggctgaaaaattgtgtttccaaattaaggctgaaaaatatattatgataaaaaaatccaaaatcaatcataaaattaaattttgagtaaaatttaaaatatccacctttatcaagttaaagttataaagttataaaaaaacactactgggcaaagccccggtagttctttcagtcaaaaaaattatagaaaatcgtatgtatctgtggcacataaccacatgagattttataagtgttttataaaaccctacctttattcaaatctcgattaatttcagcatatcctaaacaataattttttcaaagtagtgaagttaaaatatcaacttaagaactcaataattataaaaaaaagagatcataattcatagacactatatttttaaatgtaagtatacacaatatatatcgaagggttttgtaatactttataaccacaatgccctaatgttatgtgccacaaatcaaaataactagggctttataccacgtaatttaactataaatatagggttctatgaaatttactgttaggttttagctgcaattgagccaaaaaagacaatattatagaaacgattttttcggacaaggcccctctaagttgtatatgggccataactgtcgtgcctacaaaattcgctcccctgaaaagcgaataatgggtcgcccgcatgcgaaaatactaatttttgcacatacctaggtgcatgcggacgtccaaccacatgctaagataggttttgaccgcttgcaaaaatcttttctgtagtagtgagaaatcactgctcgtacgtatggggacgctgccagatcgagaaaccatgtacaagatcacctataaatccaaaatttcaaaccgatgatacaaaccatgtttggatcatatacagcgtataacctagtgttcagtcttaggccccgtttggtagggctccaaactccaactcccaactctcaactccaactccagagagagctagctcctataggagctgaagtgggtatgaaagtgtttggctagattagttagctccgcgcaaatacgttccttgttggcatttcgtcgaacacctggttggcgtcgccttgctactgccgccgccgctcaacccgtgcgccgtcaccgccacccgcctccgtccccgccgccagcggtcagcccacgggtcgccatcgcagccgtcgtcacacgtgcgtcgcccggccactgcccgcacgcctaccgacgccgacgtcaacgcagccgacgccgacgtcgacgcaaccgacgcccgtgcgcctgcagccgccgccgttgcccgcgcgcagccgccgtccgcgtgcctgccgtaattgttcgcgcctacaaaattcgctcccctggaaagcgaataatgggtcgcccgcatgcgaaaatactaattttcgcacatatctaggtgcaggcagacgtctaaccacacgttaagattggttttgaccgcctgcaaaaaaattttctgtagtagtgagaaatcactgctcgtacgtatggagacgctgccagatcaaggaactctgtataagatcaactataaatccaaaattccaaaccaacgatgcaaaccatgtttggatcatatacagcatataacctagtgttcagtctggtggacatttacacaacaaagtactaggcaaccatgtttggatcatatacagcgtataacctagtgttcagtctggtggacatttacacaacaaagtactcctagctagcatatataggacacgcatagtctagtggacatttacacaccaaagtactactgtatatgcccatgtggagaagatcttccgtgttgatggagtgtaccagtgatggagtacccaggcacccagatccatgataacatgcatgtgcctaactcagctagtacatgcgtggggtttatgcgtatatgcatgcgcagcaattttctagcctgatttttcttatagtaattaataagaaattcggtaccattagtagtcggttttgcacgttaaaggcgatatacccatatagggactttctacgtacgtacactttctacgtccacgtgtgggtattattaaccggtagtcaaaaaaattctactcctattagtttgagatggttcgtcgttaggagcttctactattaagaagctgaacataataaaaaaaatttcctcacttgatcttttttgtcattatacagaaatatgagtatataccccggtctggcctaactagcccgacggtggggtagaggtgcgatcacactggactcccaccaatatgtctgagagtaagggatgtttggttggttgtgtttctttgccaagctacaatttagtcatgtcacaacttcctaggcatgtgtttgtttcgccgtcacaactatatcatgccacactttcttaacctttggccgacttttttttaagataatagaagctttattaagactcaatcaattacaccaagatggtacaatccaactgagccaacccccggcctttgtataaaatgcacacatctaaaaaggaaccataaaagaaaaaacctcatctcaagcacaggagtgtgaaggaaacataaaattagtggttatcaatccatagactagaccaccacccatgcacctagataaaaaaattactgcgccacctggtccaaacatcatgataccactgcaatagtatcccggtttgtggagtatattccaggtgtgtagccaccgagtaactaaagtaataacctgcaaaggagaagacaccattttgttatcaaacaacaactcattcctgcttagccaaatggaccaacaaagagctactgcgcccatcaaaagatgatttcttatgtctttaggaacacgtaaaagccaaagcccaaacatataagttacatttcgaggagattttaaatttgaagccattcgaataatagaccacaccaagcaggaaagatgacattggaagaagaaatgttggatggttttgtctttatgacaaaagcaacactttcttactaccttgcccgacatgtcatactcttaaacttgtgctaactatgccacacttttgaccaactatttattggccacattttttccactatgccacaacttggctaagcttagttataacaatgtaggcatagggatggtaacgaggctacacctgtcgggttcaattatcctattcccatccctattaagaaggaaatcaatctaccccatccccgcactcggggaagggtttcccctatcactgtccccgcatagggttcgaggcacacccaccgaatagtaggagtgcagcaggccagtatgcggcagccatggcgcactcctgccgctgctgcttggacgcgtcatagcatcaggtcttgcttggaggcaacaatgacaacatgatgcgtatgaaaccaatgtggatgcattagccatggcacgacgcgaatgctcagcatggatgtggcggtgcaaatgtttagcatggagaggacgcgatgaggaggcgtggatccagtggcacggtgcaaaggacgagacgaggacacgggttggtcgcctggagtcttggcaggcttgatctagagcactcaagaggaggggataatatgcctagggtttccttactttctatacgagggacttgtgaattgggcctctcctaagtggacttataatttttatatggattgtgcgctcaagcaatatgcacatatgcctaccatactcaggggctcatgggaaattagggacggggggctagggaacgtcctcgttcccacttccccaatgcagacatattttgcccgacaacaacccccatgggtgatgattttatcccatttacatgccctatagagtaatccccaccggggttcaggacccctaccatccctagtcaggcatcaaccaaacattccctcaatagtacacaacgctacgatataggcatctagataggatctttattttaagaggcatccttaatttccataaaacattattactctctatataaccattgttgatcaaggctaaatatatagaatggaccaaaaattaattaaccactgtgatgaagattccatctaaacatacttttattatcatttagattaatctgcacaatataagcaaccaagttatgccatagcacaaggttttgacccacaaatgcccttcaagatacattgtgtgtaacagaattcaaaacaattgcaattgatgcactttttctacgaactaacttatatagaaaagggtattgctccttgaaagaagaattatcaatccacttatcttcccagaatttgatttgttaaatccaaccccccctacaaatcactaatcattccaatctcctaccctcaacttaataaaatcatcgattgtatactataaaaaagtatgtattaaatctcatgcccaataagagaagacatagggaacaacttcgctcaccatgctagcgatgcacgatgggataaatcactagtacagatccttctatctgtgacgggctctaatatgcttagaaatagcgggccgtcacaaggaagtcatctcaatcgggccgaaaagtgcccgattgagatatggtcgcacagacatgttagatgggtataaaacttaagcccgtcacggatgacacctatcagtgacgtgcaccaacttgaggcccgtttgagataacaactaggcccgtcacagatgactcatcagtgacgggctatatacttaatctctatcgagcattaagagatatgtgttatatattattcacaaattttacatatatgtgttatagtttataaaaccagataagagatatgtcaattttgtaaacaatgttactatcactttgtcgtatgaagaaatgaccaaaataaaagttttagatcttgatgagttattcaactttgttgtggatgactttttcaattgatatcatttagtatttgaaaatgttgtttgaagttgtcatattttcaaattcaaattcaaacggttcaaaaaatgttatatagaaaaatgaccaaaataaaagttatatattttgatgagttatacaactttgttgttgatgactttttcagttgaagtcgttcactgatctaaaattctatttgaacttttcaaactttgaatttcaaatttcaaattgtttaaatagagtcagatggagaaattaccaaaataaaaattttgcacctcgatgagttctacaactttggttttggtgacttttccatttgaaatcatttaataaccccaatttgacatcctggcctagggcataataggattaatagaatactcataccaacatgttacaattacttttccggaagccaatctctaaagaactttgacgttaagtgtgcttggtctggagtaatttcgagatgggtgaccgacctttctcatctgtgacgggctataattaatgcccgtcacagtcacagatgactcatctgtgacgggctatagttaatgcccgtcacagataagggtcatttggcgctagttgtggcccgattgagatagctcttcacatcagtgacttctagcctgtgacggacgccatgcccgattgagatggggcttaccgctcgattgagatgagggtatccgttctagtgaatcactgagcacataaaagctagatagaggtggcacgttgtaagagaaaatggacctttgaggagtattttgtacgaaattaagctataggcgggagattggaaaggacggtgacttgtaggggattatttgggttttccaaatattaataatgaaagtgcacatacttaagaacttgtcttttcataagtcccgacaaaaaatgagaatcaccagacattttcacaacttgtataattgactaattatttacatatttccttctaagtaaactctgccaaagagcatcctcatttatcaacatgaaaagcttgactacaattgttatggtggagcttgagggctgcattggacaaattctagggtagcgaggcgagggagctcaaggatggcggtctgggattgggtgcacgtacgtgagagatcgagagccgtggccagcgcacaaactcgatggcggcagctgggggtgagagcttgagagtcgcgaccttggggagttcaatgcatgcagtggcttggcacaagggcacggtggtggccaacacaactgtggcaactgcggggggatcgaacttgaggttggcggcaatgggtgacctcatgccatgaggagtttgagggtggcagccttttgcaatctcgcagctgctaaaattgaactcaagaagaaagggggatcgatggagctggccggctgccctgtccatgcctgaactcgattgcctaagatggagatgaacaagctagtggaaaatggaggtaacattacaggtatttaacttctttttttttttgcggggaggtatttaacttcttacttttgaaggaaatgaaaatgaaggacacttcatagaaattcggacggaatgctatatggaggaacgttaaacttaggtgatttttggtgatattaaaatggtttagatctttcaaatgttatatatgtaattaagcttataacttccggcgctacataactaattttgccctataactaacctacagttgacctgacccagtaatgatcagtacaccaaaaagaatctacaaatccagtcatctgttgctttttcatgaaatggtggatgccatcagaaaacattcatccatctatataagcttattatatatagtaattcatcagtagtaatttctgttccggtaatggtttgtgcgtccacaattagtagcataacgggaaaagaaattacaaatagtactgggtcaccttgctagttaatcggctatatattacaaattaaattaattagtaaattgtacatcccttaattagcttgagcgtccattacgtacatcggttaagttaatacgtaccacattaattaattaccgacacattgagcatttgatttgagcagctatagtagctagctagcacctcagcgatgcatgcatggaaccatatggatcatcactattcggagcttggaggtgcaggagggaagctagctgccgcaccgccatggcctgcaaaaccttgctgcccttcctcgctgaagctgccggcggcgccctggtccacatccggcgctgctccttgctgccacgccgggtcccacgccggaacatgccacgccggcatcatcggcgccggctgccccatcggcgggtagtagtacggcagccccgcggcggggccggccgctccaacggcgccggcgggccctcccgccgcgaacccgagcgcgctgccgggctcctccttggcctcctcccgcggcacgatgtcgacgaggaagtcgaacacgtcggtgcgcgcgatggcggcggcgacgtcgttgcgctgcagggtgcggcgcttgttctcctcggcgtgcagccacgagcggatggtgagctccaggatgaagagctcgcacgccttggcgaacagcacgggcgcctccgccgagatcatgcgcacgtcctcgtccgccttcatgatcttcttgatccgcgccagcggcagctggtggttcttgaagtccgacgccgacgcgcgctccgcctcctgccgctggtacgcccagaacgcctgcagctgcgcctgctgctgctggagcaggtggtggtgcggcaccgccggcggcccgcccgcgccaggcacgcccggcaccggggctccggcgcctgcggccgccggctgaccggcgtagggtagctgctggttgtccattgtcacctatatatacgtaccttaattacagtcgatttgtagctgtgtgtgctgtgtctgcatgggcaaaattacggcgattaatttacgtgctaggaacgaatgatcgctacatgctccacgtatgtaacaatggctagctatacatgcaaagtgtaaacgacgcttgtaggtattgtctgtgagagatcgaaggattgataagcatttctcaatatgtgtgcaaactgcaaaagtaagtagagattaggagacgtactctagagcttcgttgctccacatgtgcgacggatcaaacagatgagaactcgaggctggctataggtggcgaagtgcatgtgtgggggctacttatcttctatccagagatcatatcatgcatgaaaatgaagctaagcgcttgcaaacacacagggtgttcccaaaggagatctggaaggagagaaacaggagaatcttcgatcacaatgagacctcagtgcctggtctcctcgcagaaatgaaggaagaggcaaggatctgggccttggcaggagcaaagctactcctacagctcgtacactaaactgcttttcctttttctcctttacccttcggggttgtatttcttactgctatatattcacaatctcgtgtttggttccattcaaaaagttagttatctggtatatgataccagtaggatttgacgtggtccgacatttcttaatttcatatactactagatgtttcttatttttcagagatccataattttcctaaaccattacagatctcaccgaaacaaaagaggatcgaggccggatgacttcagaataagtcgatcatagcattatgatggctaaggattgtcctttcgttcaggaaaagtacaaaatcaaggaaaatgcagatagaacatagaacagtgatgactgataagtgaagagaactagctacttcgatgatcaacttacaaaaagctctagggagccagtcaacaagctgttttcgtttatgtagaagagggggaaaaagaactctggtttgcttttctagttcaagaaagaaagtgaaggaagaatagagaagaatgatgcagaagttgaagacactgcaaatgtaacagaattgacaaaaaaaaagctggaacaaatctaactatccattagaaaaaatgcaacaatagattcacgcatccatgcatgtcgatctcaactagttaattaagttcttaccagaaagcaaaacaggctagcctgtttgagtgaacgagctctactgcttcagatatccaaaagtatcagggtaaattaaagaacagcacagcaaaagtatcagatgcttcggcacgcatggggatcgatcgtcaggggaagcaggagtgcaggacacactcctcaccgtcctacccactgcctagtgcctgaacaaaatggccatctccactctcaactggggttcttgccttcttgctgcaattaagctgaaaaaaataaaatccatgaagtggacggagaccttggatatctgaagcatgcacgtcgttctcaggctctcggctgcttggaagctagctagaaacaattttttacagtgttcgctaatactttccactcctgcagtactgtcagcataatacccagtaaaatcgatgttactctgaaagttttagccaaaaagaacagtctgaaaagggataaacacgttgtctgcaccgtgacactgtccgtgaaaaccgatcaacgggggttgttgttgtgttgtgatttgttgttttttttggcttgtacctgaggataagaaaagatgaaggggagatccgggagagcgcgcattcgtggccaggcttggtcttttcggatatggatattatccgttctggaagtctggcagcctcacaaaattctacgcttagatttggggacgactgccccctgctactgctggatgcggccgatccatcgccgaaatctaaatctgcagcatggccgactgcacgttatgatttctggcgtgtggggttcacgtatccaaccactgctgatgaacactgaacagtgccacacgaggaaatatcttagcatggatgcatgaccaaacagatcagagatttaaatagtactactgccactacaccagaagcttgatgaagcagacactcagacagtcagacttcacagtcatactgttgtgagagatttttttcgcatgtgaaatttcgagtgtttctctaggtagtacgtagtacggagtagtaaaactccatgattgcaaagctgctgtaaataacctgtgttacagcttttcataagttttttctgcctacaataattacagtttctttggatcagcaaagagatctcatagttgatcacaccgtggtcagcttaaaatatgtagcatatgttcccagctcccacaaaaaggaaaatttctagtagcatgtttctgggccatgtttctggaaaagtacaatgaacaaagtcagaagtataacacaaccatgggcttaagtttggacctttttttgaactttaagttttgggccttaggcccaagtgaaaatgtaaattagcctgtactggaacctaaaacccaaaggaaaaagtacactgaaggaccctcaacttgtcattgagttacaaaatcatcccccaaccacaaaaccagatatattacatccctcagcttaacaaaaccgtttactttagatccttcggtggttttgaccccagttttatccgacgtagccgctgagtcagcgggagacccacgtggccccacatgtcaggatgccaactcatcacctctctgttatttcccctcctccccctttctctttctctctctccctccttctgctccccagcgtcgagcaccttgttgcaccgcacgaacaccggcgggatcaccagctccagctctgcatccttcgtcttcacgacgctcctctcacctgtcagctcgtggatctcctcgtcggtggtgaagagtcggtacaccgccgctagcctcgacatggcgctcatccacagcccgggcttgccgctgcccggccacagcgcccgccagttgtcgccgcggtactctagcctcccgtcctcgttgtcgactggctcccccgtccggatgtgcctcgcaaccacgcactccgcggcgacttggtgcggagccgacgaggaatggggtcgacctacagccagagcgccgccttcctccacaactcccgcagcgagagcacacgaagaggaaggaggcggggaggcaggcagcagctcgttcctcgtcgtcgtcgtcgttcggcggcgacgccggccgccggacctcctccccccccccggcggcgcgcggtggaggaagccgctgccggcgacttcgcctgtaacaccgccgccgccaccgccagctcccgtcgatctcatcctccacgccgtgctcaaacggcggaggatggggcacagtcgtgggcggcgcgcggcgggtgctgacgctcttgggttgccctggctattgctcccagacgaagggcaccatgccggggtggcggacggggccagagttgaggtcggccttctagtagtggcgcaccgaccggagtggtgtgcccaggtcctcagcctccgcctcgtcctcccgcgcctgccctcccacgtacgccggcacgccgccgtggcacgcccgtactgccgccgccacaggtttcagctcctagcgcagacgaagacaggcggtggtggggaagccgcggcttgcgccggccgcccgcgcgccgctccgttgcctgccgcccacgcgcggctcctccccccaccgcctacgcccgtgcagctgctccctcgtgcggcacccgtgaagaagagaggagagaggaagagagatggagaggggaggggaagaagaggctgacgcgtggggcccacgctgagtcagttgccgtatcggacaaaaccggagtcaaaaccaccgagggacgtagattgcactggttttataagttgggaaacgccggatatctggttttgtggttgggggatgattttgtaactcgatgacaaagttgagagaccttcggtgtactttttccaaacccaaacttacgcccaggattgtgatgtacttcagactttgtccattctactttagcccaaaaggttgtccctcccatttgacgggctatgtactttctacgtgtcccggcctgttttgagtttgtgatcgacctgacccgtttagtgacatgctatccacaactctgataccactcggccccacatgtcggtgacgctgctacctcccgcgaaacccagacgcttcacgttcggatccgaaagcttcgcagcccggggcaatcacgaactgccaccgcaccgtcactgacatcctggccccaccccgtcaggtgggggcccacagcccgcccccccaccggtgccccgccgcgccacgtccccgcataatagcacatggtcgacaaccccccgcctgtctccccgttcagcgagccagagaggaaacgaaccgatcgatcaggccgtcgctccgctcgccgccgcgcgacgcgacgcgacgcgacacgccggagacggacgacgagcgctttgccttccccgcgcgcgcgcgcgcgcgcacggaggcggacgctggtcggtttggtcgggtgcgaccgggaacggcggccatggcgcgcggcgggggcggcgggtgctgcccgccgatggatctgatgcggtcggaggcgatgcagctggtgcaggtcatcatccccacggagtcggcgcacctcaccgtctcctacctcggcgaactcggcctcctccagttgaaagacgtaagtccgtatatccgctacccccgtcgattcggcggctgttcgtggctgacaaattcgccgagagagggagggggattcggagtggtgcctgtcccgatcgtgtcgatctgaggcgggggatcggttggtagtgccccgtgctcgcgatttcctgggaattagcgggcgtttcccgtcggcattgtgaatttgggcattgagattgatgtggtgttacggcgtctacttgttcgcttcactttttttcgttgaaaaccgtgatattgtttgcttcactttttttcgttgaaaaccatgatatgcaggttttgcattggcgcgattgggtgacaatgttgtttggaacagaattcacgtagggatacattattctaatttcgatgcagtacagagttgtcttctctgtaatgcgcccacactagcaatagcaagtttaaagttacttttactctgttagactgttagtataaaattgtactcctgtattagtagatcatgggaaatgctgatatagtttgaccctcgcaattctggaacaactcaggatgctgcctttgttttttgtcctatcccttagaggttaaactgatgattttatttttttttcctcagcttaacgcagacaagagtccttttcaacgaacatatgctgcccaggtactttgctcgtttatcttttttttatcacttatgttatgttatggctgagactaattgataaaaagctttttacagcatgttgaaactgttattctccccttgttcttatatagccctttcagtaatgaactagagtattatctattgagatttaaaaattataagatgtgacattggtataaatgaggaaaaagtccaaatatccccccctaaactttgaatgaaagtccatctagtacactaaactttaaaaccggacatctaaccccctgaactttgtaaaactgttcatatttctatctaaagtttaggatggtatttggactttttaaagtttagggtgctatatggatttctatctatatagtatatctcatgttcatagttttcattaccttactgccttatgttaattttccctgttttcatgctgggatctactcgttgtgcagataaaaaggtgtggtgaaatggctcgcaaattaagatttttcaaagaacaaatgtccaaagctggcatatcaacttctgcacaattaactgaaatttcgttggactttgatgatttggaggtgtgtcaatcgaatggatttttcctgattgcatgcagaatataaatctagtattattttaacacttttgaataacagataaagcttggagaactggaagctgaactagcttgagttaatgcaaacaatgaaaagttaaagcggacctacaatgagctgttggagtacagtactgttcttcaaaaggtatgactctgttatcttcagtatactttcatgaatattgtcaacatcatgttgaacttgagatatagcgtgtctgttagatcttttgcaaaccacttgtttccattcctggttcctcacattgttgccagaacaatactatatgaaattgccactatcttaactccaaatgatttcacccatggggtaatgtgcacatatttttacagtacactctctctcaagtcatggtcgtactacacatgtagtacctaagtagcctgtttctctcgccaatctgctttttgctgactctttatttattattattttctttcattttcaggctggtgaatttttctattcggctcaaagaagtgctgcggcgcaacagagagaaatggaggcaaatcaatctggtgagagttcactggagagccctctgctggagcaggtaaaactatcatactgctcctccctgtacatggacattcatgtagtaccattgccatgatgtgcctcaagattgatgttgactttcaaattttaaacacacaacatcccatattgtagtaataactttaatcattcacaaatctcagagcactttggatttacaggatagtacatggaccatacatgcatatacgtgtgtaattgcaacccccaccttttttttttgttttctgtttgcctctctgatatgatcttggttacccttttaggatacgttaacagatgcatcaaaacaagtgaagcttggatcattgagtggtcttgtaccaaaggaaaaggcaatggcttttgaacgcatcttattccgtgccacgaggggaaacattttcctcagacaagagtctgttgatgaacctgtcactgacccagtctctggagaaaaggttgctgttatattttctgacgtttacagtgcattttttgttctttgtatattccaccatgttgtcctttcaaagtaatcttggtatttggattatacatctcggttcatttgcgccctgataaaaagaactttgttctatgagtgatgaagttattttttatatatcttacttcctgtctagtcatgaagttattttattatttgttccaactctaagtcttcattctttgtatgataacacaggttgccaaaaatgcatttgttattttctactctggggatagagcaaaagccaaaattctgaagatatgtgatgcgttcaacgcaaatcgctacccatttccagaagatgttgctagacaattacatgctgttcaggaggtcaggtcttggaaatgtgatttgttaatattctttgatgaaattctttctagtatttcgaaatttagatatagtcctgaattgctttcagaaggtagtgaggatgccaaccgttgagagaatcatctgcacgagttgccctttatggacattcttgtgctttgcttgtgatatgtccaatgttaccatccctattctgatgtcactgctgtcatttcaatttcgaatttgaaaaatgttaattaattattatagatttataatagctagactttgttctgtgccttccaatcattacttttgctgttggtgactaatgaaaatgatttgctgctattgcatcttgtttgcaccataaggagatatgtcattgggagaaacttgttttgcagttgtactactatgaatttcagtcaataaacatataaagtctatgcttatgaatttacaggtatctgcaaagatatcagagttaaaggcaacaattgacatgggattagcacatcgtgacaatatattgaaaaatatcgcgtctgagtttgagaattggaaccgtctggtaagctatcctcttatgtgataaattccatatgttagaaaattccgaaatccaccagtcaggtcattatttcagttctatatatatgatactaattagcatacaaatgctccaggcaaataaggaaaaaataatttaccacactttgaacatgttgagtgttgatgtgacaaagaaatgcttagttggtgagggctggagtccagtttttgcaacaactcaggtaattgatacaccaccctggtgctaacaatttattagcctactgtttccatttgtttatttgggagattattcttcatgtgatctcaatgatttacaactttattttgcagatccaagatgcgctccagcgagctactcttgatagcaaatcccaagttggttcaatttttcaagttctcaacacaacagaatctcccccgacatatttccagacaaataagttcacttcggctttccaggaaattgttgatgcatacgggtatgtttcagagggctctgagatgctacttttggtttctcttttggctttggaactgaaaataatatattttcttgtgggttgttccaagttgtttatagcaccatgggatatgagacttctattattgtccccccgcttttggtttcatctcagaaatgatgctcttttcaccattcttttgctggactcactattttcatgtgaaatcgacaaacttttggttcgcttaaagaaaagaaaggaaaattgccataattcactgttcctcttcaataggcaaagacatgccatcattccctgttatttgctcctcaattgtgcattctaagtgaaacatttccttttttgtttcccttttgtggacatgtctaccacgttgaaatcattgtgttcatattgtcaaagaagcacttaaacttgcaataggaatttccagaatttttgtgcttatgggaaatatattattttatctgaataaaattagcattgactcctgaaaaatcaataaagagcttgctgtttgtttgggccaaatggtttagttaggaactgctaactttgtattacatctgatacaggatagccaaatatcaagaagcaaaccctggtgtattcactattgtcacttttcctttcttatttgctgtcatgtttggagattggggacatggaatttgcatattggtttcgacactctatctgataatccgagagaagaaatttgcttcacaggtttgcatactggtcatcattttactattgtgttgacaatcattttgaggactttgttctttggaatatgtagtagtgatcccaaagagtttagagcaagtatttatattctgaaagccccaaaaatttacatatgtgataaagctgtatctgatgtctgtttcttattgcagaaactggagacataatggagatgatgtttggtgggcgctatgtaattataatgatggcactcttttcaatctatacaggattaatatacaatgaatttttctctgttccatttgagctttttggtaaatctgcttatgcatgccgtgatccttcttgtgggtaagaaaaagtttcaaacaaaaccacgtttttatccctttaaaaaagaatatttatgcctacttattgtttgtcttgtggatttagagatgctgcaacagaaggattactcaaggtaagacggacatacccttttggtgtggaccctgtatggcatggcagccgcagcgagttgccgtttctcaactcactgaagatgaagatgtcaattcttcttggagttgcacaaatgaaccttggaattgtgattagttactttaatgcgaaattcttcaggaacagtgttaatgtgtggtaagtttattgtctcgtgttgaatgcccttttatgtaacactctactttgagatgagattatgaccagattattctctattgctgctgtatgcttttgtaacaggtaccagttcatcccccagctgatcttcttgaacagcttatttggttacttatccatgctcatcattatcaagtggagcacgggggcaaaagcagatctgtaccatactatgatatatatgttcctcagtccaacagatgaacttggggagaaccaattatttcctggacagaaaacagtgcaggtccgtattcgttattgttatgcagaattgcagactatgacatgaacttgtggataaatactaaaattttctccatttcttatgcagcttgttttacttctgcttgctctggtgtctgttccctggatgctgatcccaaagccatttttcttgaagatggagcatgagcgagtaagttgtatatgatatttcaaattctattgctgtttacgtgttgaattactaatgtgctgacaatacttctgtttgattctatcagaggcatcaaggacaacaatatgcaatgcttcagagcacagatgactcagtggtagcggagatgggacatcataatggctcgaaccaccatgaggagttcgagttcagtgaagtttttgttcaccagttgatccacacaattgagtttgttcttggggcagtctcaaatacagcctcatatcttcgtctctgggctctcaggtacttctagacattcagcatcaccgcattactttgaacagccttactccctcatcatcccacttttgatctataacaatgcactccttgttagccactaataatcgattaaattgtattctttatacagtcttgcacactcggagttgtcaagtgtattctatgacaaggttctcctcctagctttcgggtaagaactaagaagcctccctctccgcctcctctccttttctccctatctatgtagccgctatctggagctcatttttatgtgccttcttgtaggtacaacaacattcttatccgcatcgctggcattaccatcttcatctgtgcgacagttggtgtcttgcttgttatggagaccctaagtgcattccttcacgccttaaggctacattgggtggagttccagaacaaattctatgagggcgatggatacaagtttgcgcccttctctttcgcactgatcagtgaagaggaagactgagtttgcgcaattattgcatctattgtagcgtgtaatttcttggggcgtccttttttctcaaagcgtcaagtatttatcacggaagaatcataaacctccagtttgttccttcatcaggaaagggactagcagcatcattttttgctttgctacgaatgattcgtggcaagatgattttttgggtggccgttggcacatcgggtggcatcacccttattttggtgtaaggctaataaataataagtaaattctgcactcgggttgccatttgggcaattagttttctgcacataaataaacattgtatcaaatgttaatattccattgggttcttttattgtcaataaagagtgcggcctacattctttaaaaggtttgtagaattgtaggaacttggaatttgtctggaggtttgtagaattttctacctgttatttgtgaacggtaaaggcaatgagcaattttgttaagctggcccgtttatatattattgattcagtagtctgaaatcaatgaaacatgtatgagtatttcccctagtttcatgcctaatctcatgctcaaatcagccctgtttttcataatcaatatataatacgaacggaaagaaaatatctacatgataaaactcttgcggtaacattgtcatccatgcaagaccaaagaaaagaaaacactacactgataaaccttgttgtaagttgtaacatccatgcaacgcaagccaaagattatcgttgattatgggaaaccaatgcctatcactagtgatgtactaagctcccaatttcgggaaatttattcgtcaatggtgggcacgctgctggcgctgcgcctggcgctgctgaacgggccagtgacggtccggccgacgaacttgccagccttgctgaggccggtgccgaacgctccgatgccgctgcccacggcgccgatgcccgtgccgaccagccccacgccggagccggcggcggtggcgcccgctccgggcgcggcggctcccgcagcgacgcccgccccagccgcgggggtcaccgtggacgtcacgccgctcgccgcgtccgcggcgccgctgacggccgccgtctcctccttggtcttccgccgctcctccaccgtcttcttctccagctccagcgcctcgagcgcctccgccttggtgaacgggtggtacagcacctgcgtattatcacgacggtcagcgtcgaacaccttcgcgtctcttgtcccaagaacccaagacgcgccgccgtgtggacatgagctcaccttgatggtgagcacgcccctgtccttcttgtccttgaccttggtcgtgtccagcgacgacagcagctgcaggttgatctcctgcacggactccatctccaggtcgttcaggggcagcttggctatgcccagcctcttgtcttgcttcagcttgtcctcgtcgaacacctgcagagcagaacaatttcagaccccccaaaaagaaactaaattctccatgtgttcgatcaaagcttgagctggggaaatgcacctgaaggatcagatgctgcgtctccttgtcctcggcgatgagcgagaacgtctcgttccactcggggttgaggttgtcgtcgatgacgctggtcttctccttgaacattgggcggatgtacagcaccacgtacgggtcggacttgccgatcagctccttgttcttgagcgactccgcgcgcaccacggtcaccgtcagcttcccatgcggcttcagctcaaggtcactgcagaagagctcgaacggcagacagatcaacaaactaggttcaaacaaaggcttttattttcttttttggaagaaaatttcctgtgacaaattcagttgagctctaaaaacactgcaaaattgggcagatcatgcgaaccttacgtcgacgtcgactccgcccagtgggacgacgattctgtgtggccattggagcatgtcagcgatcaaagatgccacggtgtcctacacaaggcaaatgaaaaaaacatcacatttctccagacataaacagttaaatttctactatttgacaatgcaggtaaatgcatcagatgacatacgtcgatcatatctgaaagaccaggcattgctgtcaggcttcctccgacagccttcagtatgtagtcgatccttggttttggctgccaaagacagaaaattcatttgtcaaatcaaacagatcacgaaaccacttcttaccatgcaagtgtgcatggcaggatcagctggttagaatgattataagaagctcacctctgccagaagagcaacaacaacagcagagatgcaaggtatttcatcacacaattggaagacgacacggatgatggtgtaaacctgaaggttcttgaactgtatgcatacagaacaaacatgccaaatgttactaacatgtttaactgaagtaatagtacagtaccactagaaaaacaagaacatgaattactaatgtgaccagtaggttttacaaatcatggctagcggttgcgatttgaatacctgaatgggaagtgaagcaactagagtgtcaactgcaaggacaatattaggatccccgccccaacgaaagtcgacgtccattgtaatttgccctttcttgaagctctgaatccgaatgcctgaacaaaacagaagcaaacagatcaagatgtcatccttggaggagaataaaatgcggtaagactgacgccaaactttttctctgaaaccttcaattttcggaggaacagtccccagggagagtttgctgaacttcagtgaggatatccctgccggcctgtaatcatcaagtataggctccaccgaatccctgatgaccatagttgctgcctgtaaccaaatgtaactgcaaatcagaggcggtgttaacagcaagatgatcagaagttacttctgtggcttgaaatggaacttcatttgaagcctatgtgattctctcctaaagttctctataagaaacaaattgaagttatttgtatgtacctcttcaacaaaaggccaaagcttgctcaattgtttgttgagccatttaacctgaataacaaagcaaaatatactcaaaacatggatgaacttaagcatgccattgaatactatgatgaacaatcgtatgcctaggatgttggtctcagttttctgaatattaaagatgctatgatgataaataggcacaccaaaagagtatcattgcacctgttcatactctgggaatgacacccattctgggagattttctccacatattttcttcacgtcttcgcggtcgagagatgcaagtgcattgacatctgcagcctgatacagaattttttttaaaaaaaaaaaagttagccacaaaccaatctgtttgcaccaaataacgtctcacttatcatcaccattttatatcaacagtatacaaattcaactaaacatagaattcccaatatgaatatactccactgcatcagtcatcatccccagaaaactaagtcagagttaaatttacaatgaggtaagtccctcttgcaaaacatgtacataacacaaacgatcataaaaatcatttctaaaaggaaacaatgaataacgttcttaagcctgaatctttcagacgattcaacacattcaaagcagatatatccaaaaaattttcttcagcctttcacgaaacccttaacactgccattcatgcatgagtcgtaacagatgtcaagaacaacagatgcaaactcgtcaaaaacaaaaactttctatgactgatgactcgaaatcaaggcgtgcatcacatgcgatgaatttatgagatctgtcatgtggttgtggatttgccttggcactgcgtttggcggcgcggcgagccatcgcgcgcgaccagccggcgatgagggcgacgccgatgatcattcccatcaccacccccgatatgaaccccatttctcctctcctccttcccccctcccaacgaaaaaaaatagagaatttgaaaaggagaagattagaagatcaaacaacacttgtcgtgcaacaattttttggatcaaattgacgccaaatctctctccaaattgttgatctgctgctaacgctccattgatttggggccgagtttttcgcgtgctaatagtgaagtactgcaacgagagggagagagagatgcagaggggcaaaggtgtaattacactacgtgctattggtgtggagatggctgtgaccgtgagcacaacggtgaatttcgcatgggtgcatcagggcaatgcacgctattcacgcatcaaacctagtgattagcgcgtctcaactcaagctggagagcgtaccatgaggtacgagttaccataaggtaccaatctaatctaactgttgtttagcaggggtatgattgggctaacaaaatagcgacatcctctgagccgccctcttctcccctcttccatctgccgcatcacgtcgtttgtgctggccatctgcgccgcgccgccgtcgcacatctaggctgccgcgccgccgccgtcgcatcgaggccacccccgggaatgtccgcagggttcgtgaccttcatgcctgtgccctcgccgccagctctcgcccgctctgttctcgttccaattcaccgccctcgagatcgctctaaatcatcaagcttgtccgccggcccgtcgagctcgctccgattcttcaacctctgtccgtcggtgcactcgagctggctggtgcttggagctccttctttgcagctccgtgatgttctgtttccacaataacttcaccaatgaatttaacctgggcaaatctgcctaagtgttcatccttgttgaaaaatctggatgagagaaacccaacatctgaagttcttgatattgatatagatatagtatgtatgcatgtttcctgttcaataagccaatttatctatcaactagaaatttcaattattcagaacgttgttttcacccatggctccatcaccagtcttaaaaaaaaaactatggctccatcgtcttgccctggacgcgtagctgctgcctgctggtggccttggcttcataccatgatgcaggggcagcgtccacctcctcttccatgcacaactgcaacagttgctgcggcggcgaagctcagctcggtgcctcggtctgcatcggcctcttagcacaatgaggaacaacggccaccatccgagaggtctccgccaccgtcgtccactcccatggccgccgcctccgctgtactagcgctgaggacgagggaggagatagggtagtactctgcccgcatccccatataggaccacctcccccgtggtcaccgccgccgggaggccgactgccgcatcgggttgctcgatttgtggcgacgatagcaagcagtgcgatgttcccctccaattcatatgcgaaagtactactctgcccttccaccgttgaaaattactcggtacctgctttcctagagacgcggtaccgcgaggtaccaagcctttgcaaccgttggatggtgcgtaatggacgacttggatttggtacctcctttcttcaaggactgtaaaaactctccaagctggaagctgaaggatttgtgacggtgtccagtattaccgactacttgggccaatggtctcatgggtcacggcccatgttcattagaggctgagctgaatatagcaggcattattgcagcttaattttctttttcaacgtgtcgatggagtttaaagtgtaaaatgcaccagcggtacttaaacttgtcgggaagtttcacttaggtccacgaacttgcaaagcacatatcaagatctctaaacttggtttattgtatcatcccggtctaaaaatgcgtttgaccgtggtcttgtctacgtggcacgccacgtgaacgatgacatggaatttttttttatttttttctcccctcttccttcttttttcaccattgtgacagcccctcccctcgtgccgcctctcaccgccgaggaaaaagaaggaagaaagagaaaaaagaaggaagaaggagaaaaaaataaaaaaaatccatgtcattgtccacgtggcgtgccacgtaggcaagacgacagtcaaacgcggttttggaccgggatgatacaagaaaccaagtttagagaccttgatgtgcactttgcaagttcgtggtcctaagtgaaacctcctgacaagtttaaggatcgttggtgtattttactcgagtttaaacttagggagaattgcaaaaccatcctagaaatcacttaaagtttaacttttcatttataaattattttgttgtaaatgtccatctcctactcgtttttgttgtaaaatccaccacagtgtgagcacgtgattaaccaaatcaatatgttttccaacaaaaccaaaaccaagtaaaggatagacatttataataagatgacttatagagtggaatgtcaaacatcaagtgtcttttagggtgtccttttacaatttttcagctttgtggtgtgaaatatttcaccatgttatttaatacaaatgtgtgcaatcctttttgcacatttttctctaaaataatttcagcactgctatcacaatttcttttggagttttaaagaactgtttaattagcatttgaatatattttagtttttggctaataaagtgcgactgccaaaaatgtgataaccaaccgaacattaccctatcgagttagctcgcctaattaagttgtggaaagcgtggaagaggtgacagggatcattgtggtatttttttagtatttgacactgtttggcaggtttcagattcatagtccgcactggatttgaaatttgtatgctaaattatagtggtttaaaattatatattttatctaaaatgaaaacaaaataatccatccacgtgttatcagcgcatagattcaaatccattgatttgtcaagctaaaaaaataccaaagctctaaaaatttttagatccgaagctgtgccaaatatgaaattcatatacttcaattatagctagtgaacaaactaaaagctccatagtaccagctacgaacaaggtttgtatttcaaagaacaaaaataaccgaaatgagtatagctcaactggttgaatttcttgacataactgttgacagcgagacgcttatcgatccagtctttcggatgtgtttatagggtgagtgtattccattaaaaaaagatgtgttcatagggtgagcgtattccattaaaaaaacaagatactactaaaagctaaatagtttgtcttcatctgaacaaagtatccaatcaaaagtaatagcatagtggtctattatttaagcccaaaaggtcatgattcctaggaaaattaacctttggtatccttcatcctttgtcctgttccaaaagatatgtacaagaaataacaaatataatatgatttaaatagaaatataactgtaaaaatagataattacaaaacatataaaaaatacatttgaatagaccataagtaaatcacagaaatcgaatgagagagatacactcaagccctctttgaagaaaaaaaattgtggatgaattttgtaggatttaaagtctataggattttttttcctatttggttatttgaaacaaaggatttgagctttcataatcctttgaaattccaaagaaatggttcaatacatgtcaacatctttggaagaaaagtagagctttaactttatattatgttttgaaaagactgaactagagaaaaatggaacacacgaatgtaagaggtgagagacatatgtctttattcctcatctcttctatagcctagatcgttgtattcgaatcagtgggtgtagtcatctctgttgccaagaagcttggagtcaccatcttcgtgggagagacagagatatgaggttggttactagtacacaaggggtatctctacacaagtacaaggtgggacgcatatgatttattttctttttctacaaaattacctcacttggatgccaacacttggactgagatttaaaggatcggattgcatgaatgcacgagcgcatgagattagctgtgtacctcataagttgcttcacatatactaggctaagtacccgtgagcggtgaatacggagtatgtggatgtacatgcatggtgaaacctttgaaaaaagaaattactcctattgttccaaaaagaatcaaaccataagaatgaatttaaaccataaggacaaagaaagtacatatgaagcgtcatagaggacaaaatccagatgaattaaaatcctctatgaatttaaaccataaggatgaattcaaacttacaaagaaagtacatatgaagcgtcacagaggattcaatctttgtttttctaaaatccagatgacaacttaacctttggtttctacttccctccaaccaagtccaaatttgaagaggcctttcaataattacctgctgttaaaatgatccatccaattgtcctgttcattttgtctagacattctccaattgtcctgttcatcttgtctagacatcctctacggagagaaaagtgttttgagttaatccatgctatttgcactttagtactagcactactactagtacattgtttgaagattgtaaagttgagagttgagaggcacattttgggtggtaatgtctctgcaaattaaatcgtgattttagaggaaaatacacacggcagcatatcgttgtcgctcttgaccgtaacctatatccaaacctacgttgacccgttttgaccccccttatcctttctttcccttttcatttaattcgctctcaactcccactccccccctccctccatccgatccgatcctgcctacaaatacgccccctccaacgacataacggatcacatcaggtcatcagaacactgccaggtgggccaccgtgtcgtgtgggccccggtggtcagtggggtagggctgtctcctcctggctcctcccctgatccgcacgccagtggtgggcaggtagtacacacgacgcatctgaggagaaagggaaaaaaatggcgaaaaagtgagttggcttttcgcctcactccccctctgcttgtcttttcccgcatctccctctcaggttagggccgagaccgagatgccgtcgcggcggctgctcgccgccgcggcctccccgccgccggctgcggaggagaaggccgtggtcgacggcctgcgggggtctcacggcgcgcggcgccacgccgcgggctcggcggtgggcgccggggtggcggcggtggtagcgctggtgctggtggcgttgggtctgggtctgttcgtgtggctgcggcgcgggaggaagcgtggggcggtcgcgggtggtggtgcggtcggctaggatgggggtgggggtgggggtggggg

SEQ ID NO: 4574 - DNA, 5387 bp, Oryza sativa
gcatcacttagcgatcatgcactttcctgttcagctttagacatggttccatcggtgttgcacagggttgcagcgggtaagccaagccttctccacaatacgcgacgcatacgctgcttgctttaaagtgatgattccagcttcttgatgtacctcgatcccaagataaaaactcaaaggaccaagatcactcatcttaaattcagccttcatctgctctttgaatcccttgatcatgccactgtcacccccgacaattaccagatcatccacatacacaccgacgagcagtcgcccactgccatcgccgcgcgcgtacagcccatgctccaacgggctttgcttgaagccaagtttcttcagtgtgcagtctagcttggtgttccaagctctgggtgcttggcgaagaccatacaacgccttatcaagcctgtaaaccttgttctcctgtccatcgatctcaaaccccggtggctgaacaacatacacctcctcaatcagttccccattgaggaacgctgatttaacgtccatatgatgcaccatccaaccttcctgcgcagcgagagcgagcaacaaacgaatagaatcaagacgagcaacaggagcgaatacctcatcaaagtcaattccagccctctgcacgtagccctttgccaccaatctcgccttgtgtttgacgacgacgccctgagcatctttcttcagtttatacacccatttcagcccaattggccgatgtcccgaaggcagatcgacgagcctccaggtcttgttctcctctatcgaagagatttcatcgagcattgcccgacgccaatcctcgtcgcgttcagcttgagcgaacgttgccggttcttctccgctcaccatcatcagctcttcctggacctcacgattagcgagacctggcagcatggccggccccagcacattgtccatcgtgcggaaacggagtggtgcgtcgtcgtggtctgcatcaagattagcagctgctccagttggtggcgacacaaaatcaaccgccggcgcatcgccatgcaccgaaggtgttcggccggctgtcggtgagtctgatggcgttcgcggcgatgatgaagatcgagcaggcggctccccagcatcttggcgtgttcctgacagcgagccaggatggtacaccgtggtgtactcaacgacgaagtcggtgtcgagatcagcggccgcctcagcatcccagtcccactgggccgcttcgtcgaagacgatgtcacgggagatgtgaacacgccgagtagccggatcataggcgcgatacgccttggaccccggctcgtagccgacaaagatcattggacaactcctgtcatccagtttcttcaggttcggggtggtcgtcttcacgtgtgccacacacccaaacgtgcgcagatggtgcacggccggcggaacgccattccacagcgcgtacggggtcttgccgccgatacccttggacgacgacctgttgagcagatacccggcggtatttatcgcctctccccaaaacatacctggtagccccttcgccttgagcatactccgcgccgtgcccaccacggattggtttcgccgctcgacaacgccgttctgttgcggagagtagggcgccgtgagctcgcgccgcattcccagctcggcgcagtactcggcgaactgtgtagacgtgaattctcccccgcgatccgtccgcaacgcgcggagcttgcgtccactcttcctttctgccgccgcctgaatacgcttgatggcagccggcgccgcatctttggtggagaggagggcgacccacatgtaccagctgtagtcgtcgacgagtagaaggaaatagcggttgccactgggtgtcgccggcgtgatcggtccacagagatctccatgtagcagcgccagcggctcgtcagaccggcaaagtgcctgccgcgggaacggcgacctccggtgtttcccggcgagacaggcctcacagacctgatcaacctgcgacaaacatggtagaccacgtaccagctcctccttgcccatcttgcagagcgccctgaagtttatgtgcccgaggcgagcatgccagcgccacgcgtcttcgtcggcgtgtgccgccaaacagaccaggcgcgccaggttgatgtcaagcatgtacagtcgccctggggtgcgagggatccgggcaagcagacgccgctgctcatcccagacccgcatgatgccatcctccgccagcactttgaagccggtctcatccaattgcccaatgctgataatattggcagcaagacggggaagataataggtgttcgacagagtgcggtgctcaccattcttgcaggcaaagagaattgtgccccgtcctgcgatccggaccacggatccatcgctgagtcgcacgttcccggtgatgttcgtgtcgaggtcggcgaacgccatcctgctgcccgtcatatggtttgacgcgccggaatccataatccagcgcccgggatcatggtcagccacgtcgtcgagcgctggaaatactttcatctccacgagttccaccacggcttggtggggcggtgtgggcgtgtcgccctccggcgccgccgcgtcgaccgtgtcaacgcggccgccggtgagcaacatcaaggtgtgctcttcttcatcctcctgggcgacgtgagcctgttcttcgcgcttggacttgctcctacagtccttcgcccagtgcccaagtttgccgcaatttcggcatttgtctcccttgcgcgccgaaccagagttcgtgctctcggggctcgcagtcccgccgccaccagtgcgccctctcccgccacggcgcttgccgcggccgccagagccgcccgagtcaccccgctttgcctcttgatccttcttcttctgacgttcagcccactcctcctcagttaggtacagcttcccaccggcggtgtgcgacgaggattgcccagaatcctcagcggctttcagtctgccagtaacttcctccatggacagagtagagatatcgagaagagtttcaatagacaagatgagttgattgaacctgggacgagctacccgaaggtacttttcgatgactttatcagcaggttcaggatcaccgagggttgcaagctggttgacgatggttgtgagccatagagcgaaatcttccacggtctcgtcaccgcggaacgcaagcgattcatactcagcgcgcactttctgtgcactcgccttgcgaatccggtcgttgccgactcgcattgtcttgatgcattcccaggcttcccgggccgacgctttggtcgccagggtgccaatcatctccggcggcacggcactgcagatagcgtcaagagccatccggtcctcatgcagagggacgtccacgccgtcgggctcgatcgccgcccacaggcagtgagcctgcagcttgatcttcatcagtagcgcccagtcgttgtagttggtcttggtcagcagcgggtagttcaccgagccgcctccttctttcaccacgcggtggatcaccagcccgcggtcacccccgccgctgcccgtggcgcggccgccggagtcatgaggagtgcgcacgatcggtgacgacgagcgacgacgcggcatgaagacgccttccaatgcgcggtcacgagtccacttcctaaaccgtgctctgataccaattgttaggaatttccccagcgatcgctagcaggaaaccagacgacacaacgcacgcgtactgtggctaaacctgcaaattcgcagaacagaggaaacagagcaaattttgtgcagcgcttttctcagctgcttttctgtttacttacatatataaaggaacgaatacaacggaaacaactaaccaccaagaccacttctcacgccatgctctagctgcgtccatccccacaaccacacgacgtgatccgagctcccagcacaagacgcgggcaacgagctaaactcggataccctcataacagactccacacgatggctatcacacaacacgtgagctcatgcgtttattcagaaaaaaacggaaacatgcagataactaatcaactaactaaccgtggcacacaagattactgctaacaaaactctccctaagcttgatgtgccgattatacaggaaacataccaatttgttcccgcagctcctgaaacttgattcgagaaagcggcttcgtcaggatatctgcaagttgcccttctatgccgatgtaactcggtgtgatttccccattctccacggcttcacgaatgaaatgaaattttgtttgaatgtgcttacttcgatcgtgaaaaacagggttcttcatcagggccagagcggattggttgtccaccctgagatcgacgacttcagttgctgcattcctgaggtcaccgaggagccgggcaagccaaatgccctggcatgcagctgttgcagctgcaatatactcagattcacaggaggagagtgctacaactctctgtttttgagactgccagctaacaggatttttgccgagaaagaaaattactcctgtggtgctcttgcgagtgtcaatgtctccagccatatcactgtcactgtaaccctgcagtcctctttcaccttccttcacatagcggcacccaagatgaatggtaccagcaacataccttatgatgcgcttcactgccgccaagtgttcgtccgtgggtttctccatgaaacgactgacataaccaaccgaatatgcaaggtctggtcgggtgttcaccagatagcgcaagcttcccactagacttctgtattctgtcgcatcaactagcgatcctgcactttccttgctcagctttagacatggttccatcggtgttgcacaggggttgcagccggtgagcccagccttctccacaatacgcgacgcatacgctgcttgctttaaagtgatgattccagcttcttgatgtacctcgatcccaagataaaaactcaaaggaccaagatcactcatcttaaattcagccttcatctgctctttgaatcccttgatcatgccactgtcacccccgacaattaccagatcatccacatacacaccgacgagcagtcgcccactgccattggcgcgcgcgtacagcccatgctccaacgggctttgcttgaagccaagtttcttcagtgtgcagtctagcttggtgttccaagctctgggtgcttggcgaagaccatacaacgccttatcaagcctgtaaaccttgttctgctgttcatcgatctcaaaccccggtggctgaacaacatacacctcctcaatcagttccccattgaggaacgctgatttaacgtccatatgatgcaccatgcaacccttctgcgcagcgagagcgagcaacaaacgaatagaatc

SEQ ID NO: 4575 - DNA, 5043 bp, Oryza sativa
cggcacgcgcgcgcggaaagcaacgtgcgacgcggcggtttgagcggcgcggctcggcacgcgtgttgactcgcggggccgagcggctgcgcggctccaggtgcggcagggcagcgggcccgggcggcgcagacggcgcaggcgcggcacgggcggcgaccacgcgggcgcgcgcacgcgagcatcggcgcgcgggggccgattttggggcggggagctctctagggatggcggtggggagagggagagcgagggggggcgctcggtgcggcttacgcgcacgcgcgcgcggcgcgcgggcagagcgagggagagagggagagagagagagagagaggggaagatgggccgagagagattcggcccatcgaacccgagggaggcaaaatagacttttgcggaggaattgatttgggaaggatttggattcgggattgaactcgacgattgatctgggatttaagatctgagaaagcacggacactagacaacaagcaaagaaacagatttcgcaaataggatttttaagagataatttttcccgctaggcgccacgacggaacgggcgctacagtcggctcggttgcgggctgaagaacaaaatgggctgaaaaaggcccaaatagaaaggaagatttttatttaaataaatgttgaaatgatgtttgtattattaaaattagcaattaagttcggaaattccaataaaattccaaagagcgtaattaatcgtggggaatttaataaaattaattccaaccatatcattttatttttcacacttactttacttgtaagctagtaatttaattattatacacctagctacttaaaaaatacccagatatcttaggaaatttgtatttcaattaattacataatgtaaatctttcttaacttttccttaattttctggtctttatatttcccgttgcaacgcacggatacttttactagtaacaataataaaattaaaatagttttcacctattgcaatgtacggatatttttttttgccattgatacatgagagccataaactatcttgcttgtgttggaggcttgaagctgtaacggataataataataagaagaagaagaagaaaaaaaaaaagagaaaggtggggcccgcaaggtaggggaaggggcccatgggccaggccagaagaggtcgggttcggagatccccattaccactagtcctactgtacttcggttacggaggagattttttttctaacaaataaactaataattattataaagggaacagatccccggtggggcgaagaccgaaaccctagccgccgcctccgccgtcgccgtcgccgtcgaaaccctagccgccgcctcctcccgatccgaccgtgtcgccatggccatgcgctctctcctcaccaagctgcggatcccggcggccgcttcccgccggactctcccgccgtttcgctcttcatccaccgcccctcaggttcgcttcgttcccctcgctattaacctaatcaatcccttctttctgatgatgtgcgatgataattggcccgttcaatcaccaccttctcttgtatctcgcggtttgcacgcacatgttctagcgattcacctctccgattagattagtgttattacccctaatgaacctttggacccttaatttcgttcattcaaattatcctatagtaccttgtgtgttttgttgtctctgtgttggttgacctaatttaactcaaaatcttttatttcccctgagatgaacaaaccccgatctctgttttttttccccttcgagatgaacagatcgagctgttttttatcagtattatctaccaataacaagtactagcatttactgtcctcatatgatactcgccgcgctgggcttattttcttcagctctattatgatcaaaccagtgactctaacttatgttagatgcaaacctcagttatttacctgtacctgtatatagtctcttccatctgagtttattaattattcgtagtaattggtttgtgtttgacattgcaccaccatctgactctctctgtctctcttgccttatatatataggctaagggtaagcttagcagcactgctactgcccaagatggcactccagttcctggagagggcaggtatggcgctgattcatggttctagttcagcattaatatctaataatcatttttctccttttaatttgccaacatgcatgtttaactctagagcttgcgtctcatggcttttttttttcattttccctctgcctgcaaggcgcatacttgaacagattatggaagaaggggacaagcgccaggggaagctgatgtggtatgaaatcattggcaacttcatcgcgttcaatgctacactctatactgtctaccttctataatatgaataggttcaggaacaactttattcaaatactgtgatgccatttggagacatttcaatgatgttcgttccaccatttcgaggagaattcacaaatctattacttcaacctcatcatgaaactaccactaccgcagcagctgagcatcagcttcacggcgtttaggttttttaaaattacatcgacatcttagtactgatgtttgaatattttaccatcgctagcacaggtgactgcattgcaacggaaaagctaaaattacaatgaaatcattatctaaatctcctatgaaaacacattcttcacggaatatagcaatatgtagaccaaatcgatcggtttattttaatgttgctcttgatccattacagatactcggtgtcaccactcaccaccagcgcgcaatgtagaacaagacttgctcgtattgatggttgtctttgacaattgacatgctaggtcaaggcatctaaaagagaatcagtttgcacctacaacaatttctttaggcaaaacctggcttagtaccattaattgcactcgagtattgttagtactgatgtactataacacaaagtagaaaaattaaggctgtgtttagattcagggtgcaaaattttggcgtgtcacatcggatacacggacacacatttgaagtattaaatgtagactaataacaaaacaaattacaaattccgcctgtaaactgggagacgaatttattaagcctaattaatccgtaattagcaaatgtttactgtagcaccgcatggtcaaatcatgtagcaattaggcttaaaagattcgtctcgtaaatttacacgcaatttgtgtaattaattttttttctatatttaatacttcatgcatgtgtccaaacattcgatgtgacatggtaaaaagtttttgcgtgggaactacacacaggggtgtgcctacgttatactaccggtgtcacaggacaccgggtagattattcaaatcctatataaattacactatattaattaatatattagtcaataattagatagttagtatgtattggacccccggtaatttttgttctgggttcgccactgactacacaggcctaagttttctcgtgaagcaacaaatcctgaattcctgtattacttaatccaagagatctccacgtaaatatgtctatcttttttaactcaccatgttgatcagccgccattcttgatctatcaagaaccttgtcatcaggatgtcctacttggagctcttgacgattgtttgccataccaccttagtacagtacaggtccttgaggtgtctttgtactgaacattacccagtacagatgcatgatcttcctagctacacggaccctgcagcctgtatcccggtcatgtcgtcgatcttgtatttgctttcaaaaaactgtatatacatacatgcatgcacagacttacattgtgaatatactgtgcatgatcttgtatctttgtattggagaagactgccataccatgcacaggattgattgattagcttggttttttttttcctagcttaattgccattgcaattaattcaaccatatattgcaattaattcgatctcctgaccatctcaacctgcgaggaagaactactactactactactactactactactactactactcgatcatctctccggcgctgtgtgtgtctctctcagaactaacgaatcgatctgcttgctatagctatatatatagacacacgggcgatcgcttgttttgcttcgcgggagtcattccacgatggcgcaaccagccgggcgaacgaacgaactgaaggaagcggacgttggaagcagatttcgacatgcatgactcgatcagtctgccgcgggatgactgaacagaagctaagataatttgattgggatgaagtactttaccagcctcaaaagaaggttttgtcctaaaataaaacaatggtacgaaaagtagcataaaagaaaataatgcttatgatagaatgaataattcatttgccaaatgaaacatggtatataagcaaaccttgcaacatcacacaggcaggcaatctcaggaatacccatgagtacatttccttccaccaaatcaccatggcctgccagatttgagtgcaatcaactttcagacatcttccaacatcttcacgctttggccagttcaacaaggtatggttcaagttcaatcagataaagcacccaagacacaaaatacacttcaagattaactaactattcactaagtagaaaatccatcgttgatgtcgcagtcatgcgatggctgctgctgcacccacagcttcacagcatctcccacggccagaagtgaggtcttgaagaacacctccagataactcagattcttgtagatggcttcagctggcgttgccccttcgaacctcacagccacaaaggtgcatacaagcacctgcatgcctgcaaagccaagtgatatagtcgactgtcgacgcctagtcttttcgaggtaacttgcgagcattttcccaataaggattctgtgattaaaaaaggaggagagttaggcctggtttacggtgtgtttagttcacatcaaaattggaaatttgattgaaattagaacgatgtgacagaaaagttgaaagtttg

SEQ ID NO: 4576 - DNA, 20916 bp, Oryza sativa
gagaaaaagtcaacggcgttatctattaaaaaatagagggagtatttgacatgtgtttcgcaggttgacccatttgcatcctaggcccaatgtgccgtagacaagttggtcgctggtatgtgtcaaacataaaaaagtccaatacaagtaaaatacctcagatatagcccccccccatacacaaagacggatatatcgactcattcaactattaaaaccattcaaaatggcactcttggccatttaaagacggttttctatgacatgacagtctagtcatcttaaaaactaaggctgtgtttagatccaggagtgaaaaattttatcgtgtcacatcggatatacggacacacatttagagtattaaacatagtctaataacaaaacaagttacataatccatctgtaaaccgtgagacaaatttattaagcctaattaatccgtcattagcaatgtttactgtagcaccacattgtcaaatcatggagcaattaggcttaaaagatttgtaattttacacgtaatctgtgtaattattgttatttctatatttaatactttatgcatgtgtcggaactagggatggcaatttaacttgtttgcccgtttactcatggataaaaaccctaattgtcagggttatagataccctgtacctaatagtagttgactaaatctcggcaggatccaccacataccatgtcctatacggaaacaacctgcggatataggaggagttctggataaggaaagacaaccagagttttacatggaaacgacaaggactactcggattgtatccatattggtttccctaattctacttggacaaggggacacctatgggtataaatacaaggccccctaggaggagaggggagacacccaccatggaagccacccacaatcaacatacacggaacaataggtcaagacagaagatcaacatacaagctaacatacgccaagacaagacgccggatatcgacttcagagataggcacggctagtcccctacggtgtctccggatactgtcaggagagacgaaagcgctatctctgatctcgccgagcacaaactcgaggaggaagactaccctattgtcgactatgagtcagaccttcaaaccgccatgtcgacaacagttagataggctaccccaaatattgtactggtatgattatggtgaataagagcaataccggcttcggccaacaggatgtagggttattacctgacaattcaggagcccgaacctgtataaaaatccccgtctccatctcttttacctcagtctcgcgtatatcctagtaccaacgatccccatactatgcaaataccggaatcacgacataaaacgtcgacactaatagagttggatttgttctccatttagtacccatgggttttttattgggtcaaaacctatacccaacgggtatacgggcatggttcacccgtttacccacaaaaactgactgacatgtggtccctcagttaaattagtataaatgccaccatccagtaatgatgaacttgtaatgctttgtattattgaacttggtacaactgtacctttctttaaactgtgataatgtctctctgtttggggttaaagcgttgaaccgtgagtctgtgatgggtaaacgcgggcaacgggcatggatagtgttccttgcccgtcatgtagtaacgggtatacccgcggacatgaattatctcactgcccgtgcccgactgtcatccctagtccaaacattcgatgtgatagggtgaaaaaacttgccagggaatctaaacctgccctagaaataaagtaggacccacaaatcagatccgacaagttaatcatatgggattttttccatggtcattggtagcgagccaagtttagatgggcctattatctttccctcaagcgggccgagatttgttggcaatgtatgtacaggggccgggtcgggccgggcgtacggacgtcgtgctcgactctggcgaccggagaagctcctccgccgctagctgcgcgcttccggccaccagccatagccggcagacgctgcgccgcctgatttgccgccggcgacgtaacagtgtacggagccgcactctccggtgaacatgaacacgcagagagcaagcagtttatctgttcctggagatcgctctcgattgttggggctcatcggttgctttttcctaaacggcttattagagtataaaaataaatttgtaggtaaaacttttatatatgtgttctcggtgacttaaaagtcaatgctcaaaaagaaactacgttgaaaatatctcaaaatcaatgtcaaaattaagtttgaaaatttaaattttggctttttctttggctgaataggccatccgatgggagccttgcgatttacgaattgcatcaaaactgaaataaagaggatatatgtaatctcatatctgctgcaagtcttctacgatcgtcaggcatcctgctgcagatttcaatttcattcatcggatttcacaggttactgcttttaaaataagtcaaggaagcaaaactatgcacattcttcattcacattccatctccatacaaactttgtttacaaccatgtctagattagatagtaactcaacttaaaaggtaaaaagaaccaaaaaaaaaaaaacagccacaggccattccttagtaggttttcctggctggttatctactttatactatcactgaacttttggtgccaaactgccaatcacggtgacctccgatgctggatctcatcgcctgcgattatgctactctccggcttccacatcacatctttcaggccattggagatgttgtggtagaactgcgaaacgcgtaaaaaattacaccatgagttagccgaatcccagtctgaagtatgaactgtgaggtcctgcagtaattttactgttatgtgtaccttatggaattcaagagtgtcgccgttagatttgcggagctcaaccatgtacagcgagggcgtgacttcaaaaacctttagaaatggatgaactgatttcagtctataaacccaggaaagagtagtagcacaagctgcacagcatatagaatgacagaacatagtaaatagtgatgttgtatcattggtgtacctctgttgcaattgcaagctgacctttccttcctggattctctccttgcaacttcagctgattccaatccataaaagtgtcatcagaatgttaattgtttcagataaaaatggtagaaacaagttgtggaattttggattagttaccttgtagttgcgcttctgtacattaaagcccatgggtccagcagctgcttcaattttcgacaatatctcgtttgcaggcagccttgatgcaaatcttgtttctcgcttcacagaaccctgctaaaagtagaaagaaaattggtttagcattttagattataactcatgactgtaagtgtacttgaacatgtttagttcagacttcagaatgaccaatttaagaatgtgatcgtaccgattgcttttcaaagagtgtgccaagattgagaccctgagatgtagagatcaactcaaaagcattcatcactgatggcctctcttctcgcctctcgacaacaagctgtgtttggtcctgcgttagttagaatagatgttaccaagcccatccagtgcattatgaagaatgtaatgctatgagctgaatggtgtgagagcttaccccagattcattaaaaatagagttgatatcatccaggttaacatctgctgtctcaaaccttggaggctgatatcccttcttgaaccactcattgttgataagctctgcgatggtaatcctctgcacaaggagataacgatgggataagctacttatgtataagaatgctccaaagaaatgaaggttaaaatgctgcaaaacatacggtgctaggattaggatctagtattttcttgatgagcttcttcgcacttgtagagaaccaagacgggcaactgaagtctgctttgaagatctggatgagcaataatcacattaatcttccaaacaaaaactttgtttagggttcataaaccaacaatcctttgacatggttaagagggaccaaccttcttgtaaagtgacatgaggtttgagtcttcaaatggaaggtagcctgccatgaggacaaagagaatcactccacatgaccacagatcagccttggctccatcatatcctttgttgttgataacctgcacagacaatattattgaaacatgagaacaaatatttttttagataagtaacatgaaaacaaatattcaatccaacgatgataataactatatactagtttaatgtatgagtgtaagaaggtacctcgggagcaacataattaggagttccacaggtagtgtgcaacagaccatcctcctgcagagtaaacagaaagatatgcagcactaatgtaagaactttattcagatggatctgaaactatctgtattaccatgtgaaaagatgtagaaaacaaatggaatctacagaaagcaattgaaatgctaatttttttacgactaacaactctcggcttttcatcactttgaataaaaggaaactctccacaaaaagataataaaagaataaataggaagagtcaaattacttactctgacttgttgagacagtgcactcagcccaaaatctgatactttgagagtgccactagcatcaagcagaagattttcgggctgaaattgaatttgtgtatcaattcactgcttctcggctctcttgcatagcagtagtaaacaccgcaaacagttaaacgccgctaaccttgagatcccggtgatagactcctctgctatgacagtaatcgacagcgttgatcagctgctgaaaatacttccttgcatcatcctctttcagcctcccacgcgaagcctataacaggaattatgacaaattgaacatgtgtgcatagcataaagagtaattcagatgtcgatagaaaaggccaagcactcacaatcttgtcgaaaagttcaccaccggtgacaagctccatcactatgtatattttggtcttgctggccatcaccttcagagaagaaaacaaaaccactaagtggagatcgacataaagccaagacaacaaaaggaaaatatcagaaagcaagagctaggaaagtttcagataacacatagtttagtgtcacaggaatttccttccagaacgatctctaattgcaacttttcatgtgaaggaacaacttgttcattatgtcatccttgaccaatttaatttaccctggtttttcataatttcagattgctcaaagccttgagaaccatatcttaacttaattagcagggttcacaatctcggcctagaaaaaaaaaatctgggggggaccaaaatttttcagaagtttcaaaccagaaaaaaaatgaattttgaacaggctctagctgaattcgaacaaattttacaaaattaaaaaaaaaatccacaattcaagactgggaatcacatccaaccaggacccactggtagacccgaaatttcgaaaatttcgaaccaaaatcacgagctctgcttatgattagtcgatttcattggtggacttatcatcagttacaaaatttttccatgggcaagatgagctgagattaatgattggagattagtaaacctcatgcatccggatgacgttggggtgcctgatgagcttcatggtggagatctcgcgctttatctgcaaacaccaccacacaaaccacaaacacacatcaaagtcagaactcccccacaaaaagtcagaagctaagccaaagttgatgcacattaataataactaactcagcacaagttccaacgaacactgcacgaggcgcccgtgctaacctcacgtcaaagtctaggctgttgcaattttggaagtaagaacgcaattttggaacgataccaaacctttttttttttgcagcaagaacgctagtagtaattagtaatgtttactgtttctggttaaaacaaaatcatcacgtcttgtcgtgagaggaaacaaaacagcagtagtacaaactgttcatgatttgggactcgtacgtataggaattgaaattgtccacgaaattcactcaagaacagcgtatgatatgattaaaaaaaaacaagaaggcgagaaattcgaacagtactatcatcatgggaagaaatccatggagacctctccaaatcgagaatcgattggggggatagaaaatagtatgggtgagctgacctgggcgatcatcttgtgcttgaggaccttgtccttgtcgaggatcttgatggcgacattctcgccggagtccgcgttgcgggcgaacttgaccttggcgaaggtgccctcgccgagcgtcctcccgagctcgtacctccccacccgggtcctcccgcccgacacgctcatcctcctcctcctctgcttcttcctcttcccctgtccctctcagatcgacgaccccggcgagtgggcgagcggcggcgggcgactaggaccgcttcttgtcgcagggcctccactggacgaacagctccgcctcctgctcgccggcctgccgctgccgcatcgatcctcctctcttgggactctcttctcctcacaacctcgcggtcacggccgcaggcatgggatgggacgagcgcggtggtcgtcaatggcggcgggtgaggcgggaggttgcaacttacaaggaggtgggtggggggtgggtatgtataggcgatggcgcggtgggcggcggcgaaggaggaggaagaagaagaaggcgttttcgtcgacgcttctcccttcttctcagctaaggaaatattttactactcctaggccatactattatcgtgattactagcggtaattactagtaatttagtgctctctacgtctagaagatttcatttaattttgagcgacctagaagaaaaaaaatagaatgggaataataaccatgttggttcatatattaggttacttttaatgggtgtttcattgtcattgggaaggctgtcacatcagcatttgtaataacgtggtaaaactaaggattgtacaagtttttctgagaaacacagtcctacctccgtccaaaaagagtgtagttctactgtttatatataatatttgatcttctgtcttatttaaaacaaatataattgttattattattattattagatgataaaatatgaatagtatattatttgtgacttttttaaaattatttcataagtttttaaataagacggacagtcaaacgttgaacacgaaaactcatgactacacttaaattggaatgaagatagtacatacatagatgcccataattgtacatttttagattgacgaagtcaccacgaacgtctagcgaaagaataattagtcataaatacgagcgctcgtgttaaatctagaatttggacttgggtatgggctatttccatcacaagtaatctaacctatcgagctatataagttattttcagtcatcaattaaatattttgttgcttatatgatatccttggaaacataaaaataatacctcatggtaatgacactcttattactccctccattccaaattgatctatatatatatattttaagattattcctaaatgatctacatatttgtgttcatttattaagtctattcgttatttgtgcattggagtaaatggacattgatgcatgcatccatgcacacaagtatctataacccacatgcaatatcttgatttgctattggataggaaatagtggggatggtgcatgcattgagtttgttgctagagtaaatgtagtatgagagagttattagcttttcttggtcttagtgtacctatgaaatatgtagatcaatttggaatggagggagtatttttctactacactttaatgcatatgtcttatactaatatgatattacctttacaattaaagttttagtgggatagattttaaacgatagaaatgaaacgaattcttcgtggaatggagataatattgatcagtctagcaccgcgttaggggtggacccaggaggatgggacttgtggggcccagctgccagtgagagagagagaggggttggaacttggaagctagcagccggcgattctttcttcggttaatttcttccccaccttgtgttgactgtttgacgttgttttcgcgacatcgagatggagatacgtgtgtaacttagctgattcgtctgaaatttgagctcgtggggctttttgctagggttgatgtgctctgctttgacttcgttttgaaaatgagatgatcgatgctgtagctaggtgtcatgagcttatgtcgctccctgtatgtggacagttctcggttgatttttgttttttttttgtcacttgaaaagtactacctctatttaaaacataaggattcctaatttatttagcatagactaattaatgttgagaagaaaagatttattggccttggtaaataagggacaagtggaggtggaaggataggtgggggtaagaaggaagaaaatttgaatgaaaagggacatgtaatactgtcgctagaaatctttgtattttagaataagatttaaacgctagaaattttatattttgaataaatagatcactctcattggatcgaccgtaacgcacaataatgtgtatttagtcttatccgcttgcgtggattgtctttcacatgatggatgacgttatttcattactattttcacttttctaaaagatatgattgattgtaggataatatataattgtcattagcactcctctaataatttatttcaaatcaatcacattactttattacttggcagtttatccaaaaatgatgcatcattgtttggaatggagccaagtgtcaaccttttggattctatctagagccagacctcctttttttttcatgaacatcaggatatgtaccagcgtaggtgatatattgatcccagcaattttgtcttgaggttcttgttatatattactctccccttcattatatatatatatatatatatatatatatatatatatatatatatatatatatatatatatatatatatgacactggctagttaaaatttgaactagccaatatcatataaaaagacatagggagtacttctctgctgggctagagacaattatatatatatatatatatatactatatgtatatatgtatatatatatatgtgtgtatatatatatgtgtatatatgtatatatatatatatgtgtgtatatatatctatatatatatgtatatatatatatatgcatattttgattgtgataattttgtaatatataaatgaaaaaaaattaaaatcatacacttaaaaaacattaatatattttttaaaaaatactacactaaaatcctacattaatattttttaaaaaaatttttagtgaaaacattaaaatcctacactaaaaaaatatagcatcagcatgagctatgtgctcaattaattacaattataaaagtcctactatttcttcttcgcacatcataaaccaccacacaatgttattttcatgtgtggttgtatattattcgttgaaaaatgtttcatgcacctaatatagccaataatagtgccttcatttttctacattgtccttacatatttctaatcaataacgatgcttaatccttgacttttcattgaaatatgaaagatcataatagctatatgccaacgttatacgactgctataaaagtcacattggcaacagatacactgagctatcttaagatcagatttgagatgttagtatccatagcattttcatatgaggtggtcatgcattcagacttgagatctcagagtgtctaatcggctgccacgtgcaccttctagatgctaaactttttttttttgcaccactactcctaccgacacctcatgtacgtatgtgtacaaattaagtactcccttcgtatttagggtaggacgcaattgactttttaaccaacgtttaaccattcatcttatttaaaatttttgtgtaaatataaaaatatttatgttatgcttaaagaacattggataataaatcaagtcacaataaataaatgataataatatatttttttaataagacgaataacagcgttatattaaaacacggatgaagtataaaatactagtattccgtactatgcacagtagctaaatacagtattgttttgtccagcagtctagcttgtgttttaatttcttccatgtgcataacttaattggtataatgccattaattatattactttggtttatgttcattacttaattgatataacggcatcaattatattactcttgtttgttaagcatattggtgactacgacttgcataatatatagttgcaaacgcatatatgcatgggttaatcagattattaatttagagcaaagcatctaccttggcaatttgctttggtgttgttattatcagtaaccgcgatggatcgatctcgagcatctgatctgattttgtttcgattggggggtagttagagcgatagtagccagccaatcttgatcgaatttattccatatgcatcgatctaaaaatatatatacatatcatcatgtgaaatgtggggtctctagatagatctacctcgctccgaattctctctgcacatgacaatctctgcatatatattcacgctatgttgtttttaagtttatctcttctttttttttctttagtttctgtgtgtgcgcgcagatatttttatactccctcctcttttttttaatacaacgtcatacgcttacaaccggtttcacctttcatctccaagcaaccgatcttcgttcccccaccaaattggtgaccgacctgttggttgattttatcggctaaataccaattagctaaggaaagaataaattccacttgtccgattcctaaagagatagagttagtttttgtgattggtaaaaactaatttctaacaaaatttcgagataacccccgagcccccaccaatgcgcctatataaagagatgaagggcagaggagggacgccgagctctctacctaaaccctaaatcgcctgatcagcttagcgttggaaggggttcgtgaggtgatgacggtgaaagaattggcgtatcaagaagaaaaggagaaaaaaaatcgaagaagaagaaagaggaaaaacactgatggcatctcaagtagtagattaagtttccgcattgaagcagaggtgattaactgattatgtataggctaaatcattgagatgtaatttagatctccaacacaaccatgaggaagagcatgtccgaatctgcgaggcaaggcttcgattcacttgttatctcttgttgcctggaacctcttaaagaagcggaaatgcccacgtattcgacggtattttcgtgtcatttcaagcccactcgatcagcactatccttcaagagaggctctcatctttttggatcgaagctagggctcgacacctcggcgtcctcttggccctagctcctggtggaccctacttggcctctttctgctttggagttcattttcactaagtatccctccttgcttttgtgtttagcttggtttatatttttcgtttttgtctttgctgctagtaagaggccagatgcatgtaaactatattgtttccttcgtctaatatatcgacgcgcaagtgtttaggaaaaaaaagttaggattagaaggttttatgtgtaaaatgaaaaggtttctaaatgtcgttacctttcggattatacaatgttcgggttatattaacatttcaatggatgagttcttattggatattagtcaatatttttcttcccatcatgacattttttaagatccggtatatcagttagatgacatgagatgattgctctttagtctttaatttgttcccaatgcaaatgtgacaagtctacggacaacgatggcgtgtccgctgagttctttatacaaaagaagcagagctctattattattagagttattttatatctcaagtgccgtgataattggtattaacataacctacgtaccaatcgaatggtggagatattacagttaaaaaattaaaattaacattagaagacgcatgcacttacctcgtctcagtacctctcaagaattaaagtaaccacagtcattttctgaggaaaatgtatctatccggcaaaccgactaattaaggtttttctaactgtgcaagagctaaacggttggtgttaatttggaccaaaccttgattccttttctactgaaaagaacagactttagatcctatcttttctctaacaaaagttggataaacttttagataaaaatagcacgtttttcaaactgctaaacgatgtgttttgtgtgaaaattttctatatgaaagttgttctaaaatatcagattaatccatttttcaagtttgtaataattagaactcaattaatcacaagttattaccacatcgttttgtgtaaaacacttaatctttatcttcagaagattcaaataccacgaaattatatccactattttgttatgtcactcagacaaaatttttaagtcttttgaccatagaaatcgtttaagaaaatcgaattttggtctaggatgaaatggttgaaataattaaccttctggagcaagcattaatctcaatttatttgcataccatttgatgtgtttctccaaaaataaccatccgtaaaaaatgtattaattaggccctgcttgttctccttcaaccgatttataaaacagagtaattttaaagttaaaaagttttaaaaaataatttttggtagattttttttaaaaaaatattatcttgttagcaatcataaaaagatatctatgcaataaaagtgacaaagcaaacatgtaaatgaatccaaaaatcaatttcttaaatttaaaaacatcttcatatgtattataatccacatgaaggtcctaactcgtatatacataaaagactctaatagtggtggtagcgatctaccaccaccacctactcactatcattcacgtggccggagagtccttgttatccatgtaacaaccatgcaaaaaaaaacttgagcaacttcagagttcgtcaatatcactatacttctcaatgggtttcaaatagtacacggttctttttttattccattaatatgaattttccccgctatgacgagtgcacaatgtcaaactaaaacagtccgatatagtatatatcaactatcaactttaacatatccgagaactcctgaaatttatcattactatttcttaaaactccattgtaaaaacgcaaggacactttactattatctataaatgtcatcattgtaagggggtccatcgagctaggtcaaagctaggcggcgtacatacacggactgtgcagctacatgcatccgatgaacaggggttggggaatatggaatattctcttgcatgccatcgatccaaacattcgtctgaatctagacgtgtttgtacactcgtaacctgtccaagcacggcaaagacctgacctgactgcctgcttttaatttttgtttcagagaaaaaaaaaagaagagcaagtcaagaactgcagctgcaaaatctcgatcagcaattaattagtcatcttaattagctgctacttctagtcttctaaaacaaatattattcatcttaattattcatacacgatctatatatgcagctacctccagtccatgtatatataaaagctaacatgatggtgtgatcgacgatcatcaaagatccccaaaataatatctcttactaatatatatgtgcaattatttgttgattagttatgcataacttatccggttatccttgcaaggtaatttattctaacatatgcacatattaataaatggagactttcaaagagtacgtacgtgtacttcgtatattaataatatgtcatgtatatgaggatatcgagattatctctcgggtggatttaattattatggatccaggagcatttttagaccaagcatgattaaaaagtcgtccatgagccccaaattaattagttttgaggaaaacaaaaggagccccaaattatgcgtatggatgcaagttggccaactatttgattgacatttttacatgttactaattctcctgtttggaaaaaaatgcgtatatataagtgaattagtgagctaattaattgtactatatatgcattgcaacttctgcatatatgtggattgaccatctatatctaccattcaatgttaaaattgcagagtcatttcttgcgaggattaaaatatttttaattatatatgtataatatgtcatatcgatcgatctgtatatatattttttgagggaaagatctgtatatatatgtacaaggtagttaactgtctacggctatatgtaatgtgttatatcgatctgtcatgtgtatatatgtacctgcttgtacgcattaacgatattaatcagccattgttgtccaaaattattgaaaccataagtttttgagctagatgtaactgatcattattaacacggacgaacactagcttaattgatcgatctattcgatcattccctcactaactaattaatctaattctgcctgctaataaatataattaattgtccactcccctgatcaaaatgatctttttccgattaattttcctcaggtcgaccaaaacggataatagtttttattttatgatacccaattgtgcctatatatagatataggtatacgcattatatatacttacccggccgtacacgcgactgtgtactagcaggcactacgttcctgagcaaaatgaagcgtgcatgcatgtgtaagcaaagattttgtgccaattattgtttttgtatatttctgattttaacaaaacgtgtacaccatattaccataacaacatacctagagatcataaaacactttgtcaagtaaataattaattaatcagctcaaactaagcacacattgtaagcatctcttcctaattaataacttaaactaaaactaagaccaataatagttttacaaagatcaggttgttgtcaagaaactaattaaaattataaacacaatataattccacttgcacgcaatggtcatatcaaaataaaaatctatatatttatttatttttggagcggtagctagtacagtagtttggcgagaaaataatgcatgtaactttcccaagatcctgtttggcgagaagaagacagaacctacttggcgaaataatttttttagataagatcgagttaattagcataatattcaggatcaagagaatctagccagtcaccgtcctcgttcttgttctattcaccttgtttgtctcgtcaatttgcagcaatcattgtactaaaatatttcacccataggagaccaccagatcatttgcaaccacatgccaagaaagggacataagataggttaataattagggtttgttgattagtgatctaaaccctacagagctggagcatgctctgtagtattatacacatataaaacaaaataatgcagtagtattataagctaatcagatgacgtatactaatatactcgtctgtttcaaaatatttgacactattgattttttagcaccgttcgtcttattcaaaaacttttgtgaaatatgtaaaactatacgtatacatataagtatatttaacaataaatcaaatgatagaaaaaaaataatagttacttaaatttttgaataagacgaacagtcaaacatatttaaaacaatcaaaatggcgttaaatatttagaaatggagggagtatatattatctccagaaccaacattttttaattgtggataaaaacccagcctctatatccactgccaatttccagaatcatctggttattactagctctcatacatatgcatgcaagcactaatcctttgagatctactggctagaaagttgagatgacctattgtctccataagagagcacaaatcctcatttatctcactgtccaactgcttttgctgtttggttagtgcatgtaaaacaaaaaaaattgcatgacaaatgagatgagaagattgagtttgagatcagaaataattagacataattaaagttaattaactttgtgcttggtggaagccacatcttcatcaacacaagtggtcctagcaagatatcattgtacttatgtttatgcatgtcgagctttgattttatttattattgaacccactaacatgtaaattggattagtacgtacgtgtagtacacacacaaaaaaagttcagtttgtgcagtgagcactttgtgacaccaatgaactcacctgagatctatgcatgatcaagagaccacccatgtgatcgtatcccatttcacatgtctcttgggatctaaccacaagcgcatatgctcatgcttatactctctccattccataacatactaggcacaactaatttttaagttatttataatataaggcgtgcatacatgcatgtcattaactagtaataattatttcttgatctttaggttgttaagggtggttgtgcctatggatggagtatatgattgattagttagtcctttgctttgattactagtattattatgagctctaacatgatcctgttaattaattagttatatatatatatagaacattgtctgttgtcgatgagtttatactagctaagtgtgatatcctggctcagggcttaatagaattaatagaatactcatatcaacaagttgtaacttctttttcggaagccgatctcgaactctaaggttaagcgtgcttgccctggagcaatttcgggatgggtgaccgattgggaaattcttcacaggtgcgcacgagtgaggaaaaagtgtgcagaaaagactagtgttggtatcagagccgacccttgcagctatacgtatatatgaacatgtacgcgacccttgcagctatacgtatatatatgaacatgtacgcgggcatacggtgcatacgggatgatccacgaagtggtcgtatggcatgacgtatgtgcgccgaaaattgtcttgtatatacgtggtgctaataggggacgttcctggcctgggttgaccgacgaggacgtcggtatcttaaggggggtgagaatgtgatatcctaatatgattaataaaatactcatatcaacaagttgcaacttcttttccggaagcgttaagctatcaacaagttgcaacttcttttccgaaagccgatctcgaaaaaactctaaggttaagctatcaacaagttgcaacttcttttccgaaagccgatctcgaaaaaactctaaggttaagcgtgcttgccctagagcaatgtcgggatgggtgaccgatcgggaaattctttccgggtgcgcacgagtgaggacaaagtgtgcagaaaagactagtgttggtctgtgaggaatagtctatatcctaggaaagctgccagatgtaggaggcctcggaagagtgtgggggcgtcacactaagctcctaatactcgtcagtagtgtactttgaaatggggaacatctttgcgccctatccgatccaaattaattaactaattaattgtttagcatcgttcacaagataatgttgcaaattaatactagtagtagattaacagagactgattggatgagttcagctgcagcctccagatggctctttgtaacatggtgatgacatcatcacatgtcagcaaatagggcctgcagcttaattggaaggtttttttttccctgttctgattataaatacatgcaaggcatgtgacagaggcaacaaaaaagaaccttttgatagacctttgtgatattatttttagtggtctaaaagtcaaagttggatggcgaaaaagatgaaaaaaatgcagtaaatttattctaaaattgaaaattctagccgcaccatgctttaattaatttactcagaaaatatatgcactgcaccgagataaatttgaaaagatcaagctgttaccttttccacgaactcgaaatagtcacatgctgtcaatttattaattaatgcaatttggcgcaataagaaaaatgtcaagaattcaagtgcatacgtagagtatgatcgatacagtaaaaatatcagcaaatgagattgaggcagctggtcaacaatccatgcgactgaggtcattttattgaggtgatcaacatggacacaagctgttaataacttcttaattatcctagtacagagattaattagtttattaaccgcatctgctgcgagcaagcagctatacgtgtgaagcttgaaataactgaaaatgtaacccccccaccctcccccttctcttaagtatataaacgtgcatctcgacattgccaattaattaatccatccatgaatgatctcatcactgttacattaaattagtgaattattattgtcaatttgtcgtcactagggttcagtactgacctgccctagatgttgcttgttgcaacgcaggcatcgactggtcgggtatgatgcttattaattacttcttggaagggccttcttgtgcccataaaaaaattgcaaatcattaattgggctttttttttataataattgcctatacaacatgcatgcatggctttgtatgactgaatctagctagctagctagctaggggccggataatacgaggggatatcctttgtagttgtaatcgagttaatatgtaaaatacatatttgtttggtctcgtttacattgcaataattaattatgttttttatagtaattgaggtatacctgtcgatatgtcataataattaagaatattacagaaggtgtgaattattacggtataaacgtctcatggtaactactccctccattccaaattgatctacatatttcataggtacaccaagatcaagaaaagctaataactctctcatactatatttactctagcaacaaactcaatgtatgcatcatccccactatttcctagccaatagcaaatcaagatattgcatgtgggttataaatacatgtgtgtatggatgcatgcatcaatgtccatttactccaatgcacaaataacgaataaacctaataaataaacataaatatgtagatcatttaggaataacctcaaaaaaaactatatgtagatcaatttggaatggagggagtacttaattagaacaagtataataaaaaccttacgctagccataaaacaccacgtagggccggcacccctcgtgtaagatgtaatatatctgtacttgagcttcaagatcaaagtgacagaaatgaagggtatattaaggtagcaaaataaaacaaaaaaaactacagcagattattgctggggccagaccagtgtactagcagtatagagtgtgttgtacatactatcctctgcgttgatgagcactagttgatatgggtaaaattagagataatcaggtagaaactaaaaactacttcttttattatatttgctcttatatgcatgtgtttttaattgtggggacttctagaaaattttttgtggggacttctagaaaatttcatgatgcctttcatactgtagtacccctaccctggtaacctcctcggcgtatttccgatgtatgctattccttattgacatgcaagacttttgcgcgttcgaaaaaaaatcactgctcatagcagttcaactacaataaaactagggaagcttagaagcacagcttaaaaagctattagtattttttaattccctccgatcggttattatttgaaatgccctccgatccttaggtttaagcaggtggacgatctgcctatacaaaatgccaagtgggcccatatgtgaaaattcattttcatatatggatggcttaagagatcacatgctccgtttaaatggtgctattacacaaattaatcagtaagtaatgtaaattgatctcgtccatgagcaacatctaattaatcttcaagatcttgatcaaaatttcagtcccggccggcaacataattattttgtgacgtcgcagagatcgatcgatcagattaattgatcatagagacatggctagcagcagctactacctaacatggcacatgcatttgggagggatgtatctatttgtatctgcacatggtgacaaggtgtctgcacagatatgtgatgaaagtaggtgataaacttttgaaataaaatggcacgcttttcaaactgctaaacagtgtgttccgtgcgaaaactttctatatgaaagttgttctaaaatatcatattaatccatttttcaagtttgtaataattaaaacttaattaatcacacgttattaactccacgttttacgtgaaatgcttaatgttcatcttcaggatattcaatcaccaccttaatctgcaaacctttgcgtgacgaactacgctgcatcgtcgtcttccaaaaatgtggcgacacgttttgtttggtacattcgatacgatgatatctgtactatgcgtttttgcacatgagaatactgaaaccctacgaaattcagtgaatgaatgcagatatctgttcagctgatatcgagctgttttatagctgcaaatggctagacagcgaagatatgcgatgccttgtagacaaatttatttggttctccatataggttgatttgatttcgacaggggcccaatttgcaccaaaagtgatcgaagaaggacagattttattttgtcttcttatatactccctccgtccctaaatatttgacgccgttgacttttataattaaacatgtttgaccgttcatcttattcagaaaaatttaagtgattattaattattttcctatcatttgatttattg

SEQ ID NO: 4577 - DNA, 38570 bp, Oryza sativa
ttgatgccgcctcaccgcagatggacactctttgggttcagttgggatctgaatcctcagcaggtccctgcgctactgatgcacttctgaatggcatggagatctttaaggtcagtcggaatgggaatcttgctcatccaactgtgaggattggaggtttcaacagtgccatggggaaaccgaaacgtagccccaagtgggtactaattggtgcagctgctggtttggtgatttttgtgtcaattgttggtgttattttcgtatgtttctatctgcgatggaagaagaagacttcagctaacaaaaccaaggataatccaccaggttggaggccacttgtgctccatggtgctacaacacctgcagcaaattcccgctccccaactcttcgtgcagcaggtacgtttgggagcaacaggatgggaaggcagttcactgttgcagaaatcagagaagccaccatgaactttgatgattccttggtgatcggtgttggtggtttcggcaaggtctacaagggagagatggaagatggcaagctggtggcaatcaagagggggcatccagagtctcagcagggtgtgaaggagtttgaaactgagatcgagatcctctcaagactgcgacaccgacaccttgtgtccttgattggctactgtgatgagcaaaatgagatgatcttagtttatgagcacatggcaaatggtaccttgaggagccacctttatggaactgatcttcctgctcttacatggaagcagaggcttgaaatatgtatcggcgcagcccgggggcttcactaccttcacactggacttgacaggggtataatccacagggatgtcaagactactaatatcttgttggatgacaactttgttgcaaagatggcagattttggtatctcgaaagatggtccacctttagatcatactcatgttagtactgctgttaaggggagttttggttaccttgatccagaatattatcggaggcagcagttaacccaaagttcagatgtgtactcttttggcgttgtgctgtttgaagttctatgtgctcggccagtcataaacccggccttgccaagagatcagataaaccttgctgagtgggctctcaagtggcaaaagcagaagttacttgagaccataatcgaccctcggttagagggaaattacacactggagtccatcaggaaattcagtgagatagctgaaaaatgccttgcagatgaagggagaagccggccttcgattggtgaagtcctgtggcacctagagagtgctttgcagttgcatcaaggtcttctgcaaagtgcgaatactgatgatttatcacagcctgaactgaagctctctgatgcatcctgcaatttagggtgcatcgaagaagttgaggaatcctgccgtgcagggtcccaggatgtgaatgaggaatatgtggatgtcaaaattgaagttccatgataatggaatgctggtcaaactagtggcttcaagcaactgaatagggtgagtgtcaaattaacaaaaatgtttagatgcactgctatctagtattgtaacaccatatatgagtgtccctacaatgtactgagattattttggtacagttaggagaaaactctcttcatttcttttgtacttgtgctgatgtacaagtctttatgatgcaaatttcattgattcttttgtaaaattctagagccgtatgcaatgcaatactgagcattaactggagatgtgctacagagtgaatgagtttttcagttctcttatcaactgtgctctgtattgagcttcgtacgcagtattttgctacccgttaatgttcagttagatattcttttagccagttgttgtgaaccccatatgtttactctgcttattgagcttctatattattgcacgaacacataagaacattacttacatagttttattcactcagaagttaattctaggaacatagctgtacacagatccattctagaatatgtaaaccttgcatggcactacaataagttggttttcttcaaaacaagcttcaagaagccaaggcactagtattgtagacaagaagagcaccagccagcagaattccagaaagagtgactgcccagagcaacaaccctgtctttcctgcataaagcaagggatgaaaattatatgtgctttggaaattgatttgtctgatattttttaagtagcggtgagcgctaaaaagtgtttggccttttgggatggttatatgtgcttacctccagtataaacatcaccacttggtgaccattcctctgggttatatattgggctacaataaatacagcaaatatccattatgaaaattgaaggcaataggtgagttatgaatgttatgcctgctgttcttctattcagatgaatgttttacctgtatccatcaacattagctccatacttgctggcaaactggtagacccctttcccctaattacaatggaaaagaaatatagtgatgagcaaattttactattgttgatttttctctaattttgctttcaacctcagccctgaccttgattggccttccggacgcgtcaacaccgtctttcaggttcggtcctcctccaggtcctacatgttaacattacatatgttcatatataaaatagtactatgttgatagtgtcatccattagaatcagtgctagttctctgatttttttctgaaatagtttgagccactgaaaagaatggtgtgcttgtgcatacatgaaacaaggggcaattaagctactaacttgaagcttaacctctatgcagtttttccagtgctaaactctgtagcgtgtactaaccgaaaggctgagaagtctggatcttctttgcttttttggccattactctgaacaaggatggccttgatgatggttggatggctcggattcgcgtctgttccaaaaatggagatggagatggttttagagcacaagaggccatgacagaggctgccatgcgtaagatgctatctcttactctccaatttgctgtcagtctcttttcttggctaaattgtgtaaaagtcttgctttaaatatacgaaggaaggctagaagtagcagcaactgactaagctttgtttgacaagtgtcagctgctatgtggcatactaggctcatggaccactactttgtgatcagtcgttgtccttcacatgaccaactgaagatgatagaattcgaaggaaacgtctagcgctgagtggataatcctgagaattttcttacttgttccactgattgagaaatttcgttttgttcttcgtgagtcaatttcaccaagtgcattcatatctgttccccttattgggaaatttctttcgttctttgtgtgtcagtttcactgagttaagttctgaagattattttagccgggttggccgaagaagaggccaaccaattgtattaagttttgggacaaaaagaaacaggaactgtacatgttggcaactgtacatcgacaggatgctgtcgaaaacggaagaagcacaggaaaccccacaattacaagctactcatcctgaaaaggaaacaggcctgcttccttccagatcatgagctcctccttgacccctccaaagagctgtgtcgacaagcatgattactgatcgaacactcttcaattctcacatagataagccaacatactatgaaacaaagcgagtcaaatgcttcccgcctatcaacaccgttctttaagttctgaagatcattttcatttctgtctgaaagaacatatattaatttctgtgagatttttgcatatagggataaagtcttaatcattgtaaagtaatctgattctcacatagataatcttatttaagagggtaataagttttatggtgcaaaccctcttctattatgatggaaatttagattcttaaggcatgcatcctggatagccatcctttttttttttgaaggtgatagccatcctttttgtggatatgctggatatcattcttattatctgaaagaacatttatcttattaggtgttgttaaatcagaaaatattttactaagacattgttaatatgcttttgtggttttgtactttcactgatgcagagtatgttttatagcacctaatttattattactattattgtaatactggagaatgacatgtaatccttggggatatttcgatgatgaagatttacttgcactccatggggatcggtacgctaccaaaactttattttccaatttttcagaataagctgttcaactgatttaactcttatgatccaacaggtgccaactctgttgaactcaaaattatttgtccctagagcccaagaacactatgttgctcactaaaacatcgttgcataacttagaattaacattactcggccttattcattaccaccgctggcagtcaagtccagtccaggtacataactggttacattcctagtgaagattatatacatggaagcaggcacagcttggtctgctgcacttagctaagccagtgcactagtgttgtagacaagaatagcgccgccaactagaattccagcaagagtgattgcccagagaagtaaacctgcctttcctgggaaaatcaagaaattttgtaagtacaaaatttgtgagaacaataaacatctcatgagaaatttaaataagcagtgcgcagtgttaaaattcttgtttctcgagtccttttttttgcttacctccaacatagacatcaccagttgaagaccattcttctggggtatatattgggctgtaacacggtagaagcaacaaaatgtcatggataagctatggatttcactgtttttacagataataaataggtgtttctcttttcatctccctcatctagatctgtaaatttctccttttattcattcacatgctttatcccatttttactttgaaactaatatttttatgagttactatatattattatttgtgcatggatctcaaatatattgttcttcattggatcggtaacatttacctgtacccatcaacatttgctccatacttgttggaaaactggtaaagaccctttccctgattaaatttgaaaaatttaatggtgaaaaataaccattttgtctgatatatatgcttgtctgagcttatagccttatactgaccttggctacccttccagatgcatcaacaccttccttgaacaccactcctccagcaggccctagatggtggcataccataactttgtgagaaggtaaactaatttagagaaaaatgaatggtaacaatcacagttctattcactaccatttatcacctttgcatgtaaaaaataagataaccaggagacactcattggtacccatgaaactgagaaacccattttccatttcatgtttaagccagttgctaatatattaactctgaattttacagcatgtactgaccatagggctgggatgtctgaatcttctttgctttcttggccactatgatcaaagatggccttgccattgtccctttccctcgaagcttcgaacgttctagtaatggagatgcagatggtttcagagccagagaagccatgacagaggcagccatgtttatgcaacaacactcaactgatcactcactctatctctgaaattaatgcaaatgatctcttatgcagttcatcatcagatatccatggctttaaatacaggaaggctttcagtagcagacagtgagtgactatgatttgttagtcaattgtcagttggatagtagctatgataatactgtgtcatggggccatgatcacgtgacaagatcttgtcttttacctggatgattagagatgatgtactgatgaaaatctgaagcaagcacctagttggttggttgatggataatcctggggtttcctgccctgcttaactattttcctggtcgagaaatttcaggtgtcaattctgatcatagcgagttgtctggggatcttatctctaacagagccagcgagttgtctgtaaacagtatattgatatatgcagttaatgttacatattttcgtggtaaaggatgaatggtgcttttttttttttgatatagttcaatttatatgaactgactattgtgtagtaggtatgaaaatatcagtttacctaacaagttgttatgtttttactcccaataatattataccacaaataaacgtacctaacctgatcattttacctacattatttgattctctccctgtagcctgatcgatctagcactccttgcaccaagctcccttttattaaaaaaagagtaactactgagttttgtttttgtctaacattgccgggacagtaattaaacaataaagtaaattttgtgcagattttagtattttacattcctgatcgagcctattcgtgtactaagtattcgtgtgcaatgcatgcataagcgtaactcaactttgtatcgaagagaaagaaacacgtagtacgttaatatgaaattaaacgtaggtcggtgcattactagtggcactgtgggtagcttatcttttactcctaaccactgtccttattaatccctgcgttatggaaaataaatcttaacgagtggagtactccctctgttctcatttactccgatccaataaaaaaaatatctcgaggtatcggtacctcacggtaccaaattatttctgatcattaaatctagttagacataatgtgtattgttagatctaacaattggaaatgatttggtaccgtgaggtaccagtaactcgagatacttttcgttggaccggagcaaatctcatccattcctaacaccttgagcagcaaagttgaagtagcgttagatccagacatgacgccgtgattgttatatgatgttatctgatccagttgtagctgcggatgccgggagaaggaagcagaactagcacgaccaaccgccaccaagtgttagcatctcatgctgccatgagcatccatgtacatggaggtaggggcgaagttagtgcgaaatggagagatgtatcacatgcttgctttactctactttggaccaaatttaagctgatgcgggtgtctaagttgatcttaaggggtggtggaaatagaaaataaacgaactatagctaaaaattttcaaaaccggattcctgggcactgtgtggaggggaaagggcggatatactcaggtacgggttcaaaattctagtttgtatgaaattttcaattttttttatgaatttgataatattttattcaaatttaatcaaattttattctaaatttcagtatatcggcaccctccgatacaaatcccaaaaatgaaagattgaaccctgaccctcgtgtggtttgagccagtactaatgacaaagtttgagcagagaagaatgcttacaattggaattattaggttacatttctgttgacatttttggagattccaaagatgattgaattttgacaagttcgaattgatactttcttccttttctttgaagaagaaaaaaaaataaaactttgattgatccgtacaaatgggccttcgtgggccgtgcgcgcgcgactgggcgagatcaagcccaagttcaaggccttagggaggtcgatcagagttttcttctccgacccttcccctctggcatggacgcatggtgatacgcgcacgacgacagccgccgggttcgcggccatgatctctgtctggctcgcgcccgcccggcgcacgcatccgctgatctcgccgccgcaggtgaacaacgcagccgtgccggcgagcacgccgacgcgcgcgtcatggacacggccaagtccctgaacaagaacagttcgaggtcgacatcgtcggcctcactgccttcccgtggtcgcctcgccggcgccggcgccggccgatgacgactgaggactgaatccccggtggaggccgtagactgtggcgtccgcgagtccgtttcggtgtttcaaactccgaaccccattgacagtgccggttacctcgccatggcctcccttagcttgctcacctcaccggtcaccgcacgcaccgacttccgaccaagttccgggcgccatcatccaatgcatgtgtgcagtgtcagtgtgctggtgaagtggtccgtatactccgatcccaaggggtcggagtcttcttctccgaacccccttgccacgtcaacgtaactccggttcattgttcgtcgactcgccggagcgccgccgcccaatcctggcggtccgctgctttggccgctctccggcggtcgcacgcgcaggaacacccacaggcatgcatgcatggtgatctgatctgatcccgtccgcgagctacgacgagaacgttctcgccacgccgcacgacagccggttcacggccatgctcagtctcgccgcttttgccagccgcagcgcgcggggcaaacggacgccatctcggacgctacgcacgccgcgtgcagagcgtcggcgtggcgaccgcgcgcatggccaggcagagggtgtgcagattaacctgatcgatccccattggaaattctgaatggcatgcagattctgcagttcttgtgggaaaaaaaaaaggagctcttcttcgaaaggcgttgttgttgtattattgggaatgtgctctcagagacaggcatgaactgaattactgaaaccatacaaggttgaagtaaaaaatgccgtactgttcttcaattgcgtaaatgatcatgttagagtagatttttttctctttttttttgaacaatgatgttagagaagaatatcatggtgcattaattgtttgtttgatgcagcacaaaaaggttccagagcaattacagtcgtcaataatccagatatggccactatctgtggattccattatttcatcaagtcttggttagattaactatgattcagattttttgttttttggtacctgaagtaatcatatcaaccgagaactactcctacatccctcgtgaaacgcacatctgttacagtgatgtactagtatatgatatatccaacgcgatattaaaaggagctggttgcaacttgcaaacaaaaatgtgcagtattttattcattagttgaccttattaaagtttaatttactttttttttctataacttgttaagatcgaatttaacactgcatatttaaagatgatatatcgtgcattaatatatcttgttaactttcgttataaaaaaataacgactatttctgtgacataaagaaacgtgatctgtacaaataacactgatcgatctgtacaaaatgcatgcgcccaacttcaaggccttggggaggtcggagttttcttctccgaaaccccctcccgatccaccacctcacgtacacgcacaacgcggccacacctcctctctggcgtacgggaagaagcaccttggcatggtggtcccgtcggccatcctaaccatcagcaagctacgacgtacggacgtgttcccgccacgccgtacgccgcgcacgacagccggtcactaccagcagattcacgaccaaccctgtaggagcgaaaccatcagaaaaattggttttaccgttagaaaatgtattcctgtaggtgaaccgtcagaaatcgccgatagaaaaaaggaccacgagaaattcaattttcctatcaggtagaaaattgcaactggcgtcaagaaatgttaattgtgacgtggacccgtcaggaaaaaccgtcgatcaggctcacggccatgatcgatcaggctcgccgcgcgcttttgcccggccggcgcaacgtacgcagccacagcggcatgcatggtctcccgcggtgtaagtcggcggccggccctagctagcgcccatgcatgcaaaccagacggagtagcaaacgcaggatcgttggcggcgaggcagaacggcgactgcatgcacacaacatcatcggcgaggttgccggccggagctcgcgacgcccctacgggatcgatgtcgctgccgaagcccaagtggtccttcatggctaccctgatggaccatggtcatccaatgcatgtgtactgtgctcatgtgacaaggaaggggtaattaacatagctcatctgatttttaaatacgcgaattggcttagtgctacacgcattctatacacggttggccgcctagcgctatgtgattcttttttataaagtcgcagttagctttgagctacgcgcattatatttttaagacgtggttgccctaaagctcgcgttatattcttaagccacgatttgcccagagctacgtgcatcatattttatgagtcggtatattactcagagattaacaccgcatatgctataaactaatattgagtcacttggttggttaaaattatggttcttactatgtgcttagttgtttcccaactaagcacatagtttgctacagttatcaggtacacctattcgatgtacctgtttatctatcaattcgatgcacctatttttttaatttatttgacgagccctccacagtctctttgcaagatatcaagataaggacttaataagtaaacactcgggaggccttcgcaaagaagattgaagcactcagtatcggtcatgaaccatagagaagactgtaactcgacttcgaaggtttcggaggctaatgtggataatatggataccggataaccacgtgacctccatattcgactagaaatataggaggtgagccgaaaccatgtattatgtaatagagtaaggttcggttgtcatgttgtcctgtatttaaagacctctataccacgacgaggccgacggtggcttcgactgtgttcttccccccattttcccaacccacatctcttgttttccgcgcacacttttcaaactactaaacgatgtgatttataaaaaaaaattctatatgaaagtttttttaaaaaaacatattaatccattttttttaaaaaatagttaatacttaattaatcatgcaataatacgagctttgttttgcatgtcagggagaacccctcctccccaacacagcctagggtgcttcgacgtggtaggtgtgcagtgatggagctctacgatcgaggttggtggcagctcaaggatgttggtcgggagctcaacaaggtcaaggtgcaatgtgctagctggatgaggccactagcggctcaggagctcgacaaagggtgtgtttagttcacatcaaaattgaaagtttgattgaaattggaacgatgtgatggaaaagttgaaaatttatgtgcgtagaaaaatttcgatgtgatagaaaagttaaaagtttgaagaaaaagttgggaactaaaccggcggcttgggagctcgacaaggctgatcataaagtcgtaacagttggatctgggccaccatcgtcaaccttctcgagtacccgtaggccgtagtatgatgaccatcttcgtcatccatcggtccgggcacccgtcgttaatttgctcccaacgcgagatgaaacatcctttcccgaccaaagccaacaatggagtgaagagctcaaccgcaatctcagtcagatctgacgctacctggtgagaagtctctcgagagcttgtgagagaacaggcttctacagtaaaatccccctccccgaccccttttccccccgattccggtggttcgtcgccggcgagggccggaggaggggtcaggccaccttcccgtactagtatagagtaggttaggtcggagttcttccgtagtcaggtcttcctgtagctcgggtttgtcccttttggagtttcgccggtgttgcttcatggcgatcggagaagacgatggtggcggtggtgtttgtggccgtggctgtcccagtgtcgcttttaatctggaccgcagctggcttgctctccacatcaagggtctgcgcggtgtccgacgcaatcccggctgcgtcgctgaagatggacggatctggggcgtttggcgtcctttccatggcgacaagggcttgcggtggtggatctggtgcagctggcctcggttcattgcttggccagagcgatggaggtggatgtggtgtttctgggccggccgtctcaggctctctgacaaggacggatggtgttggctgcaagagctgctgctgctgctcctgctcgttggtgggctgaatgagctgctccagcttgttagttggttgaatctccacatgcttctgctgaagctcttggtggcaagcttgttggttgcttattgaagctctctacggcaacattatcccttcaatctccggtgttgcgtacctccgccaaatcgttacaagacaggggttcagtcgccgttatcctaattcttgcatgttcaaggcaagttggagtatggagactttcttcaaatctccttgcagtagtattcaggttgaggactccattcgggttgagtataaaccgtctagtcggctcttgtcgataggattgtagtctatgctcctcagattcgatggagaactcctagacaatattttgttgagtccggtgaagcttaagaaaaattcatgactcaacaacaaacctcgaatagcgccgtttccgtggaggcagccgaaggggtcaccggtctatcaagcggtgtgcgcgtcttcagtagaggctcgtggacgtggtcgtcgcggcattgccgcagtcccctgtcgatcgcgttctttactgctgtttggattatcttggaggatgtttttcttagttcagctagctttaccttctgaatggatggtgttgttctttgtcttatcttttatggcgatgttttggggatatcatttcctttaagctctgtctgtaatcctcactatttaaataaatttatgagttttaaaaaaaacagtcagatctgacgcctgctccctcccggcccaacaccgtggtaagtacgtgatggggccaccggatacaacggctacagtagtgcttaatttcatcgctagccacaccaaccaagctgttttttcactggtggccatgtttccaagtgttagaagaagataacgactacggaagaaaaatggctaggtgcattatattttgatccctgtgaaaaattacagaattccttccaatcggtcgaccagctcgggggcagcaggatcgtgcgctctcccctaacgcgcacgtgtctcctcctggccccaccacgtatcttcaccatatactccattgcaacaaatcacccacatattttggaaaccctttattaagggaatttgttttattttttttccaccaagaatgtttcacttaatgtacacacattgtttcactatgtatagatctaatattgcagtgaacagaaacattcttttgcaacaaatcacccatttggaaaccctctattaagagaattcgttttattttttgttccataaaaaatgtttcacctagtgtactcataatgtttcactatgtatacatctaatgttgcagtgaactgaaacattcttttgtaacaaatcacccacatattttggaaaccctctattaagggaactcgtttcattttttttcaccaaaaatattttacctagtgtacttacagtgaactgaaacattcattcgctatttgctgaaacattgttttcatacaagatgaaacaacacccaatttaaatgattgaaatattttctatctactcagtgaaacaattccgatatacttggtggaacattgtgcaacatttaaaaataattcaataataagctaaaaaaatttcgtcggaatatatccatgtgtggtcttgttttaaagatttaattgcaatgaatttaatggtgtaatcgaatcatgatttggataaataatttaagagaaaaaatagtttcaagtggttttgcatgtatacgtggcgcgcccgattccccccccccctccatcgggtgcccgacgcgtaggagtccccgaaaaaatatggtataaacaaactcctttaggacgcctcataggcttaggccacataatggcacgtttcgaattttatggtataccaatggcactgagtcgatttaacaaacagtaacgtcatttctccaagacgacgaatttgtaatggcccatatattgcaacaggtccacatatgtaattagagatgagtagcacaacccatatcaatagggatagatcattagtatggattgagcataagtatggattgagcataaaagaatatatccaaccatttttttatgacccgagttcatgagagatagaatcgatagcggcagtataatttaaccaacatgaaatcgtgtactcattttctccatgaaaaatataagggtaaggcaatgcttatggttattatgacaataaggatggaacccgttacagctcggagcaatatttatgataatatctacaatggttaagtttttggaagaacataagatgggtcccgttgagttccaccaaaggaaaaaaagatcacttcctaaccaccccatgcaaggcagcaagctagagaaatagtccgtggacaatgaaaaaaataattttatatttctttcggatgaaccttgggcctaaggttctttttggttgtatgaagcttaaggtgtgcttccacaatggctaaagttacaacacttaatgcttaagactaactttttggtagattgtggttgccctaagtatttagactaaaattttatagtattcctagactgattcatatgatatcatcactttaatgatttcaaagctaatcagatgtttcgaaataaaatgtaaacgatccaaaatttaaaaattgacaactgaagtgactaaaaataaatattttgatatagaaatcctagtatttgctactactacatagaaatccttattttcgagtaattagtaggcgtaggcggcaaaatcttgagctagtaccagattgatccattgtgggtagtaattaaggccttgtttagttccaaaaaattttacccaaaaacatcacatcgactctttgaacacatgtatggagtattaaatatagataaaaaaactaattgtacagtttgcatagaaatcaagagacaaatcttttgaacctaattagtccatgattagccataagtgctacagtaatccacatgtgctaatgacagattaattatacttaataaattcgtctcgcggtttccatgtgagttataaaattagttttttcatttgtgtccgaaaacccctttcgacatccggtcatacgtctgatatgatccaaaaattttcttttcgcgaactaaatacaccctaaagatatgcaaatgatcgtgattgaagtggcatatcagaaaaaaaaacatggataatggagtagaccagcaggtgaggtatttatggccacaccacacggtcacactcacaggtcacatacactagagtgacctattttcggaaacggaatctgtcagtcggaattttttggaaacggaaacggatttggaaatattttctcggaaacggaatcggaaatgataagggcagtttccgtcggaactcggaacccgtcggaaactttccagaaattttctcggaatttccagaattctttctaggaatttccagaaatcacaaaataacctgaattctttttttagcactgaatagttaataccatggtgtttggctattatttttttaaaatatttgttatacaaatctaaaattacataagaatattgggatttatcaacagcattactaatttgttttatagattgtgttttgtgatgtactgttgatacctaacaattggacttatatgattgtgttttatgatgaattgttgaccgttaagacttgagaattgggtttatcagttagaggggtttttttattcaaatttccgttaccgtattcacgccggttcgttttcgctccgttttcggtttcgataatattcgattccgttttcgtatccggggttttcgattccgatttcgattccgaaaaaaatatgaaacgaaaacgataaagatgatttccgtccgttttcgtaccgttttcacccctacactagaggtactagtgtagagtaggcacgcagaagtttcaactttgcagacgagcagtgaattgtgcatcgatctctgtggtattactttgtacgagtagtatcgatcttctgtcgtactgtacgattgtatcgtagtaactcgtaagtatggatcgacttttgatctatagtagtacctacggtgtggcctggcttctttgcgtttccgtctggagtctagcttgccgacccgtgatcaattagcacttcacttttgtcaaagtatttccgaatgtttagttttgggctgggtttagttccaaattttttcttcaacctttcaactttttagaacatcaaaattttcctacacataaaaacttctaacttttccatcacatcgttccaattttaatcaaacttctaattttgacgtgaactaagcacaaccttggtagtactagttagtgtctcagatttatagtgctagtaagtgttccatccattcaaaatcttttatataatgggatggagaaagtatgccgcttgtcacaacccaatgcaggtgttctccatgcagcgttacaagaagctttatgatcgccatcatcgactcatccaccaaatgcctagatataatttaggaggcagcaaacaggcagtacaactccgttccaggatcggctccaccaaatgcttagggagaaactcaattggtttagggttaagtcagtttgaagttgttagggtttgagtatattgtgctagctctagccgtatataaagctgatgagacagacaaggttagattgatttttttgttagccaacttagggataaaaggtgaatgatcgggcttctggctcggccatgagacgcgacttgtgtctcgcggttgattcatgacgaatgtataatttcctattctgattaatgaattctcttccccccaaaaaaagattgattttcttttcctcagccatgtctcgcccggacacataccgtcatagcccatgacaatgaaaggaaacagaggtgcaggaagcggtgtcgtcaccgatcttggtgcgcccgcgtatatttacatggttgccaatagccggcaacatggctttacaggatcataacgaccttggctaatcagtatctctaactaatcctgattacaatcattatctatcagctaagataagatcgatacggccaggttgttatgcttacacatgattatatctaatactccccctcaatcacaacctacctagatcgagattgtacttaaaattttcaagttgtcttaccgataacgcctttgtaaatccatcagccacttgatcacctgtaggagcaaactccacttcaagtaattttcgttgcactctttcacgtacaaaatgatagtcaacctcaatgtgcttagttctagcatggaagacagggttagatgataaatatttagcaccaagattatcataccacagtcgagccattggaggacttggcacactgagttcctctaacagagtttgtatccatatgatttctgctgtagcattagccaaggccttgtattctgatttagtactagaccttgacatagtagcttgtttctttgcattccaggaaaccaaattatcccctagaaatactgcaaaacctcctgtagatcttctatcatctatatttcctacctagtctgcatctgaatatccactaacaagcatagactttgacttactaatctttaaaccaagtttagtacactgttttaaataccttaatattctcttcacagcagcccaatgaactgtagtaggagcatatagaaactgacataccttatttactggaaaggaaatgtctggtctagtcagacttaagtactggagtgctcctactacacttatgtaattagatgcatcattgggacctaataaatctccttcatgcaaagtgagtttctcactagttgacaaaggtgtactaacaggtttacaatcagtcataccaactcgtcttagtagatcagtaacatatttttcctgggttagaacaatgccactagatgccttgttcatctctatgccaagaaagtagtgtaagtcacctagatccttcaaggctaaatccttttataggtccttcagcagagctggaaccgcatcttgtctcgagctagcaacaattatgtcatcaacataaacaagcacaaaaattatcagaccccctttattataaaagaatagagaagtatctgccttggatccttggaatccaaggtgttgaagcttctgacttaacttagcataccatgctctaggtgtctgttttaaaccatagagagctttatcaaacttacacacatagtcaaggatggaccttatcttcatacctaagtggttgttttatgtatacctcttcttcaagaataccatgaaggaatacctagttacgtctacaaagtatctagttactagttgagctgtactgctactagcaaaattataaaaattagacaaaaacaaatacaaaattaaatactcttcacttaaaattgtaattgctgacaaaaattacaaaaccaaaaatttagcaagacttttgatatgtagcaaaatctaatctaccatcagcttgattaatatatagcaaattaaaaattgacaaaaaaaaagaagacaaaactacacaaactcctgatccccactttaattggaattggaaataattagtgaactgttataacaaaacttataacaaatagcccacattcacagtgctcacaaaaatgacaaaaaatgacaaaactaggaagtgaactgttataacaaaacttataacaaatagcccacattcacagtgctcacaaaaatgacaaaactaggaataagtatggctagtagatgacagaacaacctactgctagaagtcaggaaatctcctttagagattatgagctgcttatagaaaattaaacaaaccaaaatacctgctagctgaaaattaaactaaagaaactaagtactcatcattgagaacaaaacttacaaatatatttctaacaaaactaagtacctactcttcacttcaaattctaatgtgatgcatgctaatttctaacattcctaacaaaactatgttatctttattgctaaccagtttactgtttagtagcttatatggtgccctgacaaggtaaattaaccaaaattctactgcagataaattagacaaactacatacagagtgcaaaatttatcccttaagttcacaaacattaatttgtttgcttcaaaaaggaatatttctctgagaaaacacaaaactgtttctaacaattctatgtcttcgcacaatttataacaaaaaaaaaacgttgctcatttccatcctacatcaatgaactaaaattcagtgaaaatagaacataatcttaactttagatggccagatccgttggcggggaggacggggacagtggggagggacaggaagagaaagggagagggcggggtggcgagacaaagagggggaggggaagaggacgcacagcggccacttgcatcctcacctctgcgcatcttcctcccctccggccgaccggatccgccggcggggagccgatgacagagctgggaggaagagggaaaggggagggaggaggagagggagagggcgaggtggtgagacagaaagggggagacgaagaggatgtacggcggcgactcgcatgctcaccctggcgcatcttcctccctccagccaggaggatccgccggcggggagagcgacggcgatggcggcgactcacgtgaggaggcgaagagactggcgaggggaacgcgttgggttcccattcggatccggaataaaacaggtgcacacccaaaactagctgtttgcccggtaacgtttgcacaaatcttggaacaatctgatggccaggaattcagctgataaaacaaaatttttcagcagggtgttgtatagcaaatccccatataagccaacatttgtagacaagcccatactgctgggctccgtgcagacgtgagccggcacaattgtccgcttctccgtgtgcttccatggtactccctccgttcatcttataaaatgttttgactttggtcaaaatcttttgactttggttaaagtcaaacttaattatctaagtttgactaattttttttaagagaaaagtagtaatattcttaacccaagataaatatattatgaaaatttattcaattataaatttaatgaaactatgttgatgttgtaaatattactatttttttctacagagttagtcaaacttataatagtttgactttgacttgaaacggagggagtcactactacaaaaatggtattttcaggcagccaaaaactatttttcccggcgggagagtagtccgtctagaagcaatcgcatgcgaaaatcatcgattttcgcaagcggcccagtcacccgccagtgaaaatcatctctataaaaaaaaaaatcgcggccacccccacccgcgcccctacccacctccggccgatctagggttagggttggggggcgctgccgccgccaggaggtgaggggaagtggggatctgcaggggcgctgccgccaccaccgccctgccccggcatccctccgggcggatctggagggaggggaaccgctgccgccaccaccgccctcccccggcctcccttcggccggatccggagggaggggaaccgccgccgccgccaccttgcctccccccttcggccagatttgggagggaggggaggggagccgtgccgaccgcgtgcctcgcctcatcgtcgacggttccccccgccgccggtcgctgagggagttgagggagagagagttgaggaagaggagaggtgagggagagccggagaggaggagagaactgagaacttagaaaaaaaaatcccctcatgtgtcgagtctatttatattccacactaattttcgcaggcagacaaccagtttcaacccggtttacatttttttaggcggctatttcgctccgatgatcatacccgcctgcaaaaaaaaaatactcaacgttggcaaaaatgttttttctagtagagagtagattctagattgggtatccacatcaagaacataattcagaaaacataatacacaattgtactccaatttaattttactgtgttatgtttcttcttctttcaatcagcttctgaccagcgaagtccttttgtactggaaattgtcaggtaatctctactgcgtgtgttccctaatcgaaggatgtagcagtgcatgtgtattcagttgtagtctcaaacaaaaatatcgagcatttgatgtagatcagaattgtactaatatgaacaaaatttgtgtcccataataaatcaaagaatttaaatttgatttatttggaactattttacttacaaaatctacttataaaaactaattgtactacacaacaataatgtactatatatgcaaactacataaaattcaattttcaaaattattctgtagctttaggtaatccctttactaccatcattaaggctgtgttcggctcctgggttgagaactaatactccgcgcatgtaaaacggatcaactcattggcacataattaattagatattagttatttgtatataaaaaacagattaatataattttttaaaagcaagtttcttatagaaaagttttgcaaacaacgtaccgtaccgtttaatagtttgaaaagcgcgctcgtgaaaaaaaggatgtgagtttgagaaagtgaacaaaacaactcagcctaatggttcttaaaataataaaaatattttccctcgctgtttgtcaagtttaatttatattagagccacaagcaacttgtctggtttaatttatattgattttttaagtgcgttgcatatgcacgattaattactagttctcttaaacttccattccttctctcaatttccaaccaatcaaacaaacctaaatgtaaacgaaccaaaccgtatggcacgtacggcacgggcttgcaaaacaacatgagggagaacgacatcggtgctgccgcctatcgacctcgtgctcaaggcatcgtgcaagcgttgtggctcatcgtcatgagggtgctgcttccgccagccacaccacgatcgatgatcgatgttttgctgttctctttgcacgcgcgtgcataggagtatacaacaccgtcttggtggataccaccgcagagaaggaactctcgatcgatcagcatattcaccgtcgatcggtttggcataacacaatgataaggaagtggatttttatcccctacccttgtatttcatgtcgtccaaaaaattaaaaaaaaattgatatcatagatcaatgtgaaatatgtcattccatagacatacaaaatacaaattcaacctaaataaatagaaacaaaaacaacaaattttattgtgaatagtacacagtcaaatctatcatttttttttacttgtctatgttgaatttgatttttctgtgaaactgacatatttcgtattgatcaattataccttttttttaaaaaaaacagctatttaaattacatgtaaaaatgagaagattcccggaaaataaggctgctccaagcaacaatgaaccggagttttttttatgcccttaatgacactaaaagtttaaaatcttcatctgacggaaaaggtacatgcatgttagagattaactatatatttgcaataaattaattccaatgatagcatgcaactcaagaacttaacccttgcttttgcttttgatcctcctatcgtgtggcacacgtacttatttgacaaaagaaagcaaaaaaagagaggataattacagcaacacaaaaccaaataccccatccgtttctaaatatttgacgccattgacttttgaaaatatgttcaaccgttcgtcttattaaaaaaaattgaagtaattattattttcctatcatttatttattgttaaatatacttatatgtatacatatagttttacatatttcgcaaaagtttttgaaaaagataaacgatcaaacatgtgctaaaaagtcaatggtgttaaatatttagaaatggaggaagtaatttttaaaaagagacaggtaaattaccattatgcgagacggggagccggacgttcatgaggaacggcatctacataggtagccgacatcgggccgagctacccggcgcacgcgtacaggtacaggcttcggagcacggcgttctacctgctgggcaacaacgtacttcgacgtcgatcgacaagctcatctccgccgccgccgacgaccagcgccacccgcctcttgaacagcttcgagcgccgcccacaccaagatcatcctccaggaggtcatggcaaagagagaatggcctagttttagtggtggtgtacactagtatttgtctcgctttacttgtcatcacattcacatatactccctccgtttctaaatatttgacaccgttgactttttagcacatgtttgacggatcgtcttattcaaaaactcttgtgaaatgtgtaaaactatatgtatacatttaagtatatttaacaatgaatcaaatgataggaaaagaattaataattacttcaattttttgttgaataagatgaacagtcaaatatatttaaaaaagtcaacggcgtcaaatatttagaaacggagggagtatatatatatatatcctcctcatcacacatacatattcacatccacgctacgcaatataacttcatatactgagtactaaaaaggcaacagagcagtcactcatttgaattccagttactagtctgtctttatcatccaaacaaagctagcccaacacagcacagggcacttctccaataaaatacaaccaaacctcacatcttgttactaccactgcacattgatgcagccacaaattagatactactactactatcagtaatgcaatgagatgctcgtacaatcaacaaagccacatgacaaatcagaatatcatacacaccctctaagcaaatgctcaagccccatcacacggaggggatgcaaatgaaatgatccattgcatccctcaaataattcttaaaatgagacaggtgaatatcaacaccataccaacgtcaaattcatagcttaactcaacatacggtttgtgacgttgcatggcaacgatttacatacagttcattctagtgatctagtcccagtctccgtgcttcattgacaaaaaaaaaaaaacacgctactactactactgaagccacgatttgagattattgaatactaaaaagcatagcaagtcctgtagaacaacacaaacatgcagtagaataataactcttgtgaatcagctcaacgtcaactaagctaagcaaaaggatcatctagtaagaagaagcaatataggaatgggttttctcgcatctgatccactgtggcttccccagtgccactactagaaaattcattttcgatgtcataggggatcgattttcacaggcggacaagtaattcggagccaaaaccccgccggcaaaaaaagtacccggggtggagggggcggtccgcctgcgaagatttatctttgcaggcgccgcttatatggccggcttaaaaagatgcctctatatagtcttcttcctccccgagccctgttcattctccccgaagtttctctctcctaaagtgacttaaatatatgggggatgttttgaacttcaaatcttcgggggatttttctacggtacttagatctactcatttccacactaggtatgcaattttttaagcttttagaccttaatttgtgatggatttatgcatgcaaaattgtgaaggaagagctccatgttttttaattttatttcttttgatatgttgatgttagatgtatgtgtaatacttgatgcctcttgttgtagtggtttaatgtggtaacataaattctcaattttttttatttttgctatcacatccacctcttagttctagatctagatctagatcttgtcatatatagggagagaataaaatttttaatgtctatttattcggtgcaatcaaaaaatagttatagtattttgtaatatgccgatgatatgattttgttagattttcctaatgtactaatttggcatgtctgtgtaaaaaaaattgaaataaactttgatttttttattactttacacttaacctttagttaattagttttgaatagcgataagttttttcaataaaccctacaaatttggtattaattgtgcaaatattttacgtgtatttttttagagatatggaaagtcgggaatggatgtatcattggccaaggtttttgtctccatatagaaacaaagtgtctaaatttattggtattgccaagacacacgctgagaagaacaatatgaggaagataatttgtccatgcgctgacagtaagaatgaaatagcctggaactttgacaatgcttttaacgtgaaggagtacttagtaactcgtggatttatggacaagtacgaaatatggacatgtcatggcgaagaacaagtggacgggcctgaaaatgtagttccgacacaagttgaagacatggtgcatgacgatggttctattgtggacaaaatcgacctagaggaaatgttacgtcatgcagaacccgaggtgctgatggggtcggctagagggttaaataactttgaagctttacagaaggcagcaaaggaagttttgtatgatgagtcgaagggctgtgacagtgagttcacaacactccggtcagttcttgaacttatgaggttaaaggcgagacatggatggtctgataccaatttcgacagtttgttagaacttctgcagaaaatgctcctgaggcctaactcactaccatccagcacatatcaagcaaagaaactcatatgccccctttcacttggtgtggaaaagattcatgcgtgcgtaaatcactgcatactatacaagaaagaatacgcttctttagatgaatgtccaataagcggtgctagccggtacaaattgaatagcaatactggcctagaaccgtctgacacaactgagggacgacagagaaaaatcccgcagcttgtgatgtggtaccttcttgtcaaagaccgcattaaacggatatactcaaatctgcgagatgcggaactaatacgctggcatgaagaagggcgcaaaaaggatgggatgattcaacacccgacagatgctcgtcagtggataaactttgatgctcagtacagagagtttgctaaagacccacggaacattagatttgccctgagtactgatggagttaatccttttggagacatgagcagctcatatagtacttggccagtgcttctcaccatgtataatcttcctacctggctctgtcaaaagcgaaaatacgtactactctgtatcctcatacagggaccccgtcagcctgtttttcttttatgttagaggtttgaaactatggccgatagtactaaagggactgaagagaaaggtttagtggagcaagagcagtcccttactattgtggttgctccggaaccaacggtcccaccagaagatagttccggcagcgacgtagctcacgaagacgatgagtactcatcaccaagcgatccttgtccaagcccaagcccgaagagaaggaaaaagggcgacggtgaagaaggcgacaaagactacattccccctaaagaaggggtaagtaaacataatatgtaaactgttcaccgtgataactattagcccgagctaatttgaaactgtcatgtataccttctcgtaggaaacggcgccacggcgatcaaaacggcagttccgtcgcaaattgacgaggtaccagctaacacaaccggctcaaagaaaagcgaacggtcagctaaggcgaagaaaaggaagggcgagagaagcgtgaatagaaaggatgaagggttccatgttgttacccatgtttcgccaaaaggagagccgctcgcctctaagacggcacgtgcgaaattcagttcacagtgtggcataatagtaagggaaaagatccccatcacggtgaaggactgggatcatgtatcgaatggggataaggaagtcctatggaaagagttgaagaaaatcttccagttcccggatggatcagaggcagcagtgaggaattgtgcactgcaaacaatggccaagtcttggcgtggttggaaaaccaccttgaacacaaaatttgtcaagacgggacgcacaccattttcgacgtatgacaacataaccccgaatcagtgggatgactttctgatgttgaagaactccccgaaagaaattcaaaggagccaaagtatgcagagttggccaagaagaacaaatttcctcatcgcttaggctccgcgggatacgcaccaaaggtggagcaatggacaaaagaggaggagaaaatgaggaagaaggggcaaccggtaccaatggaggaatggacacagagatcaaggaactgggtaagagctagaactcctaagatcacgaatgaaggaaaagtattgtttgaagatccggagctgtagagcgttgctgataaaatagagaatttatctagttcacagaagaaaggatttttcaagcctaagagggagaaagatgtgctaagtacggcgctgggtactcctgagcatgggggaagggttcgaggtgtgtcgagaaaaatgagttggaaggaagggttcaaacatgacccccacaagaagcgtgaagcgtacaatgataaacttagagacgaaggggctgcggagtttgaaaggcaaatgatggatttctgcgtcaagcacatgattttgcctcgcctcgaaaccaaagaacctgaaccagattaccccttcgatgacctcaaggagaatacgccctgcagattgcacgttcccattggacgctccgggaaaactcttgaggccgctacaaccattgctatccctgggagaacatacaacgaagagttcatacccaatgcgtatgccaaggtgcagccgcaagtggtccacgaagggtttgagtcctacgacattgacttcctgactgcagatggtgtatccgtacttggggatgcggtcgatcttgtaattctctggcacaataatgacatatcctttggattgggcaccgatgccacggaaaaacctttggtgccaaaaccggggttgggaaaacctctgagacctcctaagaggaaggtgactgataaggcggaggaacccgagatgcaaaaggataatctagtgccggaagtgccaccggagattgtagtgccagaggcagccatggagattccagtgccggaaatgcccatggagattacagtggcagaaccagaggtgcaatttgtggcatcagtcgggtcagaaatagaagaagtaccaggattggaatgggacggtacagagccagaaatatttgaagacccttctcctgcgaaagaccccgaggtgcaagagaccactgtccctaagaaggccactaccagttctgaggtgcctagagtgcttaggagccacgactccaagtccaaagatgagaacaaggagaagttcatggtaaccgtcttcagagggggtaaggaacgtgccaagctcagagatgatgacccctagaagaccgctgaactagccgggccaacatacttcacaaccgatgattgcccggaaaagtaccaacatgggaaagcactcttgcctgaatgggcactgaatgaaggaccatgagagatgaaaaggttacataccttctacatggaggccagcaagaaaggcttgggcaatataacagctcgattaccggcagattgtttcggcgaagaaggttatgtatggctagatttctcagatctccacgccatatgtcgtcgggataagatggacgtcaactatgtcggtgtttggtgcatgtgagtatgagttttaattaattatatgaaaaatatgtacaatacaaatccatgtgattgttactaacaaacttcttctgtaggatgcaatacatggatgctaagaagaaaaaagaacctatcggcttcttggatccaactcggatctgccaaacacaacataccgtgaggctagcaccagagtctgaccagctgaagggcatgaatccaaaagagatagctgaatacaagaaaggcttgcacaaggagaaattgattactgtcgcacagtacattggacaagccttcttgcactttcaaaataagagagtcgtcatggccgcttataattttaagtaagtccggtacatttatcttctacacatatgtcttattttagctggtactaactaactatgctgttgttaatatgtagcgatcattatatctgtttactcatccaccctaaagacggaaccgtggtagtcttggaccctctcgattacagacaccagtcatacaaagaatttctagcaatcttacagtagtaagtgattatgactcttgcatttttatatgaatgtattataaataaatatcctccttaatgtgaaacggtacgacatccatacagtgcgtaccagtattacaagttcaaggatggagaacagacccgaactagggagaagctgctagtacgtacctattggccggtaatactccactcacttaatgtataccaattatttcactaattgcaaattttaactatttttttatgatatgtcctgaagtgtcacaagcaaccgtgaggaacggtcctttgcgggtattacgcttgcgaattccttagagttaacgggaggtacaagactaatgcggaggatgtaagtctctatactatatgctagacagcttcacatatttatgatactaatatattgtttatcttcaatgcatgcagttgccaagattagaacgtcgaacaagctttgacgatacaggcatcaaaaatgtccagcgtgatctgtggcacttcatccaccatgagtgctgccatgtgaaaggagatttcttcgacccagagggtgccctagccacaagtgacgaattcaaggatcttcgggagtggaacagtgctatgccataatgtattaactggatggcgtatttgaagtgacaatgtaaaaaaatattgtaatatatatattttggcaacacttttaagtaatgtaatatatgtacatttatcagtgccaaatgcttgataatcttccaatatatgtacataataatctacctgcaagaatttctattaaataatttaaaagtaatttacgggcaaattattattaaatttcaatattttctacctatcttcgcatgctgaagttttttttttttgcaagcggccgattcctattttcgcaggcggatcagactagccaacgtccgcctgcgaaaattatcttcgcaggcggatggccgccccgcctgcgaagatcggcgatcttcacagtcgttggcttacaggtggacggccgccccacctgcgaagacccttttcggccgcttgcgataatgcttttactagtagtgtgcgatcctttacccaatggagcttctgctgaacctggatggacaaactctcccatgtcttgtgccctgtaacgtcttcaagcaactctgataagctggagtaagtcatcaacaggatctgtgctacgaagaaaagtgtatggagcaccatgtccttggcgcctgctctctggtggtacttcatcatataagcactgtaagcacaattcagaaaacgtgttataactttgtctcagtgttagtaggcaagcagctaaagcaaatgatttgcatcagtaatagaatcacctgtgttgttccaaggcctccacaatcttacccactgctgctcccagagcttcaccttgattgactttgccattgacatccatcactcccgcggcgcgcagctcctcggcaaatcggttggtggcggaggacgggaggggacgctgaggaggcatcagccgcacagaaccatcgccaaacaagagcttgtgcacccttttcagggcagcaacgacagccatcctctccggggatgtcgtcggccccagcagcagccgcacaagccgctcgccggcaagcgcggcgccggcgcgatccagaaatcgagtcttggccgcgtccttcacgccggcgaccgccgacgtggacttggctctgtacacgacgaaggtcgccgcctggagcagaccgccgggcacctccgaagcggtccacctgctcctgccgccgaggctgccaggcatggcccggaaggggacgacccagaccgcagccgctcccctgctgccgccggcggagagagcggacggcagggtccagcggtcggcgacgaggccgccggcgccggggtggtcggtggtggcggtgaaaagagagctctttatcttgacttggacgggaatcggctcgccgaggacgccgaccttgccgcggaacggcacgccgttcaccgccgtcgcctggaacagcgcgccgccgccagctgcctccgaagcggtcctcctgccgccgtggtgctcgacgacgacgacatccttccccttgccaggcatggcccagaacaggacgaccccgaccgcagccgctccactgctgccgccggcggagggagcggtcggcagggtccagcggtcggcgacgaggccgccggcgccggggtggtcggcggcggcggaacgggcggacgctgccccggccgttgcgatggtgcgcgcaaacgacggcactgccgccgtgttgctggccttggccaacacgcggatcattcttcgtcgtcgtcgtcggcggcggcggcggcggcggcggaggattgggaaaaccctaagtagatagtttggcgtgtagcgtagcctgccggcgtgggagaggagggaagtgttttggcgtgggaggtgggagacagtgggatggacaggtgggagacagtggatggactgatgggtgtttggatgggatgtactctctccgttctaaaatataagtatttttaaactctaacacggtttttgagatattatttttgaccaaaaatatctacaataataaaatgttttaaataaaaagatatgtatattatgatagtttgtttaatgataaatctaataacatcaattttacatgattaatcttttttatttttttgtcattaatgattaaagttaaaaatatttgacttgtcactatgctaaaactgcttatattttggaacggaggagggagtaattaattaagtaaatcaacatctatattactatttttctatataaaagttaaaatacatcatttgaacgtaccagcaacaaccaaacaaccacgaaacattaatattttagtgtcatcttaaatcattctacgcaatacagattcatctaacgttctattaagtcaccatgtgtcacattttaaaactagaaaaaattcttagaaattcgagcatcattagtttctacttaaatcgatagcctattattttcaagcactataaacatatcatgtcttgaaaaatagggggaaaatgagaaatctgagaaaaaggacacctgattattggatttcacttaaatcattcacgaaaatagaaatagaaagtcaccttcacctccctcgctcatatgcccacaacactacccacccctctctcttttggcccgaactctacgctcttcattaatcataagctatcaaagtgaaatagtcaatagttataagatacatgtgcgatgtctgatctaacttttattgtattataatgaaaaaaaaatgcaagcatatgcctatattttgttatataagaaatatgaaatttgggaacaatgacccgtgcactatcaataattatcaacacaaattacgtctttatacatcaaagtataaaacagtattttttttttgacggacaacatccctgccctttttacatgtcatccaaagataaaataactatgaaataattcagcaacataggatgcaccatcatatattattctgtaaacataaaaactaaattaaatatacaatgcctaagaaaaatatatcaaataaaaaaatcggtgggacatataccattggccttttacatgtcatccgaattgccataaaagaattataaaataattcaataatacaagttgagccaccatacgttgttttgcaaacatgaattaaattaagaaatgaaactttaactcaaatataaatagtccaaatcacttcataaaaaatccagtggctttagttatagaaaacaaatcgaattactttatgttttttaaaattaatgtggtcaaataattcgagtagcctaagcgctctaaatcatctaatagattttttaaggtaccatctaattgattttagatggtgtttaatgcactttggtatatccgtagatattcaagcatgtattcataataaatcacattaaaaaaatgtgtgcacaattatatttagccctccgattgtattcacgctaggctatagagagcctcgcacactctacataaaacgtccacatataggttatttcccacactatgcaatcactcaacaaactcatgcattcagataggttacattcaattaatagtgagaacctatatcggtcttacatgcttatacaaaaggtagcccatttatttttcaaaaaaatgacataaaatgtgtaacgcaccgtcactatttaacatatcacaaagtttaaacttaaaataagaattgtataaaacaaaacagaaaatagaaaaaaaagggccaatatgaactgcattaattgaactaattggagaaaatcttattatttcttttgattcatacttgcacttaaattgaaacaaccattgccataaccattgcatcattttttttaattaagtgcttagatattaatattttttctctatcctacaccatggtattatgattttctccacatattattgcaagtataagcaaaaatattaaggttacagtatatagttgatttagaagttatattcataactattaaatttaatttttaagggtcaagctgattagatttttctttttaaaagtacaatggatcacacatatcatagggaatcgagacctaggatgtatgtatatatcctctgtcttattcatatataagtagtaattaaagtgcatcaatataaaccaaataaaaggagggctagctaaatggtataaataaaacacatttgttagcaataatagtcttttaagatttgatagagaaaacatagctcctaaacattcattttttttaaaaaaaaacacctactttttaatttacatttaatttgttagatatgttttctgaacaaactaagtctgttatattttaagtgatgaagaagattacatataattgcttaaagaatgattaaatattataccgaaaaagctaacaaacagattaaaattttatctaagcaacacattctacaatacatgcccgcgcaaatgcgtgggctacattcctagtttattaaaactgggatacattacctatacgtataaatgtatccctcatctatttataaacttgtcgatcttcttggctgagcacatattttgaacatcctttttttttctcccagtggagctcgcgtccaaggatttctgtacacatccacatgataccgggcatcacatattcacatcgatgtggagattgctgctccccccccccctcctccgtcaaacagaatcctgtcactattggagaaaccatttgtagtgccggttgggaaccccctgtagtcctggttttctaaccgggactaaagatgcacatctttagtcccgggtgaaataaccgggagtaaagttgactaaagagagggtagcgccgtcccggttggtccccttttcttttcttttttcattgtttctttgctacttgctagggttaatcaaaccccaaatccccaaatcaatgtaacatcccaaatcattcacatcataaatcctaagttacttatacacacaaatcaaatacatcacaaatcttaaaaaatttacacacaaatcaaatacatcacagatcaattatacatctataaatcacaaattatcaaaaaaaagaaagaaaaaaaacgacagaggagaactagcgcgctgtcgcccgccatggatgctgctcgccacggccagcgcctgccacctgcggccccgccggcgccgccacgcgctgccccgccagtcgccgccgggcgcggccccgccagctgccgctgcgcgctaccccgcaggccgcttgcccgccgccgccggccgccggatgggaggaaaggggaggagaggaggaagggaggaggagaagggaggggaggggaggagaaaggggaggagatccgaggggtaggaggtgaggggatgatttgatcttatctaaatatctcggtgaggagtaaagtctcgtctgggacttaaccgatcagagatgggagagaaatatttactccctccaaccgggactaaagatagatttttaatcccggttggtattatcaaccgggattaaagatctaaccaaccgggactaaagtggtgatctttactccactaaagatcctcgacctcctgacaagcctctgataggggatgaatcgagactaaaaataatatttagttaatgtggaaaacaaccaacctagcaaagatcactcttcccagtagtgtgtgcttgctttccctctcctcgatccccgtcacctgggcatgcatcgcgactgatggagtgcatcgccagaagctagctagcccacgcgctggctgcttcttcctgggttaagccacaacttgcaaaccatggctcacggttatggcgctcgtggagacgtggttgctcatggccgcagttgggggcaacagcggcgaggctcgtgcacggccatggaagcacatggggataatatgacggtggtgcactgcatggaacggagtttactggtagtgactgacttgtatggttcttggcgtgcgtggagtgagcatatctagtgctatatatacaccgtacgtacatttccgagcacatacggtctgcatgcgatggacggaccgggtacgtactactgttacactccaccatttctgattctgagcaaaactcctgctctgtgcggtatacagcataggattaattagaacattgagaggataggtgaactattagcgtataattaatagagtatcaattatttcaaattcaaaatatattagtttgaaattttaaaataactttcctacagaaaatattggtaaaacacaaaacgtttagtttttttctcgatcagttgttgccgaacgcagccggattatctgatttttttttcagcttgtagctatttgaaggtactactatgaacatgccctcatattcgagaggaatgaggagtactatgagatatttcaaaacatggccaatatgtaatggatatatacaatggcgaatctaagatgaaaatagagatggtgctaatgcatagagctaaaaatataactcagtactagaaatcatatttcctgaaaaatatgaacttaaaaatatccatgtttcattttggaaaaacatgtatgctcagttgaattaaaccctccaattaatgtgccctaatcagatacaaaccaagagctccttgtagatggtaatatctgtgttgtcttgtcctcgccagtttggtaattgaattggtaattgtcctcaccggtttggtaattgaattgggcttggtatagcatttagcaattaataaacactggataacagattgagcactaatcaaaccgcagagctataggcaagttttcttcctctctagtcgctgcaggccccaacatgtatactctaactgtcccagtgtcttctactagctttgaacttattgggagaacacttggggctagaagctggagctagggcttgcgctccaacaagcccaacagtgaatccgcccctggatatatacatagcaaaaagaaacttttggaaaaagacaaaaaaacaactctcttgatagtatgttgtgatgcacatttgatcaatgtatgcttttaacttgttatttttagggtattttaaaaatatatatacaagttagataacctatataaaaattctagatatgttagtgaataaagttcatttgtatttctagtacaccgtattaatagagagcaactagtgtggatcaagtacaaagctaaaaatacaagattacaaccctggagggtcgtaaccaggaaaaaagaaaaaatataccaccacccacacaccgacaacgccaacacataacccgggagaagactagcaccggaccggccgccgctaagcgtgaccgaccgccgctagaccaacaaaggtacacagacgagatcgccccctaggggatgctaaaacgacgtcttcaaaaagagaagcgacggaaaaaccaccgccgccgtccgtcggggctcaaagaagccaaagactaggctttcgcccggcaaccacccttagggggtgagacagcacgacaacgccctcaggattttcacccgccgctcaccacctgcgaatccacggctgacgcaccgatgctccatcaccactcaagctctactgacatgtgggacccctacaccgatgtcttccgctggtcagccttcgagcgccgaagaccacgcacacccactggcaactcctcctcacaccgaggtcacctcctccaccaccggccgcgcctctcgcgctaagccggcctccttcaccggacgcgcctcttgcgccgatctagcctccctccatcagccgcgcctctcacgccaagccggcctccatctccgccgcccgcgcctctcgcgccgagccggcctccgctaccatcggctgcgccactctgcgccaagccggtctccgacccctcctccaaacgataccgcactgaccagatgcaaccgtctgccacaccctcagctagccgtccgaggccgccatgcctccggtgaccgcagtcaccgccaccgcagccgctgctgccgaacacaccaccgtgcctcctcccaccgtgccacagcagtcaccggtcagccgctgacaccaccgctgcgccgagctccgaggcctcagcctccgcaccgtcagccacagccgccgccaccacgtgtgttgccgcggctgcctcaaaccacaaccgcggcagccaccggcaccgccgccgtcgagcctcgcgccgccgtcgccgccatgttgccgttgtcgctcgccccgctgccgcccggcccggcggcgcgagctccgtctcccgcgcacatgtcctcgccgcggcagctgccgccagcagccgtgcaagcgtcgtcaccgccgcctccgctgccaacgccgcgccgttgccgccgccttgtcgcgccggtgctgccgcccttcacgcgccgccgcgccacggccttgtccgccaccaaccacacaccctccggccggatccggccaggagatggccagatccgacgaaggtggcgccggatccgccgtctcctcgctgggat

SEQ ID NO: 4578 - DNA, 5139 bp, Oryza sativa
aaaactttcctgcacacacaaacttccaacttttccatcacattgttccaatttcaatcaaacttccaattgtagcgttaactaaacacacccgtacacaaagcatagcaacagattaaattcctaaaagattggacaggacacgagcaactgcagtcatacacaaaccacaacaaatgggcaaacagatcctcagcttcggatgatgatttgtattaaaagcagacgattttcagcacggtaaacataaattcagaggttcaaattttgctcatatctccctggctcgcacttgaaaagaattcttatctcctagcaagacctagaaccaagcataaattaaagcaaaaggtacagaatgtcgagcacacgttctgggataaacaaaataagcccttgtttagttctagctttttcgtcacatcaaacgtttctacacacacaaacttataacttttccggcacatcattccaatttttttgaactttcaattttagcgtggaactaaacatagcctaactatttatgtgaataaaacagaaagaaacgcaagaatttataggcctggtttagttcttactcctgctgaatgaagaggactttcattgccttgatgatatcgttgtctgcgtacacacccaggtctccagctccatccttcacagccttgctggccttcacagtgagcacgcgagggcgaagaagaagatgaaggcgcctccacgacggacatgtcggcggcggtggccacccgcggcatggtggaaccatcgccccggtagatccttgccaggcgagccaaagcgatgtgggccctttgggatcccaccatgacgcgtcgaagcgccacggccaccccgacgatcttggcgcgcacggcggcgaggacggtcgacttgccggtggcggtggcgaggcccctgctgcagacggcagcgagggcggtcgacttggcggcggtggcggaggcggcggtggcgaggcccctgctgcagacggcggcgagggcggtcgacttggggccggtggcggcggcggcggtggcgaggccccagctgcagcctgccgcggccgatggagagcgcagggtgggggtgttgccgggcaacagcggcagcttgggcgctgcaggtccggccttgctgcagctaccggcgacggtggtggcccagatgcagcctgccgcggccgagggagcgttcttggtctgccggtcgacgagttggtggtggatgctcctcttggtggcggcaactgcagggcctggacggaggacggtgagcagggtcgagggccgcctcaacctgccggcgatgaacccgagcatggcggcggggtggattcgcggcggcgcggcgggatggagacgggaaccctagcgcgcggcttcgagtgacgacacgagacgagaggaagggtagctttgctgtgcgtgcttgctgtcaaactcgccacacgcgctaatcacaattaccacccatcattgtcttaaacattttttttctaatattagattactcctactgtactaaatagtactccccccgtcccaaaatataagggattttgagttttttgttgcactattttgactactcgtcttattcaaaaaatttatgcaaatataaaaaacgaaaaattgtgcttaaagtattttagataataaagtaagtcaaaaataataataattttaaatttttttaaataagacgagtgttcaaatagtgcaagcaaaaactcaaaatcccttatattattgctattaaacctttgatgtttgacaacataggaatataaaatatacagtaatgtaatttcatgccacaacaaacccttcctatagaaaatgaatccacgtgatttttccaaaaaaggaaaaatgtttggtagttccataggaaaaggataggcattgcgagtcacacggaaagaaaaaacatgagatcgatctaaaggagccatgttagttgccctccaaaatttcattggaataagccatttcataggttatcctagtcttcctttgttccaatgagccattctggaatattttctagcgcattcataattcctattctttttgttggttctaaaggagcccttgactccttgaggcaagtgtgtagtgacacacgagtaagtaaggacattaaattcatatattagagaataccttcaagtgatgttatattaatgttataagtataattaatggaaggtgagaaattggtcaaagtacaacaaacaaagatcgtacgtaaactaatacacttgatatatttttgggacgggacggagggaagatgtgctattgtcgtatcgatcgaattcctgctttatatttcaaaccttaatctttttcttctttctgttagtactattttctttaaaaaaaatatttatttttattattatatatatagatgtatccatgtttgtaaaaataccaagggtgaatttaggagccacacccacaaaactgggtggctcgttggcgcataattaatttagtattctttccgttccaaaatgttaaaacctattaggataagttccatttgaatttggatggaagaagtattatctgtaaagaaaacttaaaaataggttggtgtgatttttttaaaatcaaattttatgtaaatattttgttgaaagaaaaatgtaccgttttgtttaaaactaacgtgggaggtataaaagtgaggtgagggtagaagttgagtgtatcccttctttagatcttaaaaaattttaggcaaaaacgtcacatcaaatgtttggacacatgcatagggtattaaatgtggaaaaaaaaaactaattgcacagtttgtatgtgtaaattgagagacgaatcttttaagcctaatcacaccatgatttgataatatgatgctctagtaaacatttactaatgacagattaattaggcttaataaattcatctcgcagtttacaacgtggaatctgtaattgtaatttgttttattattagtctacgtgttcgtatactttaaaaacttacaaaggttctataggctggctgccaggcccctttccaaacaccactttaagatctttcaccatagcaaacactgttttaccgctgcgatgttttggcttcgtacggtggtccgccgtatgttcaaagtgcttgcctttcttccgtactgggtggtttgctgcaaggaatcgatgatgacccatgtacacaaccttccgacagtgcttaagatacgtactttttgtttcatccatacagtgtgtgcaagccttgtaccccttgttggactgcccggataggttgctaagtgcaggccaatcgttgatggttacgaacagcagcgctcgtacgttaaactcctcctgtttgtcctcgtcccacacggggacaccttccttcttccacaacagtttaagatcttcgaccagtggtcttaggtatacgtcgatgtcgttaccaggttgcttggggccttgaataataatcggcattattatgtacttcctcttcatgcatagccaaggggggaggttgtagatacacatcataacgggccaagtgctatggccgctgctcatctctccaaaaggattcatgtcatccgcacttaaaccaaaccgtatgtttcgtacgtcctttccaaagtctttaaattttctgtcgatgtttcaccactgcgaaccatcggcggggtgtctcagcatcccgtcctgttgacgttcttcagcgtgccaacgcatcattctagcattccccttgtttctgaacaaacgccttagccgtggtattatagggaaataccacatcaccttagcaggaattctcttcttcgttagctgcccgtcaaccttacctggatcatcttgtctaatcttgtatcgtagtgctttacaaatagggcatgcttctaggctctcgtactcctcaccgcgatataggatacaatcattcggacatgcgtgaatcttctgaacttccagtcctagagggcagactatcttcttagcctcgtacgttgtcccgggtaatttgttttcctccggaagaatgttcttgacgagtttcaataaatcgccaaatgccttgtcactaacaccatcttttgccttctattgtaagaacttcagagtggtatccaactttttgtgcccctgctcgcaacctgggtacaacgacgttctgtggtcctctaacatccgctccaatttatgggaccccttttcactttcacagtcctcctttgcgtcctgcaacatctgaccaagatcatctgcagcgtcattatcgccagcatccctgtccacctcgtccgtttgattttcttcaaatccagcgtactgagcccagtcgggaatgttctcgtcctccgcttcaccttcttccatttcaacctcttgctcactgtgggatgtccaacaattatagcttggcatgaaccccaactcaaacaagtggaaatgaatagtcctggatgcagaatattccttctggttcttacacttattgcatggacaacaaataaaaccgttacgcttgttagcttcggccactctcaaaaaataatgcacgccctcgataaactctttggaccgccggtcaacgtacatccattgccgatccatctacatgaaatgaaaaaaaattgtacataaataaattttcgtacaataatgacagtcaaacagtaatgataaaataattaaaaactctttcgacaagcaattcttattaacaatttttgaagttctaaactaatattaatgttgtacttctcttaattttcaatttagtttgttttctattttttaagtaattttcatcatattttaaactatgagaataaaatttctatatattcttcttccccacacaaattttctctctcatcaacttacaacaaagttttggagaaaaaaaatgtgtgaaacatagctccaaaagtaatataacaacaaaaaaaaatcttggatgatgaagttactaaccttttagacacctccgatttgtatataatcactaaaagaatttcacaacatattttggcatgacctcccctctttctttgagaaattttgaagcttgctctcgggctggaggaggaagaaggcatatataaagggggggatctctc

SEQ ID NO: 4579 - DNA, 36496 bp, Oryza sativa
gggactaaagatcccgggggccctgacaacgtctgacatctctacaactgggactaaagatgatctataccaactgggactaaagatcacatatgaccgttgtagccaccaatcaggactaaagatccggttttaaatggatccgggattattgtggatttcggccgaccgaccaaagatggtttctccaccagtgcttgctccgtctccacccaccctttcctctttcgctctccgcctactccgcttagggcagtagcaatgcaaagccatccttctgtgtcttctgttattccctactatcgccgtgtttagatgctgtaaaaatttggctaattttcttttatgtacacagacacatattttaagtattaaacgtagactaataacaaaacaaattactgatttcgactgtaaactgtgagatgaatcttttgagcgtaattgatccgtcattagcacatgtatgttactgtagcacttatggttaatcacgatgtaattagacttaaaagattcgtctcacgatttatagttggactgtgcaattaatttttctttttgttcacatttgatgctccatacatgtgtccaaacatttgatgtgatgaaaaagttggaatctaaacacagcttatacacagtgggcgttatctgttttggcacaatgcaagttaccaaggttagcattgatatcccaggccaaggaatatgttccccaactacccctttgttctcctcgacgcatcgcctccccacccacttcatctcccaatcccccgctttttcccccagttcgtgatgatgctgctccgacggagacggcggcggcagcggcggcggtgatggtggtgaaggtgtgcgaccacgacggggcccaaggaacggttctttcgacggccgccggcacggcggccgcacacgcctcaggcgagtcctgcaactgccgctacgtcggctgcctcgccacgtcctcgccgccctgccattgcttctcgtcgcggtctgcggtctgcccctgggacttctccagcagagacagcgaggcgggagcgaggtcacacatggagccgaactagcgtgagaggaatagaggaatacctctctctttttctttcttatctcatgtcctagctctcccctcctcctagatccagttctcccctctccctcaacatcttcttcctctttcaattcgacgggaggggtagcggccgcggcaaggggagcccgtgggcagagtttctcccacagttggcggtagcagagctcgggtcgtgggcggcggatgatgtgctattttttggtcgtgtggatgtgtgccgatggaggtgaaccaatgcgatgcaattcgctgagatgccggctggtgcggctgtgcaagccgctcatatattctcccttcgtctcataatgtaaggtattttgactttttgtttatactgtttgaccattcgtcttattaaaaaaaatttagaattattgtttattttatttgtgacttatttattatccaaagtattttaagcacaactttttattttttatatttgcataatttggtcaaacagtgcaagaaaaaaaattaaaatttcttatattataggacggatggagtatgtcaggggacgtcgatcaaagtccgaccccgtgcaaacagctagtagtagatgatctcgtgcatgtgcaccgtgcacgcgtacggggtggcggcggttattttgttgaattgaatcgccccttgccgagctgaccgacgtctctgccatagtgccatccgcgacgatatatcgatcggcggcaaggccgtctccagatatttggggccaccgaacgaaatgctaattggatcctaaattttgaaaattttatataactaatataaacaaagcatactttcaatcaactatataactttaatatgtgttattttatacaaatattaatgctaaaagagaaaaggtagtactactgatctcatgttgtactgaaaagtgaaaagcatcatccttctagtgtttcttggaatgaaatcttaaattatatcttcataattaatatcgagattgagctgctgcatctagcctgtctcttcctacgtttttcagcacctgaatcatactttctgtttctagaagtgatgaagtgatgaggaattaaagcaattgaggaaataaaagccttcctgagttcctgttttataaacaaaataaagaaaaagacatatgtcgtatacatacatacatacatacatacatacatacagtatacacacttgattagagaatcagagatgactagataagatgagatcagatgaaagtctagttcgttcgtcaaattacttgatgatcaaactccctttgattcatagaattggaaaaggattttcataggattcaaatttctatggatcttttttctacatgtccctttgatttatagaaaagaaaggaaactacaatcctatgctttccatttcataggaaaaatagcaagagatgtgacctctttgtgaacttttctttatttttcctatagcactatcaaagactcctattgtttttcttgtgttcgctaattcctataggatttgagaaacctactactttaattcttgtgtttttttttattcctgtgttttttctatcctgcgaatcaaagggccctcagtctggttgccaggggcgccctcgccggctcgcgcttgctggttgccggcttgccgcgcgcgaccgcatgccggagttagccacgccgccgctgccgctcgatcggcgctcgcccgctcgattggccggcgattgttgtgctgtctgcctgcgcgtgcgctgcagcctcgcgtcctccctgcctcggctgctcagtccattgtccacgcctccatggccatccaacagaccaacacagcaacttaacactaaacgctcgcgagttggagtcggtgaatcgcggcgacgcctcgactaacgcatgcatgctgcgagcgatcaccaatcaccgcgcgcttgagatgaaaacaaggcaactacgctcgcgagacgcgacgcgacgcctcggactgcaaacttccgccgttctcgcacacccccatcgacggccctgatcggcggtcgatctggtggctgtggtgcacggcgatccagcgacgccgcgcgactcgggtctccagcctccaactgccactacccgaccgacaaaacctcggactcgtctcctgcgaaaagctaattaatccctcggtaaaaaaaaaattggatgtgacatattcttgtatatacaatgaatatggataaatgactagtttagtttccaacttttatttttaaactttcaactttttcatcacatcaaaactttcctacacacaaacttccaactttccgtcacatcattctaatttcaatcaaactttcaattttgtcgtgaactaaacactctcgtatattggttttttatactaaatccgtcctaaaatgtaaacatttttagctataaatttaaacatttacattttggaacggagggagtaacatatgatcttgagcatcaagcacgtaggagtactggagtagtaagctggcgaagaaccaccgatcgaggatctgcttgagttcacgcccgcatgcagtcaccgtctagcttgacgtagggtttaccagaccttacgaaattttttttttaaaaaaagtaaatcggacttaccaagccaaatatcacttggtttaatttgcgattatgctttaaaaatcaaattgaattttaatttgtcgataattaaattagttttttttcccatgcacgcactgtcctgcgttaggttaatattatactgtcgctcggcgtcgttcaggaattaattcgttgtcctctcgaacgaataatttctttacgtctgatgcaacgacatacaatattaatgagagagatgcctgcatataattacttatactgaccggaggatctggtctctgtttttcactagtaaaagagattatcatggacaaccttttttttcgtaggtgccaggcggggctaaaaatttttttttggttcccagtaatataaagaccaattatgaaaattctttttctcaggtgaacctattaagaggcccgcctagctgcaaggtcaacctctcgtcctctcttccctctcaatatttttaaaagttaataagtcacccatacttatatcctcagctcctctctctctcctgctcacaaactcatcacctgctctttctcgcatggtagtttgaataacatgctaatgaaaactatggtaaaatatatatcttagttagaaactaacaggggcctaagtattgggtgcatggagactataaatataactatctcatttgaaacaaatagaaaaaaaatgcttaagacttttagatggagaaagtactgacatagcacctactcttatttgctatagtaatttggtttagcacacattaattaaggcctagttaaaatgcatgatctatactcctttaaaatcagtaatttgtggtgggagcgaatctgccattccacctaatttcattgcaaattttacaactcacctcttcaactttttaatactaagaatcaatcaaatctaaatgggacatataaaatcgaattgaagtaatcattcccaataggaaaaagatgtgtaacccacactattatcgtaaattttcttttatccatatcaaaacaccgaaaacacacagagttgaagtactagcatgagtgtgtttcatcaactctacaatattaattaaaaacacagaaaaaacgagaagaggtgccttggttgcatcactgacaaattgaattagaagaaagttttcataagggtttaatctcttgcttatttttctatgaatttgagtaggaacacgatccaataaaaaattttctgtcatgcatgttttctatgaatcttaggtgtatctagaaaaaagaccagaaaatttaaatctactcaaaatcctttggctgtgtttagttacacatcaaaattgaaagtttaaagaaattgaaatgatgtgacggaaaagttagaagtttgtgtgcgtagaaagttcgatgtgatgaaaaaaataaaagtttgaagaaaaaaaagttgaaatcaggacctttgccaaatctttcatttcaaatgctcacagtagcaataaaatattgcatgaatgttcatgtcaagtttatactcatcacacgcacagtaatctagtcagacatgcataccttgagcagctgccccctgccctgcatggtgactggagtaatagaggggtgtttagattaggggtggaaagttttggagtatcacatcagatatacgggcacatatttaaagtattaaacgtagtctaataataaaacaaattacataatctgtctgtaaattgtgagatgaatatattaagcctaattaattcgttattagcaaatgtttactgtagcaccatattatcaaatcatgaaacaattaggcttaaaagattcgtctcgtaaattagtcgcaatttatgtaattagttattttttagcctatatttaatattttatgcgagtattcaaacattccatgtgatagggtaaaaaaatttgagagggatttaaacagggcctagatgatgatgagtgtggcagacaagagtggatctgatatgggtgccacagtggctataagctcccttgggagttgttgcttgcttgcttcggtcggatgattgatttacaccatgccctagccctgcccaagcatatgcctattgctagtcactctactccgagagcgagcaagcaacaattcgtgtaaaaatctatcgcgctagtgaggccttgtttatataaaaaaaaatttctcaaaaacatcacatcaaatatttagacatatacataggataataaatgtgagaaaaaatcaattgcacagtttacatgtaaattacgagacgaatcttttgagcctaattagtaattacgcaatgatttgataatgtaatgctacagtaaacatttgctaataacggattaactaggcttaataaatttgtctcacagtttacaggcgaatctgtaatttgtattattagtctacgtttaataatttaaatatgtgtccatatatctaaaaactttaagccgaataaaagtgaacacacccttactccttagagtctactctactatgtggctcgccatgctccaatgcgtcatgactataggaactagcaatagatttcgtacgaaattacgaatactagtagcgaagctcgttctagctgttccttaatttggatttggaggatttctcatgaaaactttagattattggagttcacaaggattttatacttgcatgcacgctcttttggactagaagaataatgccctgttctttctatatatttcgtcggattatattttatccacagttctagaaatatgttttcttagaaaaaaaaactttctctaccgtatcgttgggattaatttttctatactatacaaatttatttacaaaaatatataatttatctctattatcaaatagataatccgatgtaataattcggtaaataatatgggcctaagcttgataaagcttatgaaatagtttaatttcctaccctttcatttcaaaggaaaacaaagtttatttcgtgcgaaccatccagcgtcattacctcaaatattcttgtgtttcaaaaatcatgtgggcttctgatcgttttgcctgtgactcaaattgcagaaaaacagcatgtacacaattaaaaaaaattgcagggtaaattttgtaaatcaactaaaaatatcgagttttaaaatttaaattttagccacggctgataagtactcccttcatcccaaaatattataatttgtagcccttaaggtttgtcctaaatataataaattattcacaatattctcttcccaccaaatcacaacctatttttcacctacctcctcttctcatacatttataacattttcctatttaattttacgtactttcttaataccatatccaactctaaaaatctttatattctggaataagcagcagaaagcaaaacaacgaggacattggtattcaaaaaagcatggcatttaattcctgcatttttctattcatttttttaataatggaatgagtcagcctttgctcaagagctacagccaactattacagaattcacacaaaagaaactcacacctaaagttcacaattgcaaaaacaaaacaaatggcaagcacaaactagtagacaccaacacaagataaagatcctataactatagaattttattagagaacctccatccaaagttggcaaaaagttacatgatcgtcgtctcaaatttacgacttacatcatttataaaaaaaaattacattttcctattcatgttcctgtgaatcatgcattacaaagaagctctcaaacatgtacattatctattacggagtgtttagattttaggcgaagtctcttctctaaataaattatcctaacaaaaagaataaaaaaatacatgaaataaacttatagtcactcataaaaactttaaaaatacatgaaaagagaatttcaataaaataaaaccatatataatagataaattgtaacttaaaagaaccgaagctagctagcccgcccatgaaatctagcaattccctaggatatttttattttaaaaaaatcggtgttccatgttcacgctgggctctagggttgaaaaaaaaaacaggaatagataaaacatacgaatatggtaagattgtggatgtaaagcggtcactactacagaaagggacatataattaagtcggcactataggtgatggaaatggtataaccttcgtcctaaacatgtgcccgcaaggacaccaatggcaagaatcagcacctaagagcccacaaggacaccaatagcaagaaccggcacctttgtatataaataggtgccggtttttaattggaactgacacatattttttgtcagagaaagatgctggttccagctaaaaaccgacacatatatgactgtcagtcataggtgttgttccgagctgataaatcgacacttttatgcggattgagccaatcttatccaatcgaatcaaacgaaccttttttttcgccacccttactttttttgtctcccttatctcctccttttcttcacccacacatctttgtcttttcgcctctctttttctccgccttctctctctccaccggcatggaggcggcggctgctccccctacccggtgttgcggcagcggctgctgctgctccccctccctggcgtggcggtggctggtgctgcttcctccctccccctccccccagcgtggcgatggcagctgctactgctctcccttcccggcggtgctgctcccccccttccctgacatggagccgacggtggttctcaccagcatggcaacaatttgatttgtgaatattttgtggggattttatgatttgggatgttgattcagtaaccactgaaggaaaggaattgcttcctatgatttgcctatggccaattcctgcatccaaaggcatgaacagtaaaacatcctatgggatttgcaatcctatcttgttccatcaaaaaaggaccttggttgaaaatggcatcttaattctccattctctggctctatatttgtgaagtcacgtattcacgaaaatgtcatcaggggctccttttgaacaatgggaaactaaggaattttggagaactagattcctatggaaaaatttcgtatgtgctcctttggaacaaaagaatatgtcttccaaatcatttaaagtccctatgaaatgggccatttcatatgtaggaatttcgaaagaaaactagcattatcatattttcttattcctatggcacaaagttaactttgtaacttttttcgctgtgtcatccaaacaacagtttcgaagcattcctatatatattattaatgtccataagaattcaattagcataacactttttccccgtgtcttttatctttctttgtttttagaataccgtgttctaaatgagccctacatgtctaaaactagcttgtaggaggcatatccttataatcattaaacatggtgaatcgttaaatgacttaaaaatgctacaaaatgaatcaaaaagagaaaaaacatatactaaaattatgtttttaaagtttaagttttagctattgagcaatcgtctagcgtggctggcctcggccagaaacaagctgccatacatagtctgctcctcgtactctagggctacctaggggaggacaggaggagtacgtggtgggatcctctgtgcagttgagtcacttacatgtggaccatagtaaaatgggacccacatatcagtgactcaactgcatatgcagtaagtcagaagatctgctttcggaggagtactagcagcagctataggccacctccccccacccatccaaaaaaataaaaataaaatcggccgtatctacaggtactgctagtctactactactccaactagttccatgcatatacagactagtatccatactctaccagcttgttagtagtagtatgttctctctcttttttttttcttttttcccaattagtttcatacccttaactttagtctagatttacaaattaattagtatttcctccgtttcatattataagactttctagcattgtccatattctatagatgttaattaatctagacataacatctatatgaatatggacaatgctagaaagttctagacataacatctatatgaatatggacaatgctagaaagtcttataatataaaacggagggagtactgcttaattaattgcacatgcatagaatttcccgttcctctacttgaatcttcgtgtacctccccaaacggagacaaccattattattattattattactaggtgattccccgtgctttactgcaggaattactaaccatttctcaatatattttttcaacaatcaagctagaagtaaaaaggaaaaaaataaatattagggtttttccatacatatcatgaaacaaacaaatgatacccgttctttaatgtgaagcatattgataattatatgttaaatattatagaaataaaaaataaatttgttaaaatattgtgcaaatgatatgaggggtgatgattggatatacttgcatgttaatttgtagaattgaataaattgtagatgatgttgtatgcttgcatgaggttaaatatgtaattattgctagtagatgatgatgtggcatggttgcatgttgagctttagagatgattgggtatgcttgcatgttgatttgtagaattgaataaattgtagatgatgtatgtttgcatgaggttaaatatgtaattattgctagtgggttatgatgtggcatggttgcatgttaagctttggacttagcgggctatagctttatagaaagtgttataaaaccagccccgaaattaacatcggtagctaaacgtggaagaagcgccataggagatccaaacacaatgacgacaccgaggcacgatatttggtaatggagttcaaccaaggcctacatctctggggcactggttacgagcgctcctccccgatcagcatatacaacgtatcagagttacaatgactcacggctggacgctgccagcagccgctccctctcgctatactaagtcgccatgcggttacaataggcacccctctctatttaagagagaccctaggagagagtccgactcttactctagtcctaatacctattacaactccaagtcctaaactgtagctgactttgtacacatattcgacacaaactctaacaaactccaccttggcgaatatgccatgccaacctgaatttgttccttgcgcgaacctccgtgtacccggacttgagtcgatcctttttcgccactcacgcatttctaccccgacaagcctctaccaggctcaccgtaaacaagagacttcactatccttgcgatttcttccttttgactccacctgcaacagtgctccaccttctctcgtatcaccacagttgtcttgccaagcgaaattgaattccttcctagctttcacatcatagacttcttaaagaccatgttcaactccatctaccgtcttaaatttgacttgatctaatccatggccagataacccacgtcaccaccaaatagataaatcaaactcaccagacttgaagagaaccctttcttccttgtcgtcttatgaaccgagctaataaatctaacatccatgctttcccgcatccgtagactgaattcctaataatctgggaaaatcaccgttgctttgaatcatccgaagaaattaccaccatagcgctcactcttcctcttcagcgacgcatatttcatatatccccatcatgcaaaccccacagatcctggatatatcctgtactgccaaacagtccgttgatacccttaacgttttcacccgttgttgtccaggatttttccttcacacacctttgccacactcctgccccaccacagccttgccttcgaatcataatgcagaagccctgatgcacagttatttttgttgtcaatccatgatctcaatctagccctagacgaaatgtccatgtgagtgatcaactcggcttggtgaacgagtcccattgaaatacgtgtccaatcccagccacctagcctccgtgctgatctccacgtccatcacgactccaagttgagaagcaactccgcaaccgaatcgacctccaacagctacacaaactgtacatcatccgcgaccctgattcgatccgataccaagaacttgctgctccatgcatggacctaagcacaatgggcctccctgccgcgcgcatgcacctatggatcattacatgcatttaactaatgtaccagcatgcatgcatgcaaaattagttaaccatgcatcgctaatcatgcatgacagcatatcaccgtgccatccaattgtgcttctggcctcctctgtgtgctgctcctttgcgtgccgtcgccgcctccgctgaccggagccggcccgcgccgaatactgtcagcacctacacaacaaccacaccatgccgtgttcctgctgtccggatttcgtcaccaataaatccgctctgacctccgattgaccaccgtcaatctagttgcaagcggaagccgacaaatcgcatgtcgtctttccagtcgccgaatgacccgagcgttacgtctagccgtctccctgtcgaacacaactcatcgaaagacccgggccagccctcccggagtgttcgattccaccgaccgagaacgtcgattgcctccagcttcaatcaaccccgagcgtgtggccacatgtctccctgttgagagtagctcaccggaaagttcgagccacccgcccgaagtgtccgacccacagattggttcaccaatcgcttccgccgccatcaacccgagcaccacatctggtcgtctccttgttgaaagcaaccatcaaactgttcagactgccgtctgaagtatccgattccatcgatcaaattccgttgatcgccaccatgttccacctagcgtccatgtccgtttcttgacaccctgtgtagttgtcgcagcatggagcacctcactcgtacctctaccatggatctcccgcatgctttgataccacttgttataaaaccaaccccgaaattgacatcagtagctaaacgcagaagaaatgccataggagatccaaacacaatgacgacaccaagacacgatatttggcacggagttcagctgaggcctacatctccggggcactgattacgggcgctcctccctgattagcatatataacatatcagagttacaacgactcacggccagacgccgccggcagccgctccctctcgctatgttaagtcgccatgcggttataacaggcacacctctgtatttaagagagagatcctaggatagagtccgactcatactttagtcctaatacctattacaactccaagtcctaaattgtaaccgactttatacatataaccgacacaaactcttacagaaagtatagattgcgtggtgatagattcaggcatctctccaaatttactatggtaggtttatatctcatcctaagcttaggttgatttattttgaaaccgagagagagtagactatatatatatgcatggaaattaaaaagaaatgccatgtgtacttagaacaagtacattcaattttctccctcgttcgaccgccatgttttcaaacatggatctcacaacctaaatcggaatttctaacctgcataaagatgacgcaaattccagtaaccctcccgatcgaaataaaataaaatacagggtttgacaatatttatcacacctcgcttcaattgtagatatatatttgatgtttacgataagacttgttcaaatttttggagcttaattttaccattacttttatattagaaaaagttccgtattacccttagactttctttctctactccttggtctgctcttttttcttggtgtcagtagttgttatgcaattcttttttctcgatgatgtgatttttgttctgtcagatagtttttgtatgaaataacattggttaatttgagggaggaggatgaagatagatacactgtgtcactgctgaatatcattccaattctgactcgtcccaaaatttgcacttcatctctttttgcagctcttgtttattatcttgttatatttcgtggaattttgcatgctgttctcctctttcatttcttctttggtgatttccaaactaacaacttgaatcgatactaaactgacgcccagtcatgaggatccgtgcatgcagtgtctagggacactgctgaatgtcgttccaattctgactcctcccaaaatttgtttatttcagtatcttgttgatttatttcgtggaatcatgcatgttgtcctcctctttcctttcatctttgctgattaatctttcagtatccaaattaatcaggatttgctcagcagaaagaaaccaattagctcttgcctcttgaagcctatgtgaaagctcatgtaattttgcagttgcaaaaatgtacaactttcaggtgacaaaaaatggcatagggatgtacaaaataaacattaagaggaaaaggtttcgtgtttagaactttaaaaccaagcaatcaaaaacattttcttcctcgaagatccaacaacaaagctctgcatcaagaaacattccattggttgacagaaacaaaattaagctagataagcactgattccacgcacaatttacatgatcattacatcgtccatcacacaggcactcatgcatcgattacacataggagtattgattcgtgtgactagcttaatgaatttgattagccgatgatctggtccaggacgccgatgttcttgaggccgaggacgacgccgacgcccatgatgtggccgacggcgccgcaggccagcgtgtcggcgagcgtgaacccggcggggtcgccggtctgcaggccggagtcgcgcgcctccagcttcagccccgccgtcgacttcctgttcgccgacggcgccagcccgaacctccccgcgaacagcatcagcgtcgtcgtcgtcaccatgatctgcatcgcccccccaaataaattgcccatcacattccattcacatcaagcctaatcacgtcgttgaattcagctaattaaccacactgataaattaattcagtgtgtgtgttcttacaacgttggtggctgagccgatgtagtcgcaccggatgccctgggacctcttcttgctcatcctcaacgatggcagcgtcacctgtgattaatcaagaaccagggacaattaggaatgtgtaattgtatgcatctctagttatacttttcgttacaaaggaaaataatttgatagcattggatcatagaaggaactgaccatggacctaggagaggagtaggtccggaggccatggaactgcggcacggatgtggcggcggagagctgggaagccatggctggagcctaccttctccttctccttgcagctgagtttcgaggaaaaaaataatgtcaagtgccaccatggagatgcattgggctttaattcttggaggagatgtggaatgggagccacaaggggagcttgtggactgcagtggccactcatggataggttacagatccttgctgctgatgtggcatctcctggttagagcctgccaatgtggataagatgctcacctctgcatgcaatgttcttggatgcagctgcaaatgttgttggtggtgacttgatgcatgttctgtcaaaaaaattgacaggcatatatagtgagcaagagaatgggaaagaggaattatgtggagcagtaaaaaaaaatggaaatcttggtattttttcaaccgcagaaaaatgagtaaatgaacctggatttactgtccctgtaggctggaataagtgcaagagaatgggaaataggaattatgtggagcagtaagaaaaatggaaatcttggtatttttcaaccacagaaaaatgagtaaatgaacctggatttactgttcctgtaggctggaatgagttgcttgcatcgacactgaagtggatgtgccactttaccagttgctcctttgctggtgctatgccgagtcatgaactgaaataatcaagaacttgaagcccattgcttgcaattgcagaaatggattttgcaatgtgaaacaacgtggcgacgcatcttactgctgtaagcctacaccacgatgagattacctcacaacgcgcaaagaattaaaatagaatggacacttcaataaccatcactcgtacatatttccatttcgaattttgtatatgaaaccaacgatgacgagccaaaaaaaacagaaaatcttcccaatcaatcatatagcctaatatgagaattgcatacacaacttgtatattaatgcaacaccatatcaccaaccctccctttcctatgtacatttcatgagtatggaaaaccagggtcagaagagcaacccgctcctgatttgagaaaaagaaaaactttaacacactcaaccacacccatacacaaaagctgccacgctccaaatcctataaatattacacatcctccaaactaaacaacttgaatcgatactgaacaaccttttctaatcggtttcatactgtaagttatatcaggttggcaactcgatcttcatgcttctatcttgaggagtgagttgagagatgtgctgttgaacttttgagcaagacctctaatcaccagaatgatgacgtctcgcatgtgccgagtttgcaccatcaagtcaacttcgctctcaccatcaacaacaatcttgaagcggtgctgatcgttgcgatatagctcaacctgaaagattcaatgaacagttagctttagttataaatttgcgtaggacagggattatacattctaaaatgaacattttattttccaagttcatgcaagaatttacatggaagggtggaacatatgttcctcgcacttctgtagttgggaatgatgccttggatccaggctttacaactttgatcctcttcctattcacttctaaaattcttcgctccaaatgtcccatcacttgtgcctgttaaattgtttgtttttccaaaaaaagaaaagaaaagaatgtaacttgtagattgcaacgcttattatcctggtgaattgtgatttaaaaaatatattacatgtaggaggaaataccttttttggtgttctgtccttgtcacacaaaacctgttcaatgcaaattttatgcacttgttactaaacaaagtattaattgttgcaatgataacaataaaaaaaacattactgtgaaggtagcccatttctttagataataaagatagcccaagtagaaatgtaattatgcttgagacagttactattgactgaaataatcactctgctgcagaattgctcagcactcaaatttggaaacattagctgtgcaaataggaaacaagtatgctctccatagtttgacgaataagaggcccagctatccatgacagtgagacagtccagtagtctaatactaccaaaaaggaactaacatcagtattgaaatgaatattacctcaaacttgacagatccatcatcaagcttctgcttcacctccttgtaaatttcaggctctgcataagaaaaaaccaagcagttaatagaccaggctgacaaccttaagtaatgctctgaagattaaacttaatagtgaataaatataactatcgcagaaagtaaactgaggctagaagaaactgtttagctaaccgctgccggatcaccaaaaggataaaaaactgagatgatgataataataaatgttagtaggcgacaagataggtgaatggactataccaactgcaattggctccgttgaagcagagataggttgtccctcaactccatcctctctcacaggtgtataaatgataacaagtctataacctacatcatcaacattggcttcatatgttcttccaatttcgcctgcacaagaagttaattgcaatataagaatataagtaccaagaattgaagcaaaaataagtgggcatcatcttgtgcccattaggatttaaaagtggtaaatattatatcatttaaaaaaaatgtagaattcaaataatcataccaggtatagagataagatctgggcttccaaccatagacctgagccattggattttgctcttgccttctttgcctccagaataggtaccccgaacagcatacaggttagtgtggaaacctcttccttcaatctccagtttttcaattttaggttttcctgttaaaatcaaacatcacgcttcagtggtattgcaaattttaatgatttgcatgaggatggatatcagtacggtcatcaagcaaacttggcaatagagattaatccaactagccaagcctcttttagtagtatatacacaagaagttcaatgaagatgacagaagtacacacttatgcaccaattgaactaatacaacatgatgcatccaaaccccaactgcaaagagggagtcaagatgcagaagtgcaagcctatggactgatcctctacaggcctatccattttgaaataaataatgaatattttgctcaactaaaatatccatcagtttcacaaagttacaatacgcatgctgatttaatcaataagacataagcggtagacaaccaacctggtaagatcggagcagtcacaatggatatcaattcgctggatcgtccaaatacatcagagactgagcattcacatttcaggcatcggccaatatcttcgaaacgtactttgtatgagcgagagcactggttagccagtggctcaaaagtctgatccacttcagatccactggaagcaaacctgcatccagagatccacagcaagtgttatatgccatattgaacaatgtgacaaagtcatgactcacgacatacacctctttgcattaccattgatatgttatctctttcttgtagttactccatagatgttgttgaactgcagtgcttggaatttgttcaagaacagtcagtgtctctctctcaacctgatttcccttgaaagagagtgcttcgattttaagtcgttctggaaagaaaaggagaattaatacatgtagttgcatggaaaatgtgaacatagaacagtatgtaataggttcagatattaaaattaccagggagaattatatcagatggctcagagagcctttcttctccaatgatcccatcagaacgaacgggaatgtacctatcaagaattacaaaatatcatattccacaaatggaagcctgatcggttatgcagtaacacaatgtaaccaagtcattttaaatgtgagcaagaccagttcaaaatagaaaaattaaagtgccttacccaaacagtagacggcggctataatctgcatctgtcacttcatatataattaaatcagcaccatctatacaatgcctggttccatcactagattccctgtaccacttatacaagcttgacccctcatatccaccataatagactcctgttccgctatacaacaatgaacttttctgcttcaagtgaacatccgaaacagatggaaatgctgcaaggttggtaaaggactgaggatgtgcaggcagtagtagtaaacacacaacactggcaaggaaaagatcaatgggcaacctgccatgacagggtcactggtaacagccaccaacgggtcaccgatctctccatcatatcgtgcaggaacccagtgaagaatcaagtagaaaccaacatcatctaacgaaggtttgtacatcctgacagcattccattagatcaaagaggattagttcttaacctaaaccattcaaaagtaacaagcttgatgaaatcagtaggagaacgcacaaatttactccaacttcagaacatgaagccaccagatcagcctccaagttgtcaagcttctctttagttcggtaccatgtatattttccagtgccttccttaccaccaaagtaggttttgattggagaaatttcattgtcttgaaaacactctggtagaacaagatcaacacccttggggtcccctgtgccaatgatggaccaacaaataattaatgacatcgattataataatattattaaattatggatgaaatatgcccaaaactttttttttttgaactagagccagaaggctcccatttcttttactagaaatgataggctagtaacagcagtctttacaaaagcaaagagaaaagattagaaactaaacatgagggtcactccagaatctgccggccctagttcagaagattccacaaacgaaatgctacccctggaccattacaggcttgtcaaaacaaaactaggacccgcaacagcaaacataagcaggcatccatgcttatgtttagttctggtcctagcacaaaaaactaggacccgcaacagcacacttatgcttatgctgaaatatgcccaaaactatattcatcttatctgctttggtggacaagatacatactgacataaaatattcaggtcctagcgcaaaaatataacattctgaggaaaactaaccaggtagaattgtatccgatagaacactcttaggtgacccttgtgatccatcatctcgtacaggtgtgaatataagctcaatgcgcgaatcaacatcgtctagagtaagatctagacattctattaagatacaaacaatcaaccattagtttgctatgcaaagagaaaagaacaaacaaacattgcagctgtgtgtgaaagatagatactatacgcatgccatgaaagaatgcttaatgtaaactaaccatcagtagacaatttctctttgctgccatcagaatgtaatctgaaccattcttggatgcagtctcccttgaaactagaatgataagaaagaaaaaaaaataatgtcatcaaatgtgcggcattagacataatctaaaacggaggtaatgtatctcaccctcctgtatactcagcatgaaaggtcaaacagccaccttcaaccatagggccagctaactcaagagataagcatgtaggtggtcctgtaaacaggtaaattacgaaaatgttagtcctccgtttagtccacttattgtttttcaaattaagaacaaacgctgaaccacacaaccaaataagaacacttatttgccaaagtggtcaagttatcagtttatctaccaggtaagataggaccagactcttctgttgacaccaaagaaccatgaactccatcacttctaacaggctcacacaagacagatatgtaaaagccaatatcattacagttcaaggtgtatgatgaacttgcagccccttcaatttgtttttgtgatccatctgaactagtctgtggacacaaaaaaagtttataaggatgtagctggtaacttggtacatccaggcagttacaaatcactgtgccattgttacgtgaaagggaagagtagtgttttaataagaggaacctaccaatatccaacggaatatggtctccccttcttctcctccccaatatcttctgctggcaaccattgtggtcccctcaatggcctcaccagttagttcaagagaaagtattgttggccttcctgttaacagttagtgaaattgaaattaaatatgatatattttatttcaatcagcaggcatctagaatatgtcataaccacaagcatctaggacatgtcataaccacaaacaaagaaaataaatccagcaataaaatgggcagctagaccacaaaagagagttaaaaggtgtacttgaattattattttttaaaaaaaatacatctttgtaacctcatggttcgtattacatgagtatatgaattattcagacagaatcctcatttatctgttcattttcccagacagccagtaaacaaacatctacagtctttcagttaaggaagaaagaaatatataactgtcaaggttgttcaggcaaaaagagaaaacaaaacacctggtgtgactctgtcctttcctgtgaaaactcttggctcaccaagtataccatcattcctaataggtacgcatttgaaagaaaggaactttccaacagcttcctttgtaacttggtattgtagcagacctgatgcctctgaaaccagactgccttcatcatcctcagtctgcaaaactttatgccagttaagaaccagtgtgacataaagaacacaaagtgctactgagtaaaactagcgatcagaatttggcattctttttctcctttctataatacaaagaaacacagctctcttgcgttctagagaaaagaaaaatgaattcggcaattcactaattattataaatctccacttatgcaaaagcataatatgtacagtgagtgttatattgctatttactgggtatccaggatttaatttagaaacaagacaaatatggcttgtacctcatgaagatgccaactaaataaactattgccttcatgtcccccaatgtaaccatatgatgctgtcaacatttggccctctgagaattcaccagtgactgtcaaaaaattcaggctgggtggtagcactgaaaaagaggacacaagtaattgaagttggtaaaagactggacagatgaatgcaaagcaagaacttctttagctcaaaagctttatggttaaccaaaatagacttactttccacaacatcagcagacacagcataggctggttcaccagtttcaccatcaggtgccatgggggtaaactttgcaacaatataatatccaacagcactgagaggaatgcggaatgtctattgcaaaatcaaaaggagaattgttcagccatattatcatgacacaaatacaccaaataaaaagtaggtagatttatcagtaatagagagcaaaacttatcataccttagaaactttagatgtagtgaggactctgagttcattctcatttaaaaatttggatgaagatcctatgaaccattgaaccctgctgaacccttcagtgccacctttgacagtagcagtagcagacaccttgcttccttctcttgcttccccaactatcttcaaatccaagacttttggaggtgctgataaaaaagttaaagcaaagtggtaacatttctattagcatactccaaaaaaatatatacaggcaactttatcccaaatgggaaaaatatcgagactattgaaacacaatgggcacaaactccactaacctttcttaactgcatctgtcatagcataagcagcttcaccctcctgacctggagaagacaccgactgatgttgatacaatagaatagaatactgatgcaagcaagcaagcaatggatggttcgacaaaccttcaaggttgatgggaacatatacaaatttgaggggccgacccacatcctcctttgttagcgtgtactccgtgctatttgatagcactagaagaaattcactgcataaaatgaaattattttgtccataattaccacagtgtatagaagaaacttgctgcacaaaaaaaaagtattgtccaaattaccacactataaaactattgaccgtttgttgtagactacagcaatagttcatccaattgtctagtagctctagttcaggatattcagtttataattgagttttagcaggcctggagttaagttcagttaccaaagcccaaaatgatccttcttaaaatggcaggaatttatattgctgccaggagctatcctggttagggatgcaagtgggtagtcccgctacccacataaaaacccacttgctagttcatttcccacatggtagtacaaaatttagaaggaaaaatgaactagaagtaagataagcggtctgaaaaaacccgcttgcatccctaatcctggtgcaagttgttaagtcggtatggccatcgaagtttgatcaaactacagtgcttgaggaatctagccatccacttggactacaattctataaataaatcaggagttattcaaacatggcaagtggatgtaaataagccttttctggagacaacataagtgatagctccgatatcctataggactatctaatattttaatatttggttatggaagtgcactgtaagacctattacgaacttatcatagtgctatcgcataacaaaccagataaaacttattgagtaacagactcagaacagctaagtttggcaagttctactgaactaagtacttcacctagaatggacaggtaatgcatggaactatcaaaatataattgcttcaaggaggacaataaatgtatggaggatcaaacttgaagggcaatctgtacccaagattaacgtttgaccaaattgtttttcttacaacccattaagaatttaagatctactgtttgcatagtagtgtatgatagagaatagattaatcacgtgttcagaattcacattacttgtatatcagaccgagaatggtttcaaacttctaataactgcaatgctcacttgcccagctagtaatgaaatgtttaaacataccataaaggtgttttatcaatactcaaagatgacaaactaatggcagtatggctcatacggtcatacccattttccttctctctaaaccagaggaatttgcttaatccctctttgccaccaaaatactttccattccctttgattgtgttatcttcaacaatgtctcccacaacatgtacactgctgactgatggtgtggctgaaatgatgccataggcaaacaattattgagaattttgaatatttcaaaagaaaaaaagaaacaacttatgaacagttttctggaatttatttcaaatggacaatgttcttttatttaaacagcttggggatgaaccatcattggttactttttttaattgaaaggccattacaaaaaacaatagaccagatggtctatattctatctacagggtggtgcaatcccagtatatgaataaaagtaatttaagaccaaaactaatgggcattggcaaccctttcacaaatatatctgaacagaagctaagataatttgatgggatgaagtactttaccagcctttacaaaatctgtcattgtacattggggctctcccttaacaccatcttctgtaacaggggtgtacataaataccaaacttgaatcgatatcatctagggttagctgatattccatcctgtcagctccatctattacaacagcattgccgttccatcttctccttaaccaactagcctcaaaagaaggtttaacaaaatcaatggtattcactagatacaaaaattagcataaaagaaattaattcatctgatagaatgaatattcatttgcaaaatgaaacatgatggaagttattaggataaacaaaccttgcaacaccttttcctggcatcccaccacaccaggcaatctcaggaacacccctgagtacatttccttccaccaaatcaccatggaccgtcagattgatgacctttggacaaccagtacctggtaaacaaaaactgatcaaggactaaaggatttggctatatcattctagtgcataatttaatttaggtaaatgggtgaaatatccatatatactataaaaaataaatgttgcgctgtatctatcacctccccagtccccagcataaaagtagggctagaaaacatatgggaaggcaaataaagtttcactgaaaaggcaccataattttagaatatatcttttatccctacctactgcttgcaatgtaggcatacatcaaacaactaactagacaaagataaatccggcttacaaagtactatttatactttatatacaatcagttgttcaatacctggagaaacaggtaaggaaacagcaaagatgggcgggaattcagcatcattcaatattggagtgcattcaactttcagacatcttccaacatcttcacgctttggccagtataccttgatttacaaataaccaaagtttataacttgcaaaaggatgtggcaaaactcatcaaattataacagcagggacttaaaaacttgcaagtgatgcaaaccacaaattcaagtagttctaagaaatagatagataactaaccaggcaaaagctctttaagtacagttaaaagtgtgttcaagtaagtcaaaggagtgttctacctcacttaattcttcaggaagaggcacaaaatcagttggtgtcttgtcacctataaaccactgatatttgaggactagttcaccctcatcacactgatttgtgaagctaaaatggcaatgacagggatcttcttcaaatggatggtcaacatgagctttcttcactatcaaatcttgcggcaacttattcttccattgctcaagtaggaaggaaaatgttgaatctgtccaagcaagtaggaccataagtgtgcacttagaactcaaatggatactcgagaaccaggaaacaaacaaatcattcaacttcactttagttcatgcgatcactttatgtttgtatatgagaagagaactaaaagaatctaatactgttgaagtaatacatcagcagattcatttacgaacatgtaatcagtaggaaatgcgtcaacaacaataaaagaagtcaacacaaaatagcagtttttttctctccattaaaaccataccagcagcaagttcaggagagcaaaattcccaaccatcacgaatgcaaatagctgtatgagcaggatattgcttcgcaacttcagcctcaccggggttcagatctgcaacaggttcccacttaagaaatatccaaaaccataaagtaataagatactacattctggttgcatcaaacaattcagtatatttatctgaccagacctattaatcaacagtatcaactcacatgatagattaatttatccaaaataaaatctaggcattatgatggtgtagatactgtaaagctccagaatatgcgctcctgtttcatattctcaatcaggcccggccctgagggtggagcggccgcactgagcccccaaaatgttggagcccccacctaccctctagtgattacggatgggattaggcagttaggattagagctgccgccgtggacgtagctagcaaccaatgttcccgattccacgatcaatcaaccactacgcgagtcatgtccactgagacaccgtgtgctgcctccacgagtatgagtatcgatccgccacaatccatccacctatcgttactcctcactcgtaatcaacaaattaaattggtatatgatccatatctgtttgaattttctgttatctgctgctatcctggccggtttcttgcctcttctctgttgtgggttcctgctgaactaatgtctcatacattaacatgcaatctatttacacgtttgcagaagaaagatttgttagaactaatccatgcttttactttttgtaatctatgagttcgaccataatatgctaatattttcaatttttagctctttgatatcatgtcatcaataaattaaacggttgaatttgacaactttatgcattaagaattgctagatgagattgatattgataccatcatcaattactttgtatctagaaaagtccaaagaaatatttaagataattttcataaagttctacatctaaatattgcttttgaatgcactttaaatatttattggtagcattttacatatacatgtatgtattaattcttatttacatataacattaagggcccttttttagtttcgccctaggccaccaaaaccttgggccggccctgttctcaattcttactatatgtgcaggtgaagtatttaaagtgaactcactcatttctgagcatttggaaagtcattctagtcctatcagaaccttaataggtaagccgaaagaaagaccagaatgcggcttgtctatatcaagtaccggcgttattttcatttccatcccattaatagtctgaaagtaatcagattcgatgatatttcaacagcgataagcttaagataagccattgtgatggatattattctatactaccatttcagcaaatcaaatagtgatcagcgatgcaatgaaaagcatgttaaacataccccggtcattgaactttttcaaggtagggcctacaagcagaatagaagcagcctccaagtgtggcatctcaagaagtggattatcctcaacacgtaaatgctgcagacattttagttttgccatcagtgagcaaattgcgttaacacttcatgtgtcaatagccttcattaatttaacatatctcttcaaattcaaatatatctatatgccacagtggactggtaataactgatcatggatggtatgaattgcctgtttcatgcatataaggtctattctgtaacatcagacattgagcaacgcaattgattattaccagcttcaaacttccaattaccaaaatacttattatttgtactgcacatcatctattgtttgttcattatctagaaaaataatctattgtttgttaagcaccatccatgagattcaaatgcttttagaaatagcatcgttcaacaacataagaaacataatgagtaaaagcagacctccagagaaggcaaatgcggaaatcccttcaaaactgatattttgtttctgctggctgctagtacctacacacacaaaaaaaaatgcaaagcaagttaagggctaactgatattttgattatgctcaaggcagatacaaccagcatactcacttgaagtcgaggctgactagccatacagagtgatttcaacctattttgagcaacagagagaaactggtgcagcaagagagataagaaaaatagatttagcattgttgacataagtaaagatcaactgctaagactagtttggtaacattagcatacctccaagttaggaagctcgggaagggtagcaagggatgttatttgatttccagcgagataaagttgctacacaggtcagaatacaaaagatagttcataaaaaaaacctccatgagcatagtcaatactatgaggaaagcacaaacctggagaagtttgcaattctcaaggggctcaaacccagggagcttaaattcattaaaactcaagtcaagaacctgcaaatatgaaggaggacaaaaggcagaaaaaacaaaataaacacataatcaacagagctaggccacaagaacaggaagtgccaaaatggaatacatcccaataaaaaggagagaggtgataccttaacccctttgagaatctcaataccctccaaacttgatagacgattgtccctgagataaacaaactacagacagaaactatggtaagcacttcagcagacatgtcattcccaatatttcttaatcatgggctatgctggatgtatatatctttcccaaaatcttaggtgttgcaacttgcaaaaaaattaacagtgtcatgtggcttgagttattgcagaactgcatagataaaaggagaacctgactgcacttacttcaagtacaggtgttaatctcaactgcttcagagttcgtaccctatgacctcttgaatcaagtctctgcagaagcatgaaactatattgaatggaagaaaaaccaccacatgatgaaagcatcaagatcatccacataaatgaagaactttttcaacactaaccacttcatcactagccttcaaatccacctggggcagcatcataaaccgtgaatcacggctatcagcagtcgagctcttcttccgaataggcatggaagaacccttgtccatcgacgatgtccgagaacccacttttttcgtgacgctgcttgtcactgaaggtgaccgtggtgagttgagagtagcatttgaggctgctctcctgaagctgctgctagcgctactgctggagttctctgtcagtgatgggactttcttcagagtagaaattggtgatgacttaacagcaggcttcttcatcgcatccaccttggccctctcagactgcacagatgacttcttttccagtgatgattttgagctgaccatggaggctgtcactggtttactcttcttcaccccatctgacagagaaggactagctttcttagcaacaactgagctcccattatcctgttgcttccccgcacttcctgtgctgcttcttctctgaactggagcagcattcatagacgaggtagacttcgtcaacgatgaccttgacatccccaactcggctgagggagcaacatcagtccgcttcttgattgaagaagctgtccccaatgcaaacctgccggtgggcacagacagccgggtctttgacggtttagcctccgccggctttgaggtctccggtggtgcttccattcctgacaaccacaatcaaaacctcaagccgtacaccgccagtctttgctttctagtcaaaccaggaacctcttgacgattgcacacatgcctgacctggatagccaggtaaacaaaccaaattatcaatgtagcacttacaaatatttgggaaatcaccaaaagttcgatgcaaaggaaaaattctcagaatttgcagcctcatacgaaaactgagcaaccaacaacgcttgtacagaatttttgaattgctcgcagaattcgtcaacgcctagatagggaagtacaacgcgaggcggtaccaaatcagacggaattgcggaagcacgaagccggtggatatggcccgtacaaaaaagcgaagcattaaaacttgacaaaataagcacaaaaaatttatttcatcataattttttttgtcaaatgtagaaacagagcaggaacccatcgttttgggtcggaattcaaaaccaaaattccagcaaagtcgtcggtcaaacccacaggcaaactcaccacggatcagaattcatcacagaggatcaaaaccacacccgaaaaatcccccaaaaatgctcgtaaaaccctagcaccatccagcacataaaccccaccgcattccgcgagaacccaccgccaccgccacactacgagcaccggagaaatcccacccacacgcgcacaaatacacacacatacaccctctccaaactcgaatcgatccgaaatggagttcaaaacaaaatccagaacaaaaatgcccaaaaaaaatgaaatcaacacatcgcgcagccacgggggggccggctcgcctcccatctccctcacctccccccgccgcggcagccggatccgagcccctccgccgcctccaccaatgcgggctacgagcgcgcgcgaggagtggaagccaaccagacactggagcagaagcagcagcagcagaagaggcagagaagaaaggggggagaaaccgaaacgcgcacaagtatccgagaggcgggggggcacttggtaaattaccggaattcctaggggcttaggtgtaaattcgccaaagtttcgctcccgcccgcgcttttgcagtttcggttttggtccaaactccaagaaaacgaaatatcaggggtttttttcgtttaagcccttggtttttgtggaaatgtgacgggaagggccgggggtcggtgcgcagaggcagcgcacacgtcgccggcgtggaatcgccgtggggcccacccacccggggagttcgcttctaccgttgtttgtttgtttgtttggcttggtttcgtgagggtaatctcgagattaagtgccgtaattaacgctgatcgcactaaacacaaaagctacgctcgtactacacactaacgcacacgagtgcagccttcaatacacgcttaaaagagataaatgccaaaatatcatacaaattcgatgataaagaggtgcatcgcgagcactgagtttatcgtgttataacttttactacacatctactttgagctactttaaaggcaaacataagagagaaaatatacgaagacagttgtgttcttttaaagtgtttggcaaccagcaagtgaaatagaacggtgaattagcgtataaattaattaggtattaaaaaatttaaaaataaattaatatgatttttaaagtaactttatttgcataaagtttctagaaaaaaaaacactctttagtggtatgagaagcgtgcacatggaaaaagagaaagaaaatgttggaaaaatgtaatactggccgcagccttgaactaactttgaagttaattaagtcctaagttaaaaactagtaaaaccttggctctaaattctaatgtgcaagtccactgctatgtacgtatggacaaaactttaggtttgcaaacggaatgcaacaagcagtgcaaacaaaatcgaccattccagctgattgaaccctcctcgattgcatcgaagatttttgtttcgagacaggaggatgcataacacatggacagatagatatagataaatctagcaattattagggatgcaagcaggtaaacctgcgagttcaaataaatgataattcataagtttttgtgttgtggtccagtttaccgcatatagatatgcaagtgggtcaatccataaacctatttataggtcaaattaatactttctccattccaaattgacctacatatagtttttttttgaggttattcctaaatggtctacatatttgtgttcatccattaggtctattcattatttgtgtattagagtaaatggacattgacgcatgcatctatgcacacaagcatttatagcccatatgtaatatcttgatttgctattggctatgaaatagtggggatggtgcatgcattgagtttgttgctagagtaaatatagtataagagagttattagcttttcttggtattggtgtacctttgaaatatgtagatcaatttgaaatgaatggagtagttaactagcgggttacgtactaattttacctataagcaggttcacggacaagcccgcttgcacccctagaagttacgtgagagtaatcaaatcacaaaaattggttaattacaggtagaagtggtaggtgagacagacgagctagcgttggagcgatggataagctcgccatcgccagcgacgtgccggcgaccgctccatcgaaagccaatcaaggcactagtactaacgaaacctacctccccttcctctcgctgacatgtgggcccggtcccacctgtcatcctgatgcgatcatcctgggcccaccagtagctaggaggcaaagcccgtgggaaacggggccgacacggcgatgaacagggagaagattaattgttgggatggccttggattaggataattaaaaggtttgtgtgctaaataatgatgggttttaatttgtccttgatggatcatgcacggccttgaatggatcgatcgattgatgtgggtaattttaattaagtgcaataaatgacaatgatgattaactcgatcaccgtcgtcctagctaagcttgtgtactggatatatagctcagtgccaccgtctgatcacggcataatcgtgcgtgtgcaaaccattaataaatatagttgcacggttttatgaaccatgctacatccgttgcaaaatgcgtgcagccgtagaaatccgtgtccaacgtttcaccgtctgtcttatttaaaaatttatgagaaaattagaataaattagtcaaatataaagtactattcatgttttatcatctaataacaataaaaatattaatcgtaaaaaaattataaataagacgaacggtcaaaagtgagatatgaacagtgtaaaactgcacttattttgagacggagggagtagattggttaagcacgctaaattattatgcagtacgtgcattcttcagatatcatcagatgtgcctatagatttatttatgttgattagggctttattaggagcttgtttaattttattgacacaaatttaatcatcaagacaattattctccaaattccagactagctacactaatccaattaagctataatgcctatatgtaacttaattaccccccaaacaaatatacactgctacatttctcttgtccttatggtatttatttaagtactattcatactatgctcaaagaggaacctaaaattatactccctcggttttaaaacgtttgacgccgttgactttttatcacatgtttgaccgtttatcttattaaaaaaattaagtaattattaattcttttcctatcatttaattcattgttaaatatatttttatgtaggcatataattttacatatctcataaaagtttttgaataaaatgaacggacaaacatatactaaaaagtaaacggtgtcaaacatttcgaaacggagggagtacaactcagtatttactcttcaggcatgaatccagtgtagtaccactgtaccatgtcagatagtactagacaaagtatcatgctgctgtacatattgcattattaatttgtcccttgctactggtgcacaataactgtataagcatttgcaggtgactagctttagctatagctgcatgatatcgatgcctctactcttctccaatatgagtaggagtacgtgacaagaccagcatccttgtcacgatgtagaggcttcaacaattcaagagacacacctcttaaagagcttattctatcagctatagccctcggattgggagatgcaacactgatatttgtatacatgtccatatatgcatactagtgcatatcttggaccctcgcgttgtagtgggactttagaacttctctacagaaaaaagcatgggtctaactcaacacttcaatctcataatgattggcgtagtttgatgacatggctaaacataagagttcttttacggcaattaatgatatagcagtactggttgggtagtcgtgtttttcagtctactttatctacttcaaatcttttgatttttacacgcttcccaaaaaactaaacggtatgtttttataaaagaatacaagaaaattacttaaaaaaatcatattaatatattttaagtttattttagttaatacttaattaatcatatattaatacgtgcttcgttttgtataccggagaggagaccaacccctccttctaaacacaactttaatatgtaactatatggaaatagaaatagtgggtgtgcacatacatataaataagtttagctagcagtgttcatggctgtctgaagaatgcatgtgtaaagttaagtgtaacatatgcaagagtggctatagctacctaattaagtgcaggaatccactgatcagtcagaaagttcacctacaaaactgtcatgtatacccagcacacataaagataaaaaggggctgccaaatcaaaggaggaaaaggagttaagtcaaataaatctactcctaagatttccctttaagaaagaatcaggatggctcagaagcaaagagagctagacaaaagtgaagaggaagctagaaacataaagaacagataattaaactatctgtctgattaactattccatcaacaaaagctaattgcaaagttgtgatgcaaaagggtggtaggatgctagtaaccatcaacacaacgcatcaattagtctcttcttagggcgaaaagatatggttgctctctcctgatacatgcttatgaatgggccacacgagctagacgttgcagcaaccatcaagcagatatatatacaagtctccatagctaattaaattaatccatgcattttctagtgtacaacttgcaagattttctttgggtattatgggtggccagctcatgagtcatgaccactaatacacaaacattatatatgtaatattagtatattactaatcatactagtatctggtagagcaaagtatgttgcaacttaaattagacctcgattagtctagctttcgtttgtttttagttacaagttcgtacggattaaagtggttagccaacttgtggcacgatgagaagacgagaccaatcaatgatgacagttgagaaaagatcaaattaagaggttgttgcatatgtacaaacatgcatgcatggtactagtatatacgtgtagtccgttccaaaaagaagataagaaagaacaaagatctttttctttctttctttctttctttctttctttctttctttctttctttctttctttttgttttgtttttgctagaagagaaagaacaaagttgacaacgcataagaagaaaagagcaattgaatccgattcggcattatgttggtgtgaatgtgtgatccaagatggtggtttcttttaatttgattatctaaattgaatggtcaggtatgtatcgactgcttaatcaagatagattgggatgatttctgctcagaggggaaaaaagaaagaaagaaagaaagaaaggtaagccatatcgtgacttcttgagtgacttttgtttgggccttttataaaacaaaaagggccaggcccacacactaactgtggcaccggcccacacaagggcccactgtacacgtactagtgatgatggattatggccgtagatgggccgaaaggtcaatgtttctcaagcggaataagtccactttgaatcctttagagatgtccaatctaattcgaatccctcatagtagcagatatattgacccctgaactattagaactgatgcaaactaacttcctaggtgttcttttgctgacgtggctagttggcaaagtccaacctgttggaagtagtgcatacttcgccattaattttattccaagcattattatttgagagcatatacagtaagcataacctacttgcgacatgataggacaagaaaaactcataaattctatcatgctagatatcaaacaagatataaataaccaagccaagtaggtcattaggctaatcacaatggtaatctagccgcaatattttaatctagatgaacagtaccatgcatatacaaaactcaggtacgaac

SEQ ID NO: 4580 - DNA, 31617 bp, Oryza sativa
  unsure (1)..(31617): unsure at all n locations
taccctatcactcataatactttaagtgtgatttatatcttacacatttgcataaaatttttgaataagatgaatggtcaaacatgtgagaaaaagtcaacggcatcgtctattaaaaaacgaaggtaggtaatcacaggttttcgcatcatggtctagcttgccacaactagatatagaagtgagtcgaatcaataaacccatttataaaccaaattacccgcgagacaatctgcagattatccactaattttacctatataacgggttggcccgcttgcattcctaattgggcctgcctgacccaacgagtagagcccgtccagtgccctgacagataccgcagcccaagtagggcccataaaacaacccgtgggcccgtctcttgtccgaccgttgctgcgttgctggcaggtggggcccacaaccagcagcggcccaactcccaaccccgttccgttccgttccccatctgctcctccttccttccgttccagcttgaccccgacgcgtacccgacccattcactctctctcctctctctctctcctctcgcccgcatcggccgccatgcgcgaggaggtgcggagctcgtcggcggcgccgcccgacccgccgccgcgttcggcctcgccgcccgccacccccgtcgccaggtaacctcccctccctctcgctgctctctccgtctctgtgcgggggactcccgctgtgctgctggtgatgatggtgcgcttccgaatcgaatcgggggggaggctttgctcggggaaggggacgggtttggattcgcggcgtttcggctcgcgcgtggaagaatttcggtttttggtttcgtttgtggctctagggattttggggggtaggtgggttggtggaggggtctcgtacacctagggatttaggggcatctatactaaaaccctagggattactatctagtttgtggtaatcgagaagcctctctttcttctttttttcccgcggaatcttagaattggggccttgtagaaggcactactacctgtgtgcctgtagctctgggagaaactggtgttttgtactagttcgtaattctggtactgttctagtgtgcgccttgctctcgcgagcgagcttactgtagagctagatttctggggtgtatggtttttctgctgctgtcctatggtcagctgggcgcttatcagtcactgtggcattgaccttgcacctgttgtggttcttcacactgatgacatgttctttgcactggtgtcaaaatacatgtttttgtggtcatttacttacgtagtctcatcttgagcccaactagttggatatttgccaaatttggaatgcttaccatttttagatagaataaactgttgtactatcattttttatcgttatttggttactatggttgggttgtaattaaaatgttccaatgatatatattgataggatttgtttcagaacagtatagcgttttcagtgtatgctctccacatagattctggtgtatgtgcatgctgaagctcattcctctcttatttacagttcggctggtgcatcatcaccacctgcacaaacaaatgcagctagcatagattggttaggtggtgagccaatatccaaagtggaatcatcatcccagattgctccacatgctcctcggccttctcttagtactaatgctgctggagctgccgtggatttctctcaaccatcttgtagaccatgggaacgaggagacttgcttcggcgactggccacattcaagtcttcaacatgggcttctaagccaaaggtcatttctcttctctagttggtccttttttgttattttctgtgattgtaatttgtaattggcaagccgctcaatcttacccttttgcatttataccagtttagaattaagaataacatttttcgctcagaggatgtatataagtgaatgctgagaaacatgataaggttggtaatggaagtctgaagctaaagatatactacctctgttttttttatttgacgcttagttcaaaatagaaataaccaatgtcatgtaaataaaaatggagggagtataatttttatccatatgccacatacaacactaagttttgtctcatatattttctctttagtccttttttgcatattggtaatgctcaggagacatcttgtaacttagatgtgttctttatacctagctgcttacatatccatgtctaaatgaagaattacaatgtatagggcaaatgacatgtttgcccaaatgcccagctgaaatccagatcaggcatatgtttgataatttttgaaccagtacatcactttctgaaatgtccagcttagcatgtaccttatggtacctagataaagttattttcggccattttgatgtctcgtattgcaaagaggaaaaaaatgctactgaaaatgacaaatccagtttgttttagaagaaactaatagcttaatttttacaggctgctagttcactggcttgtgctcgaagaggctgggtgaacattgaaatggacaaaattgcatgcgagtcatgtggagcacatcttatatttacggcattgacatcttggtccccagctgaaggtatgtcctgagtgaatgtattttaccgcagatctatggaactagctttttcctgtttaggtttgtcctgcagatgtatggcatgcattatttcaatatgaatacttgtgttctcacagataatcatgcttgcttgtttcatgaaattttgcaacaggaaattccatgtgctttcttgtgcatataatttttcactgtcatctgaattagacagatgtagtctgagaaataagttggttgctgttggatgaaattatgcctttagttatttaatgttgtttgtatgatgtgttcctcaattgtacatacagcatgggagcagctcttttattgcatggtagcaaaagtttgtttaggttctcactactgcaaaacaaatttatgttattaatggaacaaaagggatttgtgttctagcattcagcattaccaacagtcatgacttcttgatttctttcatacacgcttctcaaaatcctgctacccagtttcatttttaccatactatttagttgagataggcatgtgccgttttggctatagcatatttcttctcaagctgaaataagctcagctgcgaaatctaattttccctgactacaatctgtatgttatgttgtagttgctaatgctggggaagcctttgcggaacaacttgatgcatcgcacctgggtgattgtccctggagaggaaatagctgtgctgatagcctagtccaattccaccttaccccatcagctcttgttggtggtttcaaagatcgctgtgatggacttttgcagtttatatctcttcctgttattgccaaatctgcaatagagagtatgaagctcacaaggagtcctcagattgaccgtgtcttatcccaagcaatcactattttatctggagagctgggttacaaaacagacagcacaacaggaattgatatcaatcatcaagatgagtcctgtagctactctcaagtaaatctcttgttatttatgctctcatatctttattctttgctgctatagtcctcagaatttgtggctttatttaatctaggtcacttccatctaatttatctaggcacagaaacttataagcctttgtggatgggaacctagatggcttccaaatgtacaggactgggaagaaaattcaacccgttctgccaaacatacagcctcagctgatccagatcagatccattcccgtttacccgagcataagcaaaattcgtactctgcatcagttaagaaagataagggcaaaggaaaaattcatgtaaaagactctggatgcagcatgaggtcacctttgcttgattgcagcttatgtggagcaacagtgagaatatgggatttcagatcggtgcctcgtccttctcatcttagtatcaataatattgacgcacctgatatgcggaagggggtgctgacacgtggaattagtgctacaagtggcatcaatggatgggttgctgaaggaacagaaagagagaatgttgaaggacgtggtgaggcaggtaccgatgagggaaaatcactgtcaaatgctcaggttgacctaaatcttacaatggcaggtggtttgccatctacgcattctgtgatgccctctatgcatgatcatttcaatgatggagggatgggaagagatctgatgattgggcagcctactggaagtgagctaggtggctttgcagcctcatttgagtctaggggtcctagttcaagaaagcgcaatctggaggaaggtgggagcacagctgataagccgctaaataggcttcatcctgctgacagcatagaaggaactgttattgaccgtgacggtgatgaagttgatgatggcgcacaagattcagatattcggagcaacaaaaggcctcgtggtttcaatctcttcgatgtgaatcaaccatcttcttctggagctggtcccagcagaaatttaagttttgacctggatatagatgtcaataaatttgatacatataaagctgaaggtccatctgcccttcataacccctctgcgtcgatgagggcatcttctgttattgcgatggacacagtccacagtgcagaggaaaattcaacagagagtgtttgataccatccatgtgatgttgatgacgttcacaagccgtctagtgctgtcaggagtggtggaatgagtgaggcattggatcttaactatagcaaccaagcaccgcaaagcagttttgtacagcctgctgctgaaagtaatgcaagggagataggaggtagtagtatgaatggaggggaggaagtcctcaatgcagaaactgctcctgcttttgctagggaccaactaagcctgggagttagtggagggagtgttggtatgggtgctagtcatgaagccgaaattcatggagttgatgtttctgagcataaaactgatagtgttgttggagatgtggaaccagctcccgagcttactgaaaatatgggcaatactggtgagtcagcccctggacctggaatgatggatgagtttgtccctgaagatgttggccgagaagaacctcagggtgatagccaagatgtggcatctcggttagtgggtagagctgacagtggctcaaagatttgtggttcaactaaagctgattctgttgagagtggagagaagatgagccatggcataggtcatgagagtaacctacagcattccctttctcgcaatgctagagtttattctggcattgatctgtctaaagatgaggtgacacagattgctaaattgccagcaaatgacgactatgatccaggagatgatcttggtacttcagaatctaactattctgcaccacatcctttcattgaactatatttatcaaatcttttatatgtttatcaacagagggattgggctgtaagctccaagaaccttcatttgtcaaacttaactttattaatcagcaaagtgttgataataatttcacagtagcaattttggcatcctatgcttaaataaaacagctgtcaggctgtcatctgatatgcatacacaacaattagagaggaatccgacataaatgcatttgctgtggcaagttaattcgaatactccgtttttatgttattccatttgtttgttggcagcagcaaacgggggaaatgactatgaagcaggtcttccagaatttgacccaattagtcatcacaacaattattgcccatgggtaaatggacatgttgctgcggcttgctgtatcaatactggttccagcactagtaccggactttccggctggcagcttacagtagatgcactggaaactatccagtctcttgctcaagcccaaaatcaaattatgccgtctgactctgcggcatcactgtataaggtaagttttgcgcagaatcacaaaatgcaatcctttgtttattaatgttttcctaaagaccagcttgaatcattgcatggtctatttgcaggatgaccatgtggcgcctagccgcaagctgttgaaaagggctagccacagcaaatgttaattgaagctcctcctatacagacatacatttggtgaacttaactaatccttgtcaccagcattttcacagttcaaatagttgactgatgcaaacctgagcagagttgatatactatttgcaaaatttaggttctggccactgacagtccagaagagctttgaagctatccatgatcaggtggtggaagatgaataaattaagcttcaacttagttattgtagagtgtagatgagtctgcctggccttttgccgagttgtgccccctttggttgtatttttgtatttcgaacctctttgtatctattcaagttacagacagattatctagttagtgaggctagaactttgaacaaccttgtcctttttcgtcaaagacctaactgtgcaaatgtgcaacattttgtccaattaagtattagtttccgttgtattttgattgctatcaaaactgggtatcgttgccgatgctgatcagagctatcggtgattagccctctcctttgacaagccattcattcatacctataaatgcatggtaacctcgtcaattttctgctcgatcatatatcgtgctgttcatgaccgtgatgtcatgaacaacatttgatgctgaatttccttgcgtggcactaggttgtttgaaagtggaattgtatttgataaatgcaactttctgttccaacgtaatgcaccctgccctgtttggattcaggaattcgaaaattagagttagattcctctagttatgttgagggtttaggagaactaatccccactactttacatcgtattggcgattcatatcttgaacggaagagacagagataagcacatcctttttactgagaattcggcgacaaagatgattccaacaatatgcatgcagccataataattttattaagagaactttcagtacatatagcatggtggtgtccccagacgcaatgttcaagttgatcatgtgcaatgttcctgcgtattcaaaggctcacaaaataataagatatagtttcttttaaaaaaaaacagatgaaaagaaagataaaaccacgatccccaaattccaaaactttacctccaagttatatccagcttaattatgtcccggcccataactaattaactaacctatcgataattatctggaaactataaatcaatcaattaaaccagcaattaaaccagcgaccctagagagatctagggttatcccattctttgacgagacctccatcgatcgcttcagatctcaatcaatcaaagtaagtaatcaagcttcgtctccattaccgatcaactcctccgcgcgctcgccttgattaattattgagttcgattgatctcgttgctgtttctgtgtagtataattaatcatcattaatttgatcatgatgttgtagttgtaggtgatcatggcgctgcgctgcatgctgatgagggcgaggacgacggctctccggccaccggcgtcgtcaggacagacgtcatctccggcgagcatcctcgccggcgccctccgctccccggcggccgtgctgatgacgccccacacatcgccggcggcggcggcggcgagttctcgccgccatctctccaccctcttccggcaggtgcgtacatagttcgtcattgatcgcttggcctcgtaaatcgtaactaattatacttttctccttccatcaacaacgtgtattaatttcaaaagaaattttaggatactttgagaaattaacttaaaatattttgttacctatacatcttgatatcttcttaaggatgataaattatgttaggaatttccccagcgatcgctagcaggaaaccagacgacacaacgcatgcgtactgtggctaagcctgcaaattcgcagaacagaggaaacagagcaaattttgtgcagcgcttttctcagctgcttttctgtttacttacatatataaaggaacgaatacaacggaaacaactaaccaccaagaccacttctcacgccatgctctagctgcgtccatccccacaaccacacgacgtgatccgagctcccagcacaagacgcgggcaacgagctaaactcggataccctcataacagactccacacgatggctatcacacaacacgtgagctcatgcgtttattcagaaaaaaacggaaacatgcagataactaatcaactaactaaccgtggcacacaagattactgctaacaaaactctccctaagcttgatgtgccgattatacaggaaacataccaatttgttcccgcagctcctgaaacttgattcgagaaagcggcttcgtcaggatatctgcaagttgcccttctatgccgatgtaactcggtgtgatttccccattctccacggcttcacgaatgaaatgaaattttgtttgaatgtgcttacttcgatcgtgaaaaacagggttcttcatcagggccagagcggattggttgtccaccctgagatcgacgacttcagttgctgcattcctgaggtcaccgaggagccgggcaagccaaatgccctggcatgcagctgttgcagctgcaatatactcagattcacaggaggagagtgctacaactctctgtttttgagactgccagctaacaggatttttgccgagaaagaaaattactcctgtggtgctcttgcgagtgtcaatgtctccagccatatcactgtcactgtaaccctgcagtcctccttcaccttccttcacatagcggcacccaagatgaatggtaccagcaacataccttatgatgcgcttcactgccgccaagtgttcgtccgtgggtttctccatgaaacgactgacataaccaaccgaatatgcaaggtctggtcgggtgttcaccagatagcgcaagcttcccactagacttctgtattctgtcgcatcaactagcgatcctgcactttccttgctcagctttagacatggttccatcggtgttgcacaggggttgcagccggtgagcccagccttctccacaatacgcgacgcatacgctgcttgctttaaagtgatgattccagcttcttgatgtacctcgatcccaagataaaaactcaaaggaccaagatcactcatcttaaattcagccttcatctgctctttgaatcccttgatcatgccactgtcacccccgacaattaccagatcatccacatacacaccgacgagcagtcgcccactgccatcgncgcgcgcgtacagcccatgctccaacgggctttgcttgaagccaagtttcttcagtgtgcagtctagcttggtgttccaagctctgggtgcttggcgaagaccatacaacgccttatcaagcctgtaaaccttgttctcctgtccatcgatctcaaaccccggtggctgaacaacatacaccttctcaatcagttccccattgaggaacgctgatttaacgtccatatgatgcaccatccaaccttcttgcgcagcgagagcgagcaacaaacgaatagaatcaagacgagcaacaggagcgaatacctcatcaaagtcaattccagccctctgcacgtagccctttgccaccaatctcgccttgtgtttgacgacgacgccctgagcatctttcttcagtttatacacccatttcagcccaattggccgatgtcccgaaggcagatcgacgagcctccaggtcttgttctcctctatcgaagagatttcatcgagcattgcccgacgccaatcctcgtcgcgttcagcttgagcgaacgttgccggttcttctccgctcaccatcatcagctcttcctggacctcacgattagcgagacctggcagcatggccggccccagcacattgtccatcgtgcggaaacggagtggtgcgtcgtcgtggtctgcatcaagattagcagctgctccagttggtggcgacacaaaatcaaccgccggcgcatcgccatgcaccgaaggtgttcggccggctgtcggtgagtctgatggcgttcgcggcgatgatgaagatcgagcaggcggctccccagcatcttggcgtgttcctgacagcgagccaggatggtacaccgtggtgtactcaacgacgaagtcggtgtcgagatcagcggccgcctcagcatcccagtcccactgggccgcttcgtcgaagacgatgtcacgggagatgtgaacacgccgagtagccggatcataggcgcgatacgccttggaccccggctcgtagccgacaaagatcattggacaactcctgtcatccagtttcttcaggttcggggtggtcgtcttcacgtgtgccacacacccaaacgtgcgcagatggtgcacggccggcggaacgccattccacagcgcgtacggggtcttgccgccgatacccttggacgacgacctgttgagcagatacacggcggtatttatcgcctctccccaaaacatacctggtagccccttcgccttgagcatactccgcgccgtgcccaccacggattggtttcgccgctcgacaacgccgttctgttgcggagagtagggcgccgtgagctcgcgccgcattcccagctcggcgcagtactcggcgaactgtgtagacgtgaattctcccccgcgatccgtccgcaacgcgcggagcttgcgtccactcttcctttctgccgccgcctgaatacgcttgatggcagccggcgccgcatctttggtggagaggagggcgacccacatgtaccagctgtagtcgtcgacgagtagaaggaaatagcggttgccactgggtgtcgccggcgtgatcggtccacagagatctccatgtagcagcgccagcggctcgtcagaccggcaaagtgcctgccgcgggaacggcgacctccggtgtttcccggcgagacaggcctcacagacctgatcaacctgcgacaaacatggtagaccacgtaccagctcctccttgcccatcttgcagagcgccctgaagtttatgtgcccgaggcgagcatgccagcgccacgcgtcttcgtcggcgtgtgccgccaaacagaccaggcgcgccaggttgatgtcaagcatgtacagtcgccctggggtgcgagggatccgggcaagcagacgccgctgctcatcccagacccgcatgatgccatcctccgccagcactttgaagccggtctcatccaattgcccaatgctgataatattggcagcaagacggggaagataataggtgttcgacagagtgcggtgctcaccattcttgcaggcaaagagaattgtgccccgtcctgcgatccggaccacggatccatcgctgagtcgcacgttcccggtgatgttcgtgtcgaggtcggcgaacgccatcctgctgcccgtcatatggtttgacgcgccggaatccataatccagcgcccgggatcatggtcagccacgtcgtcgagcgctgcaaatactttcatctccacgagttccaccacggcttggtggggcggtgtgggcgtgtcgccctccggcgccgccgcgtagaccgtgtcaacgcggccgccggtgagcaacatcaaggtgtgctcttcttcatcctcctgggcgacgtgagcctgttcttcgcgcttggacttgctcctacagtccttcgcccagtgcccaagtttgccgcaatttcggcatttgtctcccttgcgcgccgaaccagagttcgtgctctcggggctcgcagtcccgccgccaccagtgcgccctctcccgccacggcgcttgccgcggccgccagagccgcccgagtcaccccgctttgcctcttgatccttcttcttctgacgttcagcccactcctcctcagttaggtacagcttcccaccggcggtgtgcgacgaggattgcccagaatcctcagcggctttcagtctgccagtaacttcctccatggacagagtagagatatcgagaagagtttcaatagacaagatgagttgattgaacctgggacgagctacccgaaggtacttttcgatgactttatcagcaggttcaggatcaccgagggttgcaagctggttgacgatggttgtgagccatagagcgaaatcttccacggtctcgtcaccgcggaacgcaagcgattcatactcagcgcgcactttctgtgcactcgccttgcgaatccggtcgttgccgactcgcattgtcttgatgcattcccaggcttcccgggccgacgctttggtcgccagggtgccaatcatctccggcggcacggcactgcagatagcgtcaagagccatccggtcctcatgcagagggacgtccacgccgtcgggctcgatcgccgcccacaggcagtgagcctgcagcttgatcttcatcagtagcgcccagtcgttgtagttggtcttggtcagcagcgggtagttcaccgagccgcctccttctttcaccacgcggtggatcaccagcccgcggtcacccccgccgctgcccgtggcgcggccgccggagtcatgaggagtgcgcacgatcggtgacgacgagcgacgacgcggcatgaagacgccttccaatgcgcggtcacgagtccacttcctaaaccgtgctctgataccaattgttaggaatttccccagcgatcgctagcaggaaaccagacgacacaacgcacgcgtactgtggctaaacctgcaaattcgcagaacagaggaaacagagcaaattttgtgcagcgcttttctcagctgcttttctgtttacttccatatataaaggaacgaatacaacggaaacaactaaccaccaagaccacttctcacgccatgctctagctgcgtccatccccacaaccacacgacgtgatccgagctcccagcacaagacgcgggcaacgagctaaactcggataccctcataacagactccacacgatggctatcacacaacacgtgagctcatgcgtttattcagaaaaaaaacggaaacatgcagataactaatcaactaactaaccgtggcacacaagattactgctaacaaattataccctaattttaactacatatattggtatatacgatcccaaatcaaattaataataagcccaaattacactccctttgatcgtatatacgtgcatgatgttttaaatgacagattggagaaggctacaatccggtcgcaaagaggggattatatgtgagggatgttcttcaacggtttggactaacacataaaaggaattgtagctcttctgcctattctgcacagtattcaaagatcaggcatgatccgagtttggaacttggattgaggaggtaaatatttactgcctctggcacaacgttttttttttcagttttgaatggttaaaacaaatagtagcattgtggagtcaattcagtgttaatcttgttattacattggaggatgttgcaccatggttattaaccgtggcgtcgcgaaaacaatgtggcggtcagcgacttttagggtgtcccgccgcctcagtctcgagcctatggcgtccgccttaagggtaaaagcgaccccgtgtcgttgttgtggtgtcatgaggtatgcactacagatcagagtgcggggaaaatttttagccaaggacatatataaactcaccaagtccaaacacgttggatccctaatagagtgagagaaatagagaaaaagaaatagatggctcccctagaaaccctagatgtagcgtcggtaatccaaatcccctttatcgccacccagacatcagctcctctttgaatatacactatagttaaaaatgacctttaactatctaaattgctgctttatatgctacaatctgtatgaagataggatatgtgtagggtgtcactaagccttatgccttaacactatgtcagtaattaagtggtgtggtgggtagccttaccttgccatatactggcttaataaaccattatactactaggccatgctaataatttatgaggagttcagcatattcaatatatagctggcttacgagaattatgatttgcccaccttctcctataactctaggggaatatgatttggttttatgcaatctataccaattgatcatcttaattaggaaatccataattccaaattttatggacactttatgacatgaaaaattaaagaaaatgcatatgccaatgtattgtatggtcatggaattaaatagacgtgtggttttttaaggcattaggacctatactaattagggctatactaattagggctacgtggcattgttagggttttctgcgacttaaactattaaacgtttcatgtttgctcaaaatttacactataaaattttatccttgaatatatatactaccactaatgttcctaactaaatactacctccgtttgtttatgtatgatgttgttgactttttacataaaatttgaccatttatcttattaaaaaattagtataacgaatatgtaatagtataaattaaagattatagtttcttttatgataaaacaaatcacaataaaataaattatatatattttttagtaagacaaatgctcaaacatcacgtcaaaagttaataatttatttatttatttattttattttcaaaactagcaaaaatgcccgtacgttgcaacgggtgaaaaaattgtaatgataatatactttttttcatgaataatcatgccaatcacaatgtttgtattttaatgagcagcttgttttttatataaacggtcttttttttcttgcgaaattttctcaaaccattcagaaatggcgcatttctttctaaagtttctttctagaatgtttttttttgcttttttatttacaacgaaaaccatatttttctccctttttttcttttcttttttcgtgtgtttttttgcctttttttacaattattttctcgcgcgtttttttgcttgttttttttcaaatgttctttttttttgctttttatcaatagaggagaatatatgatgaaataaaagccgtgtagtaggtggcaaaaaatcaatggatcctattctactcagagcgattttttcaatagacggtgtctttttcttgcacgattttttaaaaccattttttaaaatggcgcgttttttctgatagttttttcctcttatgtttttttaaaaaaaattaccgatgatggaaatatttttcttgcgcgtttttttatggaagatggaaagcctttttagcatgttttttttttgcacttttttttgacttttttctcacgtgtttttttgaatcgtttttattttctcgtgcattttctctttttaaatagttaggttatattagagatagaggagatatatattgattagaaatcagactttgttttgtccttttcattttttttcttgtgtgcattatttattttatatgaaccagctttttattttttagaactatttttttcgccactttcttagggaatcggacgaactttttaagatgtttttttcctttttttttgcgtttataggaatcagactttttcccgtttttaaaggaatcgaatctaatatttttgtcaccacttttttttttgccttttataggaatcgatttttttccgttcggatctatggttttttttcgccacttaggggaattgttgtttttcttttttttgcagcttttctttttctttttatgcacctttctccttttgttctctcttttattattacttttaacaaaaacgatgtcaagtaccttattgcaaaattatagggactcaaatgtaaatataaaagttacagtaactcaaatgcaaaagtacaaacccaaaaattaaaatcatataaaaatggaatgctcttgacctataggttccgttttttaaacatattttcaatctggcacatcattttgtttcaccaaaatgtgtgagatatcacggtatagaatgaaagagtggtggcgggtatatcgaactcaaaaggagtggcgtcttttatttttcgtttttaagggggaatcggatctatatcgaacttttttttccgtttttgagagggaatcggataggagtcgaacttttttttattatttttttcgctttttttttctttcatccgtttttttgatcggacaattatttttgggaatcagacaaattcattttttccccgatttttcttttaccgcgtcatatttggtttttcttttcttttttcgcacgttttcttccgcccggtttttttggatcggacaattttagtttttttcgccggtcttttctcgcccctttttctggataggacagatttgcagatttagtttttctttttttcgcacgttttcttttgcccggtttttttatcggacaattttggttttttttcgccggtttttttgcctcttttttctggacgttttctttcgctcagttttttagatcggataaatttggtttttttcgcccgatttttttgacggacaatggaagcacctcttatgttttaagtagtagagatagagatatgttaattttgattaatccagatcgaattaattaacatatttaaatatatgtaatgcatgccacgtactgcagattattggacggtttggattatcatcagcacagaaaaatgcctactgcagctctacttctccacaacaacgaaggcatgcgaatacactactgcgtcgatttagggacaaaattatccaaacctggaggtaacaagttttttttttcactattcaaattaagatgaaaattgagggtgacacttaatttgcacgtttacttcaagcaaatgtttatatatatgtaactaccccatctacacattatatatagttacttataatatgtgtttacgtcacttataaacattgttacatttacttttaaagaattatatatatatatatatatatatatatatatatatatatatatatatatatatatatataagatgaatacaatgaaaaaagacaatactagtaactattcaaatggagttgaaaaaaacaatgcaagcatcatctacacctgatcatcgacatgaaaggaacggccgtgaaacaggaaactaacatgactatagaattaacatactttagagcaacttgcatgttttgtgttctgaggaagaattaagtagtcactcgaattgttaattaatttttctagtaataaatagaaattaatccggtatgtagacaactaaagtttaaggaaaaaaatttaaattccagtcctcacaactgagaaaaattacagataatttatttagagtgtatatgcacttgtactagtaattaatttgcgtctgtcttttttttttttgaattgaaggcatgaagaaacacgtgagatgatactgaatgtctctgcaatgctgggtttggttgctgtcgtcgccgtcgtcggatgcattatgaagccccactttgaggcccagctagagaagcttgcccaagcttttgttttgttgtttctactggctctacttcaagcaatggtagaaatgcaaaaggaacgacggcaaaagagcctagaagatgatcatgctgatgattctgaagagagcaagaagaagctgaagccaacaaaaacttagaaacttttagtagaacaagttttacattgtgcaaccatgcatgcacataggatcaaaataattatgtatacaggccggggagtagtggattattccagcaatctacatttttgttttgagaaacacagtataaatataggcgctcacaacatgtataagttcacatctataaacatacacatatatacacaccataccccgttacaagatatacaactttttaccaacagtgattaagtaataaacccacggtttcaaaaacattgtaggtgattgtcaagttgatgataatgtagttggttattttatagtctcctatagtctttttctgatctccaataatataggttgttccgttacttgttgaaaacggaatacctaagtgcaacggattagtttacagagaaattttgattagctcgtattatatcatacactttccgttatcacttggtaatttaacaacgtttatgggaatttggccattgtgatgacgggataggaagccagctttttttttctaactccaccttgactgttcattaataaaggacccccacccgtgacgcggtgcgacccttgcacccccaacacccacccccacatacacacttcctggtgtttcctcgggcactagcggccaaagaggaagcacaaagaggaaataagtggggtctatcttcctagcgccaccgctgcattcaccttaccgccgcctaggtgggcaagaaacaagctaggtgacaatgcaatgacctcgaccactccagatcttggtccataagtgccctccttgtcatcttcgccttcttgctgtccagccccccaccatcgcatgccacaatcgagtttgttctcaatctacgtctatcatgctcatcgtcaccagatcaattggaggggagagagagagaaagagagaggaggggaacgacgacggcgagatagggatggacaacagcagcaactgaagaaggaagcggtggaagcgagatagggaggggcaatgtctagatgggagtcattcgttcctctttgatttgatttgcccgaggaaggaatgcacgagagagggggaggatgggaaaaggagaggggtaggtggctgaaatgtggttctgttaggagggaagggtgtatgttaggtctttttttcacagggtccaagctgataaggtcttaattgatttggtaataaaaaaagtaaattattatgttggcaatgcacgaacttgttatgtggtggaacctgctcactagagttcaagtcctagacttgagaaggatgctcatatatacggctaattattctttttaaggtagtgatgagtttatcctaatctcaaaatatgttggctcggcctttcgaaggttctcataaggtcataagggtaagttgtgcgcgcgtacgtcataaggtgattgtgcatatgttggagcgtatgcatttgtaatttgtttctaaaaaacacacaacattagttttctttattgccaagtatacacaacattaattttttttattgccatcccatcaaaagtgtttatagagatagaatgtgtgcggatgtgtttataggatgattatatatgcaagtgttgtgagctcgtgttattttaaaaaaaaagttcccacaacatttaatttcctttgttgccatcccatcggagtgtacgttgattttacgtaccaatcgatcgacagaaacacgtactccctccgtattttaatgtattactccggtgactttttggctaacatttgaccattcgttttatttaaaatttttgtgcaaatatgagaatatttatgtcatgcttaaagaatatttaatgatgaatcaagtcacaataaaataaatgatagttacataaattttttgaataagataaatgattaaacgttggataaaaagtcaacgacgtcatacattaaaaatggagggagtactatacaccagccttgttgatctctcctctctctctctcgcgtcgctttgcgttgcgccatcgacgacgattacatctgttgcatcacccaaattaaggtgaaccttggtacttactgctggttcgtcatgtgcccctgtctactgcatgattgattccataatttgttttactgctcaattctgcgtgtgacgattctaggagatgttcggttagatctgtgatagtctatgatttattaattcttgtgattttggttgtagctaggatgccgagtggtgaatataattttcaaataagatatatgaatggtacgtcaaacgttggacacggatatccacgggtgtacttattttagtacggaggtagtagtaactatgtggtggggttagtaatcgagtgttctattagtgttcggtcctagcatactttggactgaccggtctttgcacaaatttgatttttttttcaaaaaagaaaaacttagctcaaaattcaaccgtcaacaaatatcaatatcaccctatacgtcgccgacacgacacaataataatcgatcttgtcattatttgcgttatttccgagacaaataagcttctcgtcgacctgttaattaattagatctcgatcttgatttggagtggatcgatcatatcatggcgctactacgctgcatgctcacgaggacgaggtttattatccccaaatcgtcagccaccctccggccagcgccgccgccgccggccgggctcctcgccgccctcggctgctctccggcggcggccggtcctctccgcggtctcgccactctctcgggtcatcagctggtacgtacgtacgtagaacgtagttcgatcatcaccggcctaaaattactatcgcttaaaaaaacgtgaatattaaagaataacctaatatcaaataatttaaaatgggtgaggcttcaaactcaggtcatctagcccaccaccttatggagctagctgaaagatccatgggtctcaattctaccgcttgatctgcagtttacatgcaattatattcatgcaagctagcttgattgattattactccacgcgttataagtgtctgcgcgtttgtactgtgtttctgaaaacataacaatgtaagacgcaactattattcttcatgtttggtaatacaagacgtgcatttatacatcaaaataattatcatatcttcttctaaatttgttttttttaatccttcaccctcaagataattttattggatacatacatcgtatttagtaattatttcttggtttttacgttagaggtagttacaccttatatttaggattgagtgagtacatacttccttcatttcatattataagactttctagcattgtccatattcatatatatatatatatatatatatatatatatatatatatatatatatatatatatatatatatatatatatgttaatgaatctagacatatatgtgtccctagattcattaatatctatagaaatatgggcaatgctagaaagtcttataacctgaaatggaggcagtacaagccatcgatcgacgattttatcatatcttttggtatatggtatatgaatatagtatatctcattttataatgggttatttagattcatgccactattaattttacagatttaaagtatgccactactatttatctatttaaaatcataccgctacaatttaacacatatttaaaatatcactacttacccttttcataaaccgaaatttatttatttattaccaaatttctcctatcttcttcccctgatccccttctctctccactccccttcctcctatgtcccatctctctcttgatctagaagagacctagttagcttaggtcaagggaaactgagatccaagagagaatgggaaggaatgagtggagagagaagaggatggataggggacgaagatataggtaatttggtccaaaaataaatcccaatgcattgaaaagctatgtagtgactttttaaatatatattacattgtaatgctatgactccaaataaatgaataatagtgatttatttaaaaactatgaaagttataatggtgtaattaactcttttttaataaatgatgtaattgaatttttttttcgttacattattctctttcataaaatatttttttttgcaaataggcagctaggcatgcttaaagtagttttaaatttttgaaagaactttgcttaactaagcatttgaataaaaagtgtttgtgaaaaagtatgagaaaacgataaactgcatcatatttaaaaagatggagatagtatcatagtatatcccaatcaaattaaggtatatgtacttctccaccatcttcaggcaggttggtacgtatgtagttcgtcatcgatcaacccagcctcttaaatcgtgatttatatattctttttctcccttgatatatcgatatgcagttaattaatcacataatcagatgcaatcaacaataatagtaataattatatagtataaataacactggacaaccaaatagcaacttcgtgtcaaataattaagaaagtgtaggcggcgtacccctttcgctatactatcatgtgcatttcattgatcatataccttttgatacccatttctcgatagaattaattaattaattgctcaaatattgttgttaagtttagatgctctctgctgataattttaaccttctctgctgataaattgttgtgacgtttaaaccgacaggttgataaaggatgctgtagcaatccagtcgcaaagagaggagcatttgtgagggatgttcttcaacggtttggactaagaaacttcagctcttctatgtattctcaaaagcatttaaagctgtcacctcaaataagtttatttttaagtaatcattgtgtcgaagtttataaaagaagagaataattatgttgaaagtagataaagtagaaaatagttgcattgaaatttgataaccttgggatattttaatctttttggtttattggcatgtgtcgaatcaatgaaaaatgaatttattttggaagaaaggtagtaaatatttgctgcctctagccacgaagtttccttttcactttttaaatgtagaaaattagaaagattttttccctataaattatgcgaatcgctcatcactcaccacttcaccagagaagccttcggccttctacaccttctctagctcaggtgatcaccaaatcattttcatgaagaaatcaatatttcaaatattaattgtggacactttattacatgagcattaattaagtaaatatgtgccaatatattgtattgtttggaaattaaatatgtgccaatagttgcagttttataaagcattagggccacataattggtgttatatacaccctacatgttttaatagatggtgatattgatttttcgacatcatgtttgttcactagttttattaaaatgtctaaatatcatttgtttttattgtgattttttattatcaaaggtagtttaagtataacaaatttattttctatttacactaaataagacaaatggttagacgcaacgtctaaaactcaacgacatcatcaattaaaaaatggaagaagcaaacgccaatgccataataaccaaggttttctacaacttttattaatttaaccataaaaccttttgttattttgttaaattttctctattaaatactacatcaaataaaccaataattcttccaaataagatattactagaaaaacacccatgcattgcaacgggtgaatgctattttaatcgataattgttagattttttctctctagaaagtatatgggatttatcaccaagtactagcaagcacaccatatatagttattttgatcatgttaccatgtatgcatgcatgtgtatatgaccatcaaacagcacaatcatgcatcacttagaagcttggcgtatttattttttaatagaatagtacttagaagctttgcgtatttatttgatagaagaaaagattactgttatttatttataggcacaaactttaggataagatcgacaccgagagtaccaaataaaccttacatatttttttcttatcgaaaatttgacttatcccattattattcatgtatctaaattacacatctagtcaaattataatttgactgcacacatctatttgagaaagaacatacgggagtaagtttcatgtctttgcctcactttttttttttttgtctagggaggagggaatacgcgatgagaaaaatactgtccactacagttttgggtgtatattttgccatggccgccctatgtctcattctgtttgatcttgaggattggtttcgtgattatttttcttatgttccttatattgctggaagaataaggaaaaaaaatgcacgtagcataatactgaaagccaatgctcgcggttctaatgaaagcgagagagaaacaaagcaaaaattgacccaaaaatcctcgagttttgcaatgtgtacctacaaaggaagaaataattgttcatggattctactaattacattacttcattgacaaaatggcttggaatgctccaagttcctgtggttttaagcaaattacagtaaccactatgcaaatttcagtgacatagcaaccaaggacataatattcaagttcatgtttaggttcataaggttcgaataacaggattaaagatcgtgcttaggatgccaatttagcttaacaaatgtgactgccacgcgacattaagctgtcaataccaagggcattaaaatctgcatgtagccttctccaatggcaccttttactgtctggttcaatagaatgcatgcactacaaatatcatagacaattaaacaaatactaagcaaaagcacaactaaaattcaaaaccaaaccacaaagcatagcaacagattgaattcctgaaagattggacaagacacgagcaaatgcagtcatacacaaaccacaacaaatgggcaaacagatcctcagcttcggatgatgatttgtattaaaagcagacgattttcagcacggtaaacataaattcagaggttcaaattttgctcatatctccctggctcgcacttgaaaagaattcttatctcctagcaagccctagaaccaagcataaattaaaacaaaaggtacagaatgtcgagcacacgttctggatataagaatgctatatctagtgcgatttgacatagtcctgcactatgttaaggccctcagactcttcaccatagtcctgggaaatgaaaatgaacagccaaacattacaaattgccatcttcaaaggaataattccaagtgttaaggtgagggatcgattagttaccttgacaacgacgcaggagcagcccacaaccttccttgccttgccctcagagtcaatcttgcaaagctgcaaatgacaatatgtattgttaaaaccaggacaagaaggcttttcatataactgtaaattaaaagaaatacacagaacaaaggaaggtggacaatgataaatcataaatatacgtgccaacagaaatgttcaaagtttccccacaaataaaacaaatatactacctccatccctaaatatatgacggtggttagttgaaaaatgaactaaccaacgtcatatagaaaagaacagagtataagaatatcaatattaacatatagtaggcacattctcctttaaacactggtgaaagaatgtctactcatcaattgaacctacatcctatatggccctcagtgacagagacaagagggatggccagtggcctggccccctccaacaattttttttcacataatcatttaagtagttaggtaattaagctaagtgacagtgtattcggccccctccaagagtcttaggcccctcccatgtttaaatcctgactccgccactgatgggtgatggccatataggcaccagttaacacaaacaaaggacaacaattaacaaggtatagctattaggacataggcagcagactaacacatatcaagaaaaacaattgacaaagtacttagaagaatcctgtaactcacccctgcccactcgccaagagtcttagcactaggcacggtaacaaggtgaacgttgtgctcagcacacagagccttaaccaacttgacataatcaggttggtcgcagtcctcagcaagcacacaaagctgagcagcatgcttctcgatggccttggcagcctcacggagacccttcacaagcccatcatgagcacttgacttcttcatcacaagctgcagagcagtcatcagatccatgggctccccaagaaccggggcagctggagtctcaactggggtctcctccctgtaaaagtgtttagatctcagcgaaaatgaataggctcgctacaatacatcaatgtttcaaagaccgagatgcacataagatctattaacaattactagtaatacactttacaaggtatttttagttctcttctaatttgactgctctttcaataatggaggtccaaatactttggcatgtacgtggtgttacatttatacaagaattgagcacccataatataaaaaatgcattgtttctcactactggtgacactgtacaaattcagtacttcttggatgcaaacaagacaattaagttggataattcaattccatataaacatagtttgataagcaattgagctttttttttcaatctggctgtgaatttaccgtctacactccttggtgctagtacagaacaggcacatatcatctgatatgaatcatgattgtatttgctaaactagacggctcacatacaacgaatccaccaactatactaccagctgccaaattctaaatcaccaagaccccataccagtacagcagaaatccgagcaatcgcactcatgactcccacatcctttcactcaatgatcccatcgaaatggaaaccaaatgacaatttccccaatcaaggacaactcaaacatgataagaccaaacgattcttgagcgagcagtagcgcagccaaggctcagcaacaattacacagtaataacagtgttctaccaacagcagcaacagcaagaacaggctagatccaaaatgctacgaggatagagagagaaaaaacatggaactagcagaggccaagaagaagttggttgcaagaacttacgccatctccgcgctcaaaagaccggaacaccgactgcgacgaaacgatctgcaacaaggaaaacaagcgttctcagcacgattagcgaccgccggcgcactgacgcggaggaacaagaagagcaacggcggcgccgcctaccttgtggcgaagagcggcggcggcggcggggttagggttttcgcgaggagggtgaggagtgagccgcgtgggagaaggtgttcttatatatcgcgttcactatcgggccctgatgggccgaggagctccccaattgggcctcataatgtccagagttagccttttgagcccacatgaggcccatcacgtgttgcagggatgcacatgggccggcccatctcatggcccacctaagatgagtcatgggctcttctggctttcactctgttgtgctaattgtggtgctttgtggatgagctctggcagactacggatctgtttggggagcttctagcagctgcagcttcttctaaaatcttcagttgccagaagctcccccaaacagtccaactttttatccagattttgagaatctgtagttgtagaatctagaaaatgaactataagccaaagctggatttcccagcttctccagattctcactagctagcttttcagcagctgcttctcagaatcttaagctccccaaacaggccctacatatgtcaccttcagaatcagaacactggtctaatgatgtgtcattagtgctaagaaatcagaacaaatccatgtaggagaataatataatccattgattgtttcttccttgaaaaggaaagatggggcgccaaacacatgtgcgtacatacatgcatgatgcatgtgtgacagttttaattagtgtttgcaaagatatttctgccacaagtggcactctatgaatcattatggccatagttcatccccactctaagtagccggtgagagatttttttttagacatatagttagtaattatttgattaagatcatttgtctctgagctttaagtctccctctctggttggctatgtcaatgtgtgggctacacgatgatatttgacaataccacttgaaaacgacatgatcacatactattgctgggagaagaaaggcttacttaattaactagtggacgcacagcataaattcttgtatacgcacacttcaaaaaagaatcaaattaagttaagatgagaaaatgaaatactcaattttcacatgaattaattcagatcctgcaaaattccttaaaaaaactttggtttcgaaggaggcctatactattggatggagtaagttttttttttatataatgctcgatgaagaacgaatattgcgcactatagattaatggttgtgaattgtgattaagcatgtcaataatccaatactttttattttctagatgacatggtccaatacatattgagaaataataatttctagatgacgtggtccaatacacatcgagaaataataattatgtaagtgggtctgaattacatagtaacatggaattagtttgctttatttatccagcaaaacatgagcttgggatcatgggatgtgaaaggttgtaaactgcaaagccctctagtccctactttaataaattaatcaaaataattagtggcttactttattctcccaattctcctctgcctccaagttgcatgaaactgaaaggcagataattatagtgctttgctttaatcccaaggaaaggagaaaatctcctgccaaattaagctggtattctttttattcagaaaaaaggagtataaagttggtatatatatatatattgttcgctttagaagaatcctaaaatttgtcggttggtatacctttgaagtttgaactagctttgagcttttgccagaaataataggtaaaaacgttgtattgctgcaaattaggaggtaaaaataatctataattaaccttggcaaatttgacaatatctatgtcggtgacatggggccgggggtatcgtgactagaggcttgggtagccgcggtcacccacgtggcctgagggcccgagggtgacgtggccacccctccctctgtccccccgaggggtcgggccgctcccgtttcggccccgagggctggggcgccccgaccccctgtggttttggcgccacgtgtgtgggttagatgagcacagcggggctcacctaaccgcatttataacaggttggacgagcgcgccacaccgcatttaatgcggcgcagcgcacacttatcctgtctgtgaccggtcgcggtgtatgaccggtcacagaccggtcagatcgcgggttaggtggcaacaggcggcctgtcacacgcctcgccccgtcccgtcggaatgatgagagcttcctggctctcgtccctagccggagccggcgtgctaactcttggagttggtatgtcagtcccggtcagatccattccaggcttcagcgcaagcatggcaaggaagtcgctggccattgaatgaatgttgaaatgggcgtccaccgggaaagctggcgaggggggcaggaggcgtgtgctctgcttgtcagaagtcacttccggctatagactagtcctcattgtaaaaagcatgtttcctttcttagccagctagaggcccttgtggtgacccctgactagataaaaaggaggcccaggcctaggagagagagagggaagagaaaaaaagggaagaggggttgagactctggcgaatgggttctagaccctgaactcttgctcgctctccggctctctggattccttcacgcacagatccaccagaacacaggagtagggtgttacgcttctcagcggtccgaacctgtctacgtcgctcgtgtcttgtgcatttcctctctcgcggacgttcctcagatcgagggcgaagaacctcacttagcgcccccggccgaaccggcaaaggggggcctgcgcggtctcccgatgaggagccccacgctccgtcaatctagttgaaccttctttgaataatgatgacctagacgcgagctcccaactgtcaggaatggaacatctcaccagctcaaggacgtggcgtgattactagccaagtatactagcgatgcattttgatcatgaaaagggccggtttgtttttttcttttgacctagaaagaaagtactcactccatcctaaaatgtttgacgccgttgatttttttaaaaaaatatttgaccgttcgtcttattaaaaaatttaagtttttttctatcatttaatttattgttaaatatacttttatttatacatatagggaaggagggagtactttagtatgtacggagcagcttttgcatatagtaatccaactatatatgccagttcagctcgtgcgagtaggctcgggataataactccataggtagtatttgctatgtctagttggggggtgtttagatggggctaaaactttttagcccatgtcacatcggatgtttggacgctaatttagaatattaaacatagactaataaaaaaactaatttcataaatgagagctaatccgcgagacgaattttttaagcctaattaatccataattatcaaaagtttactgtagcatcacattgtcaaaatcatggcgtaattagacttaaaagattcgtctcgcgaattagtccaaggttatggaatgagttttgtaattagtgtatctttgatactccaaattaatgtccaaacatctgatgtgatagggacttggaataagtctctgaaaacaaataggcccgaatgggtgccatatgccaaacataaaccgaaaataaaatcatataataacaataaacggggtattgcgccgtggctaggaatgggaggccatagtgagagaaatacataatgaagcctaaaattgatagccatgcatatcccacggtattattatcgcaatcgacaggtagagaatggcggaagacacatagacagccaatcacgacgactcgcaaaacattgttaagctaatttagcttatgttggcctatcatgcccttctaattttagttctcgaccatagttatgatattttgggatttagcattctagttatgctattaattaagtattttaatatttcatataattacgatttagagggccctgattttaggaggcactaaacagtcgcacacctcacagatgctaccgtacggccttgcgtcgagattacaaagttgacttgtccactttgacactgaaatatccatcgtatattgatgcaagctaggagtttgagttgacaagttaattggaaatgccaaataaaaaatctgttaacatattaatcatatggatgtgcaaaactcgtggcttggctcgtttgaatttgcaaatgagttgagctaagggtttagccttgagttggctggtgagttagctcacgagtcaaatgagccatgacaagcctcgcaaaaaaaaaaaaggccatgacgagcaacataagctagcaacacaccagcagtctaactagtactaaaatgctaccctctccggcctataatatagggttatttggaaccatgccattataattttacaaagtttgagatatgtcatcgatatctcaatgacatgtaaaacccacatgagtcaatgatatgtgggtcaggatgacatatctcaaattttacaaaattataatggcatggttccaattttccctataatataagtgattttgggtggacgtgacacatcctattacaatgaatctgaatagggatttt

SEQ ID NO: 4581 - DNA, 37455 bp, Oryza sativa
ttatattatgggacggagagagtaatctctaacagaaaaaaaaagaactccaacctagtacatgtgttatcctcgatttgggatccagttgtaatgcacaggatctaccgttcccggtgttagggagaacggagaccgtttgatcaggatcgaaggaatcgcattagctcacattgttctcctcgcatagtcgcatgaacagtacttctctgcagtactgtagatgatccgtcatcctcatatgtggcatttggccttctcgatcgatccctcccatctactagtcgtctcgtgccgctccgcttattcatagacctgaaaatttggactgaccttgctatatatacatgtgtttggtggattgtatgaaaatatgaagcaaactatgatttactatagcttggattgtatacaaacattttgtaaacttgaacagattaatgttggtttgagcgtgttggctcctgacattaacaagccaactcatgtaggcaaacgagccgggtcgagctaggcttaacgagctagtttagtttttgttattctatcaatttgttatcctaagtcagaactgagtccagttggcttgatatccagccatatgtgtgcacagtagcaattgaaaaagctataagaaatccattgacatataccaccaagatcgaacgtgaacaatttaatgcatatgttaattaggctttacgtatcacgcgttgcattatcttgagtcaaacttacgtgagtttcgtcctaagtcggactattccaataatcaagttcacaaagaaaagtattagcatgtataactttaaataaataaattataaaattatattttataatggatattatgctcatttgatatataaatatttttctaaagattttggctaagctcatgatagtttgactaaagaacaaaactaattttcaacggagggagtaacacaaggaaggatgtattcattagactatagctaatggagcatgatttcgagtctagactatgacatattcatggcaataattattctttcagtgatataagacatatccattaataatgagatgtccacgatgattttgtcaaatctcaatatataccaattcagcctttagaaaatattctaaaaataggacgtacatgtgtgtacgttcataaaaacaagtgtgtgcgtattgtaggcgtgcatgtgtgtttcaaagaaaaaagaaaaaagaagtccggacaagcacctatggttgagttatttttaaggacggatatatacgagtgcacgattgaggccgtgtttagttctcaaaataaaaaatttcacgctgtcagattgaatgtttagacacatatatggagtattaaatatagaaaaaaacaaattacatagattaagtgtaaattgcgatacgaatcttttaagcctaattgcaccatgatttgacaatgtggtgctacagtaaacatttgagaatgacgaattaattagcttaatctgtttcttttagaaatctaatttattttgttagtagaatacatttaatattttaaatgtgtatatgtatatccaatgtgacaacgtaccaagaacaaggcctgaattttgtgcgtgactgcgtgtgcgcagcgcgtcccaagcgttttcccttccgcctcgccgtcgtcgacgtcgccgtcacgtagcgtaggcaggcacatgcgcggcgcgtgtgagcgggcggttggacgacatgtgggcggggtgtcggcagcccaggcttcccccgccacgtggctttctctctcgcaaagcgaaaggcccaggagaagtactagtagaaccacacgaatgggccccacaacaagccaggtcctttcatatccactgggctttctttaattccttttacaattttattattattctcgtgaccaaattgcccccctgctgtgccatttagcgccccgctgcaactgcacgtgggccggtgcacccacagatacagcaccgttgccgttgcccgttgcccgttggatcctaggtttttccttcaaatctctttctgttatgactactcttttttcctttttctttttcatgccaagtatggctctttgttagcgcggcatatgccgacatggacaaatggacatgcccaagctttaaaaaaaaaaatgcatgcccaagcctatccatatatgccagtatgtacacacacccatgcttgcttgttttttatgttttctttttttctttccatatgcgcttctttccagttcatgtcaacatcacagctcgttctgttttttaaatagataataagtaccaatgagaatttaagagaatgacaatgttgaattgttctatacgaatgtaatatactactagtacatgtttactgaagttcgtccccctcccccttttaattttttttaataaagtttaatatcacgatgtcgaatggttctacataaatgtaatatatagtagtacatatttagtgaaattcatcttctccccgcttcaaaaaaaaagtttacacttcggtcatcatttataattataaatgtgtattaatttaaacggatacatacttaaattttcttaaccctatacttttccatcccaaaatataagaatctaggattaaaaaataagctatccatattcgtactactagaaaatgcctcatccagtttcttttattttgagatggagggagttcatacttaaacatgtagtttgtactatttatctaaataacttattgcgtgtttttcttacttgtcacacttaatacacttgataaatactttaatctttccataaattgaacaccattttttaatacatcccaaacactccccgtatcttcaccacctgtcaacctcgatcactctccatcgccaaggacacggcttcaaagggtaaaacggtcactccacccgtgaagtcaaaaaagaaggccctactgcttctttccagcagcaaaagcagcgaaacaaattttttttttttttgcgagggcagcgaaacaaaattaacaatcagatataggggcaatacagtaattcacgctttcctcctttgtctcctccccttcctttgcttgtctagtagtgtcttcttcctcctctccctttccttcatttggcaacctccacaactcatcaactccactcctcccctcccctcgcaaaccaaacccaagcaaagcaagcatccaatgcttccccccttcctccctaatcacccccgctaatcgctcccgacgccaccactaatcgaagccggaggagggaggcggcggcgggatggacaccgcgtcgttcgtgacgtcgctgctgacgtcgttcgtgatcttcgtcgtgctggtgctggtgttcacgtggctgtcgagcaggccgggcaatgcgccggtgtactacccgagcgtcctgctgcgggggctcgacccgtgggaggggcgggggcgggggacgaggagccccgtcgggtggctgcgccaggcgatctccgcctcggagggtgacgtcgtcgccgccggcggggtcgacgccgccgtctacctcgtcttcctctcctccggtataataataatagcaacaacatccctctcccctgcgctctcttagttcagttcagttcagtttatttcaggagttgagttggttgtgattttgctccaacggaaaaaaaaaatggtttcgtgcgatttcttcgagtattttcgggtcggggagttctaaattttaatttctaggtgcccctgtagtactgaatcccaggaaatttggtccagagatttcttctcacttttgtttttttgttatccttttgtttgcagaagtagtagtaccgtgtattatatataaaaaaactgataaaaaatatttttatgtttcaccgtttcatgtaccaacataaagataacaattactactaattcatgctttcttagactaaacaatttatttggagaaaattgcgtggctctgtaaggccttgtttagtttccaatttttttttcccaaaaacgtcacatcgaatctttggacacatgcatagagtatcaaatatagataaaaacaaaaactaattgcacagtttgcatggaaatcacgagatggatcttttgagcctaattagtccatgattagccataagtgctatagtaaaccacatgtgctaatgtcggcttaattaggctcaaaagattgtctcgtggtttccaggcgagttatgaaatttgttttttcattcgtgtccgaaaaccccttccaacatctggtcaaacatccgatgtgacacccaaaaattttcttttcgctaacaaaacggggccaatttataggggcaagtcgtgctgaatgaaaggttggctatagaaaactatgatgcatggaggattgccaagtatgaaattcagcatgttaattgatttatgctgcactttactgattaaatttggctaaggtgccattttggctaaaaatagctaagttgatataacatattgacttgccacctattatgacaatttgtttaataattttctcttatgttacagtgttgtccatcttggtgttctctgggattgtgctgcttccagttctgctacctgttgctgctactgacgataacctgaacctggaaagggctattggcctgaagaatggcaaaacaccccagaacttcacagagctcgagaaattagcactgggcaatgttcaagtaagtggcccttcaactcgagtttacttgcatggcttggcttgttaccagtttatgatgtatatgactataggaatcgcacggcaccagtattttgcttgctgagattgtcccttctgtaaaagaaaaggaacaaatataagcatgttgttatatacaaaaacatggcaaccatattccctgattgcttgttactatttacatgtcactgtatgatcattgatcagcctagtgttcctttctgttctgttagctccgccatttccaaagttttgatccaaatggatttgtgatgatcaatatccttgaataactgccatatcagtttacgccctatggccaattggcttgtagcccagtatgagggcctgtttggtacagctccaactcctaaatttagctccaagagtccaggagttgggtctggagtggagttgtggagttgcctaaacccagctccacaactctagttcattttgtgagagagctccacccagctccacttccagttttggtggagttttggtggagctgaaactgtttggctgaactccaactccaggaggggtggagctggagttggagctgtgccaaacaggccctgaattcttgatgtggctgcttgtaaagtctctcaacattgtattatgaatttgttcatgtgtaaattatgagcaatcaattagtacagaaactggtcttttatttttctgtagaaattgtagagatagaacttcctaatctccagtcaaggctagcattcaagatcctgattatcatataatcatactcacagccaaactcctttacattttctacaggaacatagccgaaggctgtgggcatttctattatcagtctattgggtctcttttgtcacgtacttcgtactatggaagtcctacaagcatgtttctaatatgagagcggctgcaagatcaacaccagatgttaaaccggaggagtttgctgtgttggtgagagatgttcctaagccacctcctgatcaaactataaaggattctgtagactcatatttccgagcacttcatcctgataccttctacagatcaatggttgtgactgaccacacaaaggtattgccactcttaagatgtttttagggggactgatggtccttgttttatctttcttgtatacttgtgcgacatgtctcagaatgtaccccaaaatccatgtattctgatcataatgcactttgcaggctgacaaaatttatcaagagattgaaggtcacaaacagaaaattgctcgtgctgaagttgtctatgcggagtctaaaacaacaggcaagcctgagggcaccaagcctacgcatcggattggatttcttggtcttatcggtaaaaaggttgatacaattgagtattgtaatgaccaaatcaaggagttgctgcccaaactggaggccgaacagaagactacccttcgtgagaaacagcaacaggctgcaattgtgtttttcaacagaagatctgctgcagcttctgcatctcagactctccatgctcagatgtttgataaatggactgttgagcaggctcctgaaccacgccagataatatggtctaatctttccaagaaaatatatgagaggcaaatcagacaggttgtggtctataccattgtctttctcacagtggttttctatatgattcctattactgctatctctgctcttacaactttggagaagttgagggagaagcttccctttctgaaggtggtggtggaccaaccgaaaatcaagactgtcctacaggcttacctcccgcagcttgcacttattgttttccttgctttgctgcctagtcttctaatgttcctctcaaagctggaggggattccttcacagggtcatacagttagggcagcagcagggaagtacttctacttcattgtgttcaatgtcttccttggggttactattagttccacattgttcagtgctttgacaaccataatcaataaccctcctgggattgtgaacatgcttgccagcagccttccaggaagtgcaactttcttccttacatttgttgcactgaagtaagcaatgctttcttctcacattatgtacctggtattgtcagctatttccatcctacacgtctgtacaattcagaaagtaacttttcatttgtttttgttgccagattctttgttggttatgggcttgagctctctcgcttggtccctcttatcattttccacctgaagaggaagtacctatgcaagaccgaggatgaagtgagagcagcttgggctccaggcgacctaggatataacaccagggttccgaatgacatgctcatagttacaatagtgctgtgctactctgtcattgcacctctgattattccatttggtgttgcttactttgctcttggatggattatagtgaaaaatcaggtgagccaagagttacttgctttaaccgaagttttaacacactaatattgaaactgaattggaaaggacaaattaattagtagtttcccattgtcgaatgtaggttatgaaacctacttcagcatgaacttctgaaatccgctttcaatcctttttaatactcttgagtctctgatgatagccattgctagataaactttgtgacggggtaacctttcttttaacgcaggttctccgagtttatgttcccagctacgagagcaacgggcgaatgtggccacatatgcacacaaggatcattgcagctctactgatttaccagatcaccatggttggtgtcatcctgctgaagaagttcttgtactcccctgttcttgtgcccctcatcccaataagcttcatcttcgcctacatttgccatatgcggttctacccggcgttcgccaagacccctctcgaggtggttcagcacaacgtgaaagacacgccgaacatggatgccgtctacacctcctacatcccggcttgcctgaagcctgagaagctagaggatgtggatatcttcgaagacgcccagttgcacaccacctccagagccccatccatctaatgcaagtgctggttgcttgtgtcgagaccggagagtattactcatcatcactgcaaacgaatttctgatgaatttccacgttgaaatgaacccctgtgaagtgtgaatctgctattgccaggataggaaaacttatgtcatgtccgtgtacataatatgcactcgggattgcttgccttcttaatgtgtgtgttgaggtttattctttacttcatagttctaggtagctgctgtggatatcgcgcctttttaagtttaagtttctatcatatgttcatgctcgtggtgactgctaaatctagtcctcttatgtgtaacaaaactcagaaatctgttgcctagtgcaccgtaacctgattgataatttactgatttactcattgttactgttcattgaagctagtatcatggctgactcggtgtccgagaatgttgtcatttttgctagaatcttgtgtattaaccctggagggcaggcaggtcgtgagttgcaagttgcaaccgctgcactcgccagcggacggtggcctcgccgtcgtcgtttctccccgttggcatgggcctttttgggcccagacatattggcccggccttggcccatctaaccagcccaccgcgttgggccggagattcccggcccactctgcagaagagcacggctcgaaatcgcgcgaaaatccacagcgcccgcgcgggcggcggcgcacgaacggcggcgagccggcgaccagatgcccctccgatgagcgaggcgatcccgtccacccgcccggcgctgcgccactgcgtcgcgctcctccgcctccacctcgccgcgccatccctcgccgccgccaagcagatccacgcgcgggcgctccgggccggggtgcccacctcccacccgctcctcgccaagcacctcctcttccacctcgccgccctccgcgcgccgccgctccgctacgccgtcgcggtactctcccgcctcctcccgcacgggccactagacccgttccccctcaacaccgtgctccgcatcgccgcgggctcgccccgcccgcgcgtcgcgctcgagctccaccgccgccgcctcgcgctgcccgacacgcacacctacccgccgctgatccaggcgtgcgcgcgcctcctcgcactccgtgaaggggagtgcctccatgctgaggccgccaagaacggcttcgtcacgctcgtcttcgtccagaactcgctcgtccacctttatggcgcgtgcggcctgttcgagagcgcgcataaggtgttcgacgaaatgccggtgcgtgggcggaaccttgtctcgtggaattcgatgcttaacagctttgcggccaacgggcgacctaacgaggttctcactgtcttctgggagatgttgggcgttgactttgcgccagatggattcaccatagtcagtgttctaaccgcttgtgcggagtttggggcgcttgctcttgggaggagggttcatgtgtatgtggaaaaggttgggttggttgaaaattcgcatgtgagcaatgccctgattgatctgtatgccaagtgtggtagtgtcaacgatgcaaggaggatatttgaggagatggggttggggaggaccgtcgtctcttggacgtcgttgatcgtagggctggcagcgaatgggtttgggaaggaggcacttgagcttttcagtctaatggagagggagaagttagtgccaactgaaattactatggtaggagttttgtatgcatgtagccactgtggattggttgatgatggatttaggtatttcgataggatgaaggaggattatggcatttcaccgaggattgagcatcttggatgtatggtggacctgttggggagagcaggaagagttgaggaggcttacgattatatcatcacaatgccattggagccaaatgctgtggtatggaggaccttgctgggttcttgtgctatgcacaagaagctggaactagggaaggttgcttgggaacggttggttgagcttgaccctgggcacagtggagactatgtgctcctctccaacctttatgctgctgttgggatgtgggcagatgttcatgtgcttaggaagacaatggtaaaagatagagtgaggaaaaaccctgggcatagtctcgttgagctccgaaactctgtatatgaatttgttatgggagacaggtcacatcctgagagtgagcagatatatgaaatgctggctgagatagctgagagattgaggcgagaaggttacatccctcgcacaagtaacgtattggcagatatagaggaggaagagaaagagaccgccttaaactaccatagtgagaggctagccattgcatttgccttgctgaagtctcttccaggcattcctatcaggataataaagaacttgaggatgtgtggggactgtcatgttgcatttaatctaatatcaaaagtttatgatcgtgaaatcattgtcagggatcgaagtaggttccatcatttccaagggggggcatgttcgtgcaaagattattggtagttgattcatgtaaagattgacagtgataaaagcgtggtttatgaggttccatgccaatcagataactggtgctgagttcttgttgcataacatgttctgtagcatcatcatatattgatagtacaaccttgacgatggacactgaacactacctgatggtacaagtgagaaaactacaaagatatgaggcatgttatgcagacgacccagcaattattttgttgatatgcttataaggtaccagtacaagcgagaaaactacagagacatgaggcatgttatgcggacgacccccaattattgtgttgatatgcttataaggtaccaaactgtggcttttgtctgggatccatttctttccttttaattatcataccgaattttcaaaactgttttgattctgaatacatacatctttgaaataagccttataaaattgcctgagttttatcaaactttattctgggtgttccacttatatcggacctgatcctttttttaaagaacatatcaggcatgattctagttacaaatttaattccatacaaagcactactgtagtttattgcttggcttccctttatgtatattggtaagcaataaatgtttccactcattggctaccgatatgctatagaactggatgctgaaaagttgcactgcattaaactataagatctttcttttcgtttctttcatacaacatcaaactgtctaaagcttccagagcaaagttaagatacaactttcatcatgaaaacactaaagtttttatcttaatattatgcattggtgttaaccttttaatggatgttgcattgttccatatgtttctactttctactcatggggattactgttgacatttgtgtgcaccacttccatttatcctctttttggaaactgtttccagcaccatcccaaattcactatgtaaaatgtcttactagtgcgttttgttgcattctgtacgtatgccatttcagttttgataagttattttacttaacctagtttttttaatggaatcagcacaagattgtgctatttcattgaacaaggggtaaaaaagtacaggccctaggggcactggacctagttttttcaagatctgattttctttatcaggttctctcctgtattgaacccttgtcccaggttaaaacatgcagcattctccatgtaatcttcaggaaacctcttcattaggcttcactctttacaaagtgaatcaaggttcttcccttaatcctcaaggaaagcttttctcattaagccccgacatatgctaccatgaaacaacaaagaaaagaaattagaacatgcacttggcccctttcaatcttatggaatctattgcctaagtttctttttgttcttttagaaataatgtccatgcttgcacatcttgaaggcaaaaggaatctcatggtttcctggccttcaagtcattctcatccatattattctattatgttcataaaggtccctgcattggttgcacaatccaagaaccagcagctgctggtataatcatttataacatgttctgctccaggcattacaataactgcaacataaattaatagacgatcggcatggcgattctcatcatggtaaagctcactcatttatcaattcaatgacagcatataaaacgtcggtagggtctgcagatattacaattttgtaagaggaattatggtaaagtcatgtttgtgtagattcgaaccaaattagtcaaatggtgaccatatggccataggaactgggcgggtggctctctgatagctacaagatgcatttctctctgtacattggaaatatgggatctttgtgccacttttcaagccatctcctccctgctatggccataaatatgcaccacggtggggacttcttttagttcgtgtcttgcttgcttagtaattcgagtgaaaccctgaccctttcccatgaacaagacaagctttcctgttgatacagctgcccttcgttcagacactcaatatattccctaggccctcacattgaggagagagtggtagatagacaaagagggagagagctgagtgaaaagcagtgactgctttcagttcggtttcaaccatgaagagaaagcagttgatcatgcacagccttttgattctgggatggttcataggtgggtaactgcactgctcttgttctttgcccgtgtcttctccacaaatatttctcatactaagtatttgaatgagcttgctttgatctgttagtagtaccactgcaaactttatatgcataatctcagaactagctgtatctatgaacagactgttttgtttgttcacgtttagctgtaaatgttcagtcaatccgatcatcacaatgttctcactgactgttttgtttgttcacgtttagctgtaaatgttcagtcaatccgatcatcacaatgttctcactctgtcatttcctctgtgatcagtctcagcagcaggcgcacgcgtcgcgccacaggagaaggcggagtccgcgacgccgatcccgacgctgtcgccaccggaggggaacatgacgttcgtggacggcgtgacgtggtgcgtggcgcgcccgggggtgtcacaggaggacctccagaacgcgctggactgggcgtgcggccagggcggcgcggactgcaccccgctgcaacccggtggtcggtgctaccagccggacaccctcctctcccacgcctcctacgccttcaacatcttctaccagcagaacggcaactccgacatcgcctgcaacttcggtggcgccggaaccatcatcaagagaaatccaagtaacacaacaacagacagtttgtttacatttttacaattcagcattgttcagtgacatctgtaattgtaatttacatctgttctttgtgttcttgataggttttggatcatgcaagttcctggcatccgagtaagttcagtccataattgtttcagatgttcttctttctccttattacatatgactggtaaattaattaaattttgctggattggtgcaggacatctgctgcatcagcactgactcgaggaagcatgtggatgatcttcgcagctgcgtctatgatgtttcttcatctgagagttttccaatccgtgtgaattgggtcgatgctaccaaagtaattagtacctgtggtggtttggttctctttgtagtatattacttatgtaagaagcaaggaacagtgctagttttttcgtgtaaaattgtgaagattatatattactacctccatcccaaaatgtttgacgccgttgacttttttttaaaatgtttgactgttcgtcttattcaaaaaatttaagtaattgttaattctttttctatcatttgatttattgttaaatatacttttatgtatacatatagttttacacatatcacaaaagtttttgaataaaacgaacggtcaaacatgtttaaaaaagtcaacggtgtcaaacatttagggaaggagggagtatgatttaggtcgtgtttttcactctgtaataataatgaagtaaatagttagcaagagtttgtggagggttaatgcatggttaattctttgaattttgtttcagaaagctctcgcttgcatagccgcagaggtggagtaggtcacaagcgtacacaaacacaatagccaattacgagccatatggcccaatatggtgaggcccacaaggcccaaggtgacaaagccccgcatagtcagatccgatccgtaggttgaaatctggacggtcggcacgtcacgcacggacgcgcgcgcttattttagtaccacctcgagaattcgatcggagaagcaccagcttatatacccgcccgcgctagcctggtcatctcttcggagacatccgataaaattggaacgatacagagaagattagcatggcccctgcgcaaggatgacacgcacaaatcgagaaatggtccaaatttttttgagaattctgcccaggtccctggagcttatactttttatcgcagttatgccctcggttctttctttctgccccttctgctgaatctttttcttccgttctcgtccttcgtgtatgaaggcatagttaagttgtctgcacttcagcccctgaagattttttatcttataaatagaccctcatctgtttccttctttagtgctgcccattgttttcttagcagttatgccctcggctctttctttttgccccttccaagttttttcttgcgctatcgtcgtccatggcttcatcgatggaggctcatacttaagttgtctgcacttcacttcagcccctgagattgttttctcttacaaacaagttgctgtatatttcttctctgcttcactttttaataccaatcaggtcctattatatattgtgcattgctgataataatttgtttagtgcacctctttttttgttaggcaccctgtaatctactagtagtactttggagccataaggccaatcttataacagctcatatcaacatcacgtcctctcttttaactatttctttggctccaacaaacgccaatcatatcgtccacaaccacaagcatacgcagtgacgaaccaataacaaaagctaccaacattctatacatattaattatctaattattggttaatatattaattattaacatgatataaattagctggaactaaataatctacccggggtccgtgaccccgagatagtgaacgtagccacgtctgtacgccactaagcatatgctaaaactcagttcaagattttttaattaattaacaataagaatgcatttaaatgcaattaagaatctttcacccttgtattttcaccaattagacctcacatacgcggcataacttttttacattcctattttaaactgaattaatgccactagttatgcttaaaacatacatgtttttttaaggaaagctttttagtgccttttttatggcacttttttaatctacgatccttctacctaataacaatcaagcatatcatcacaatttaggatctccagagagctcgagacaggacgctgttcgctctagcgtccgcgcctggacgttagtcctagtagcgtccttactattttcataatttgcactagtacctctcacttactaaatatttaatttcaggataattaattattataggattaaaaacccggtatattcttagataaaaagaaataaaattcagcttactctattttagatccaactttcaaattatgcaactgcatgtcgcgtgaatattaattcctggtggcgatgacggacacattcagccccttttttcttgttcggagttttgatccaactcatacctacgttgaggactttgtgtcacacacgaaccagggatgacgagcgtattaacagattctgaacacatcacgacgtgataataatgggcatacgacttagcattatagggtagggttagaagaagaagtgtttggggcgtgtttcgggcttagagggatgactgggacgatagcagattgactgatgacgggcaacgagatggcagctgacatcactgccggagccatgaggttaggagaggatggaggaaagggttgatagtgggggtaaaattgtcgactagttaggatgggtggggtagaggacgatggtggagaaagtagacaatgaagtggtggcagcggcaactctaaccactagaggtgagggagaggttggggatggggccaatagaggagacagtaatgcggcaaaaatctaacatggtcagcggttgaatcggagaggtcaactgtgggattgtcagagaggagtataaggcttgtttggttgataccctgataggggcggacgaaaagctcgaggctcgttagctcgctcgactcggctcgtttcattttcctaacgagccgagctggcattttagctcgttagagataacgagccagctcgcgagctgcttgtgagccttaacgagccctcagcaatctgccaggccacaaagcccataggcccatttatttagaaggcccaatagacaatagtgagcactaaaagtgaaaaccctaggtcattcccttatcccttcccttccctgttccctttggctggcggctgagttctgtaggatcgaaacgcaagaactaagccaaccagaggggggggggagggtgaatggttggtatgcccaaaaacaaaaacttttagcagaaataaaagttaccctcaaattcacgagattggtctgaccgaagatgattcgctggtctgaccgccctgatgctgtcggtctgaccggtgtagatcgatcggtccgaccgctcgtcgccggtctgaccgcccttatgccgccggtctgaccgccactcgtcgccggtctgaccgccggtgtattgccggttggaccgccgaaacccggtgaaatacaaatcgaagaactcttaaagtggatgataactttattacttctctctgtgtttacaaagtgcaacaacaacactccttacaaaaatcttgagaaaactcgaaaccctaactcaactatcaacttaattactctccaaagcgataccgggaagcctcacgctccctctctatttatacccaaggtaggcagcctaaagccacgaaccaaactcatactagaagtcctaatcaccctaggaaaccttctcgtacaagaaacaaactttacaaaaccaattccaccaaatttggactccttccaaattcgactccgcatcccatacgcacacaatacctccatcctaagccatatggaaccttcaccttccatgtgtgaaagtgcatctaggcccctaacgattttggtgattaattacaatgcgattagagaggactaacatttttctttaagcaaaggtgaaggttgctatgtcctcaatgagttagcgtaatgcatttcccgctgaatatgttaatgagatgtgatgcggcaaatgagcaaatggtatattgtatcttttctttttgtttgagtcaataggaatgccgcactattaagagggatgatgcattgacatatgaggagtgatcaaagtgctcaacatcaatttttaaaagtgtttctcctcagtttgatgtgttctggaaatttttggagttttccgaaagtcattttcggactttctgaaaatgcacagaaccaattttcgcttctggaaattttcggatatgtccgaaagacattttcggattttccgaaaatgactgagaaggcaaatgtggttctgtttattttcggacttttccgaaattgattttcggagtttccgaaaaactttagcaaagccaaaaacgcttctgtgttttttcggacttgtccaaaagcgattttcggacttttccgaaaacatccataaccgtgtttttggttctggaaattttcggacttgtccgaaaagttttcggaatgtccgaaaaatctctcgttgactttgctgttggtgctgagctggaattttcggacatgtccaaaaaacttcgggaacatctttgtgagcttcatctttggtgactttacttcctccctctccactagcttagctttcttgagccgctataggtatagttgctgtttgtgctagcatattcttgttgtaggcaactagatctaggatttactttgctacttgtgctgactccgaaaattttcagatatatccaaaaatttcggaaatatccgaaaattactgcttccgcttttaattggatttttgaattagcctattcacccccctctaggcctaattgacactttcaattggtatcagagcctaatctcctaattaggcttaaccgcttaaagagatcatgtcgggccaaacgggggaaggcaaagatggtgataagggagctatatttccttatgactatccacctatatctacatcttatgtgagtacctatagcggcaaagctccgtacttcaatggtacggactatgccgcttggaagcataagatgaatatgcatttgaagtctattaacccatttatttggagaatagtcgaaaaaggctatgtgttgcagaatcccgaagatcccaccaaggaggacgacgagaacaagcacaagaacgctcaagccgctaatgcaatacttagcgccttgagtggaagtgagttcaaccgtgtggatggcattgagagtgccaaagtgatttgggacatgcttcggaacttgcatgaaggcacggatagtgttcgtgagtccaaggtggagatcctcaaggggcaatttgagagatttgtgatgttggatggtgagagcccaagtgacatgtacgaccggttgagcaagatcgtcaatgagatcaagggacttggctccaaggacatgaccgatgaggttgtggtcaagaagatggttcgagcaatcactccaaggaactctaccttggtgaccatcattcgtgaccgtccggactacaagactctcacacctcatgatttgctcggacgtattcttgcccatgacatgctcgtgcaagagtccaaggatgtcatccaatacatcaaccaaagctcaaccacaagcatcaagaaggaagacttggcattgaaggcgaaggaagaagaagaagagaatcgcaagagcaagagcaaggcggagatcgatgatgaagagatggctctcttcgtcaagaagttcggcaagttcatgaggcgaagcggcttcttcaagggaggttcttccaagcactactccaacaagtcaagtggaagacactccgcaagagtgtgctacgtgtgaaaagagcccggacacttcattgcggattgcccacacctcaaggatggttcccacatcaaggaagataagaagaagggtgagaagaaggatgagaagaaggagaagtacaagcatagcaagcgggaacattatggccaagctcaccttgggatgatcttcggctccaactccgagtcaagctcaagtgatgaagaaggagtcgcaacgttcgccgtcaagccttcatcaccaccgagactcttcgactactcaagtgatgaggatgctcccatttgcctcatggcaaaggagcctaagttaccttctcctctcaagtcatttaatgttgatcttgttagtgatgaggaggatgaggttgaggatgaagttatggatgacgaattgttcaagtccataactaaggaatccctaccacacttgagtgagttgcttgggagaattgaggaccaatatgcaactcttgagaggcaaaaggctttgctcattcgtgagaaagagcggtctcatgaactcaagagtgagcttgctaaggagagagaaaaaaatgaggctttggtacggctttacaagtaaaccaaagagtctcatgctaatcttgaggtggcgaacgctcaacttcaagatagagtggatggcttggacaaagcctacctctctcttgaagagaagttcgaaaccttaaaaaatagtgtctcttttcctagtgagccatcttgttccaaaattgtcccaagtaatgaaccatgtgtgagatgcaaagatattgatattgaagcttatgctactaactctatctctttgagtgccttgcaaaagcaaaatgagaagcttatgggactccttcacaatggcctacttaagtgccatatgggtagtaaggccctaaaggagtacctaggctatcaaagggacaacttcaaccatgagggtcttaggtatgttcctccaccaaaaggaaaggtggacaagagtgtgatgatcaagaggccccaaggtcttagcaattttgttaaggccaaaagtatccttcctaatgattatgcttcacattgttcttttgatgcatcttatgttcttagaaagaatgttagtggtcgtgttgttgctaagtatgtaggcccgaggggcaagaatatttctatcaagagagtactttgggtgcctaaggcacttgtcactaacatgagaggacccaagcaagtatgggtacctaaaactagaaattgatctcttgtaggaatatatctccggtggaagaagttgggtgattgatagtggatgcaccaatcacatgaccggagaagaatcaatgttttcaacacttgatccaaatggcacttcacaagataacatagtctttggggacgatggaaagggaaatgttatgggattgggtaagattgcaatctctaatgatctctccattgccaacgttctcttggtaaaatctctaaactataatcttttatccgtttctcaattatgttctatgggttacaattgtctctttaccgatgttgatgtgaccgtctatagaaggaatgattcatccgtggtctttgagggtgttctcaagggaaagctttaccttgtggatttttccccaagtaaagccaaacatgagacatgcttagtggctaagtccaacacggggtggctttggcatcggaggctagcccatgttggtaagaggaatcttcacaagcttctaaagcacgatcacatccttggactaacaaatgttcaatttgagaaagatagggtgtgtagcgcatatcaagccggcaaacaaattggagcacatcaccccgtcaagaatgtgatgaccactacaagaccattggagcttctccatatggaccttttcggaccaattgcttatctaagcattggaggtaacaaatatggtcttgttattgttgatgagttttcacgcttcacatgggtgttctttttgcatgacaagagtgagacacaagccatcttcaagaagtttgcaagaagagcacaaaacgagttcgacctcaagttcaagaacattcgaagcgacaacggcaaggagttcaacaacacgtgcatcgagagtttccttgatgaagaaggcatcaagcacgagttcttagctccatattcacctcaacaaaatggagtagccgagaggaagaatagaactctcattgagatggcgaggaccatgttggatgagtacaagacatcggaccggttttgggccgaagccgtcaacaccgcatgccacgccatcaaccgcctttatcttcaccgccttcttaagaagactccttgtgagcttcttacctgtaacaaacctaatgtctcttactttcgtgttttcggtagtaagtgttacattctaaataagaaggctagatcatctaagttcgctcctaaagtggatgagggattcttgcttgggtatggatcaaatgaatgcgcatactgcgttttcaacaaaacctccgatattgttgagatcgcgcgtgatgtgacatttgacgaaactaatggctctcaagtagagtaagttgactcacatgtgttaggtgaagaggaggacccgagcgaagcaatcaaaaggttggctcttggggacgtacgtcctagggagccacaacaaggggtgtcttcctcaacacaagtggagccacctacatcaacccaagccgacgatccctctacctcaagcttggatcaaagtgaagaatgcgagcaagtgccaccctcaccgatcaacttagctcgcccaaggatccaacaaagtatccaaagagatcatcccaccgacaacatcttaggagacatcaacaagggagtatccactcgttctcgtattgcaaatttttgtgagcattactcgtttgtgtcttctcttgtacctctaagggtggaagaagcccttaatgattcggattgggtgatggcgatgcaagaggagttgaacaatttcacccggaataaagtgtggattttggtgtagcgacctcggcaaaatgtaattggcacaaagtggatcttccgcaacaagcaagacgaggccggggtcgtaataaggaacaaggcgaggttagtggcgcaagggttcacccaaatcgaaggattagattttggtgaaacttttgcgccggtagctagacttgagtcgattcgcatattccttacttttgctactaacctcaattttaagctatatcaaatggatatcaaaagcgcctttctcaacgggcctattaacgagttggtatacgtggagcaaccaccgggcttcgaggatccgaagtatcccaatcacttgtacaagctccacaaggcactctacgggcttaagcaagcccctagagcttggtatgagtgtctccgaaattttcttgtgaaaaacggctttgaaatcgggaaagccgattcaactctttttactaaaagacatgataatgatatttttgtgtgccaaatatatatcgatgacattatatttggttctactaacaagtcttttagtgaagagtttagtaggttgatgaccaaacgttttgagatgtccatgatgggtgaattgaagttcttcctcggccttcaaatcaaacaactcaaggaatgaaccttcatttgccaaacaaagtatttgaaggacatgctcaagaagtttgggatggagaatgtcaagccaatccacactcccatgccatcaaatggccacctcgacctcaacgagcaaggtaaagacgtcgatcaaaaggtatactgttctatcattggctcacttctttacctttgtgcatctaggcccgatattatgcttagtgtgtgcatgtgtgcaagatttcaagccggtctgaaggagtgtcaccttgtggccatgaagagaattcttagatatttagtgcacactcctaaccttggtctttggtatcctaagggagctaggtttgatctcattggctatgccgatgcggattatgccgggtgcaaagtggataggaaaaacacatcgggtacttgccaattcttgggtaggtcccttgtttcttggtcttccaagaagcaaaactccgtcgccctatccaccgccgaagcggaatatgtttcggcggggagttgttgtgctcaacttctttggatgaagcaaaccttgagagattatggcctcaatgtatccaaaatcccactcctatgtgacaatgagagcgccattaagatagccaacaaccccgtccaacactcccgaaccaaacatatagatattcgccatcatttcttgagagatcattccacaagaggcgacatagacattcaacatgtgagaaccaacaaacaattggaggatatctttaccaagcctctagatgaagctaggttttgtgagttgaggagtgaactaaatattttggattctcggaatgtggattgatctattgtatgcatgtttgcttggtataataggttttgcatagcaccttgtgacaaaatggtcattcaactcatggatgggcactggtcacttttgtggagaacttgaatctatgtgtatggggatctcatttttcaatgaattttggtcctagcacaacttgaaatagattcacacattccctatctcgagggtgaattatcttgtctcatggtaattccctctcttttgatccctcggatcatccatttgacttgtggctattgttttgtgtgattgattgtgtgctagtcacaagttcaattggagcctatagtgctcgaccatccctccattcctaaatcctatccaaatctttgcgaaatgtgtttttgtcaaaaatttcccggagctagtcccctgcaaaattcctttaaaaagtttggaaaactgtttcttcaaaattccccttgcaaaactgtgttttccagaaattttccgactttctgaaaattttttggatttttcgaaaatttttcggaccttccgaaaatttcctgtcctatcgctcttcaatcaaagcaatcccaggatttttcggacattccgaaaattttttggatatatccgaaaaatctataaaagcgtgcacaaccttctggatcttttcggacttatccgaaaattttcggaaatatccgaaaatttcggggtctttttatgtcacctcgtggactcccttctctctcctttccactctttttccccacgggattgactccctcctccctccccaccggcgaccacctcctctctggtgacctcccgcggttcccctcctctccaacctcgtgggagcgcgtttggggcactccttgggacctacattgtcgatctccaccacgttcttcaagtgttctttgcgttcttgaggtattcgccctaaaatcaaatcctttgattcctcaagttttatcttgcgatttcctttggtggagatgttcccctagtgccataggacctgcagattcattttcacaagtttttgttggcggatttgtgcggcatctgagtaatagggttcggccggaatttttcggacttttccgaaaattttcggatttgtccgaaaatccttggccgacccctatcactttggatttgcacgattcttgccctcactcacttgtttcttgcttccttggcttccattcactgatcccttgtatctcttgtgtttgaaggatgcctccccgcaagcaaacctcccataagtccaagcgcccgagggaccgctctcccactccatcctctcatgatgattcagacggtgattggtccggtggagaggatgcggttcctcaggttgcgcggggggctcggggcggcaatcttccttctcggcggtctactcaagctcttggtggtggtggtgatggtgagggctcctctcgtcaaccgcaaacgccgccgcaccaacccaatgttcccattggccctctccgcattcatacccccgagagggatccggcggtgattcgtcacgtgtatgattggaggcgcaagtctgaggttgttgctcctcgccgcgatgaggatccacgctcccttcgccgcactgccacggatccgcggttttggactctttttcagcaagacttttatgagtctgtgatcaagtccaaagctcatcccactgttcccatgcaatggatcaattgggaggagttgcaggcgcacaatgattcggtgataaattctgtgattacaaattgtgatctcatgggtattcgctctttcatgactttgcagcaaaattggtgcaacgagatcattgctcagttttatgccaccgtctactttgatcattatcgtgccatgcactggatgactcagggatcctggtattctgtttcctatcagcagttggctgaaatttggggttttcgtcttcgctccttacttaaccttgatgacctgcataatcttcaaattcctgccaacactgagttactccctctttactctccaaatgatcctaatgtggtgttgggcaaggtcgatggtctcaagccgtactttgcctacttgaaccggatgtttcgccggtcctttgtgcctaaggatggtgatgctagcagcattaaccacctctctcggaccgtgcttcttaggtttgatccccctcctcatcgctttcatgtttatcactttgtgtgggaggaaatccgcatggcttccattcagtacaagaaggggttggtctatgcccctcacattatgcggatgatcgagactgtcactcagcttcagtttcgccatgatgtgactcattctcagcttcacttgcgcctagataaggccccccgctcctcagctgctcgggacatcccttcctcttccactcaggcacctcctgctcctgagcgccctgcccctgtggctcgtcgtgagccgtctcccttattccgcattttgcggagtctttttggtctttgctccgcggaggccaaaaagaaccgccggcggaattcggcgaagaaaacggctcacgacgtcaagttcctcaaggcaaggtattatgaggaccaccacattgatgtccctccttctcctccgggtttcgaggccgagcccgatgagccagaggaggaagcgattgaggatccatttgctgggttgcctcctaacttcgacttcttcggttatggccatggctatggctatcttcctccaccacctccagaggatcctcctcaggcgcccttcgcttgagtcgtcgtcgcatcgtcctctctttttttggtgtcttgatgccaaagggggagattttctctctatctatcatgtctttatggtcgagcacatttggtttttatttgtatgagactatgtgtggttgctaagttaagtttaatgctttgtaagactttattgtttaattatggatgcttgagatgtaatggatcttattatgtttaatgtggtgcaatgccttatcctatttatatggtgcttgtgatgagatgtaattattcttatgcatatgatgtgttggatgtgatgagcatatgtgatatatttgttctcttgtgagcttcaatgtggatgcaaagatttagggggagctctctacttgcttttatgcacactctcacggggagctttcgctaaacctttgcaccaaaaccttaaattatattcattttctcttatgttctaatcgtattgtcatcaatcaccaaaaagggggagattaaaagtgcatctaggcccctaacgattttggtgattaattacaatgcgattagagaggactaacatttttctttaagcaaaggtgaaggttgctatgtcctcaatgagttagagtaatgcatttcccgccgaatacgttgatgagatgtgatgcggcaaatgagcaaatggtatattgtatcttttctttttgtttgagtcaataggtatgctgcactattaagagggatgatgcattgacatatgaggagtgatcaaagtgctcaaaatcaatttttaaaagtgtttctccttagtttgatgtgttgtggaaattttcggagttttccgaaagtcattttcggactttccgaaaatgcacagaaccaattttcgcttatggaaattttcggatatgttcgaaagacattttcggattttccgaaaatgactgagaaggcaaatgtggttctgtttattttcggacttttccgaaatcgattttcggagtttccaaaaaacttcagcaaagccaaaaacgcttctgtgttttttcggacttgtccgaaagcgattttcggacttttccgaaaacatccaaaaccgtgtttttggttagaaccgtgtttttggttctgaaaattttcggacttgtccgaaaagtttcggaatgtccgaaaaatctctcgttgactttgctgttggtgctgagctggaattttcggacatgtccgaaaatctcaattattgtgcataacgggcagaatttggtctgtggctataaatagccccctcccctcacttgtgagggctgctggttctattgcaattatttgtgcccttggcttgctctctctctaacacttttgagccttgctttcttgtttcccctctcacccgtgttcgattcggatttggtgtgtgtgtgagagttgtggattcgagtttgtgtgagtgcttgttgttgacttcgtgaagatttgtgagcacttgcatcatctccgggagttctttgcttcatttgttactcttggaggttgaggactccaaggtggctaggtgtcgcccccgagccaccgatctacttgtggttggccgggagaagtttgtgaaggtcggatctcacctccgaaagggaagagatacccttagtggaaggaggagtgcttagtgcaacctctagaggaaaagggttagctaagacccggctcttagtgagctcctcaacggagtgtagaatcccctcaaggattcaaactttgggaacatcttcgtgagcttcatctttggtgactttacttcctccctctccactagcttagcttgcttgagccgctataggtatagttgctgtttgtgctagcatattcttgttgtaggcaactagatctatgatttactttgctacttgtgctgactccgaaaatttttggatatatccgaaaatttcggaaatatctgaaaattactgcttccgcttttaattgaatttttgaattagcctattcaccccccctctaggcctaattgacactttcaatgtgtattgaactctagccttagtatcccgcatgatctctgaccaccctggacgttgtcttatctccaagccgactcccggtccatcaccgcaaatactctcccggtatcaattcacctacacatgaaacaaacaaagaaaccatattctgagaccaagctatccccaacttgactcattgttagcaaacaacagtattacatacggatagtatccatctagaagtcatattcatgagataaactcagatatccaaacaaacaatccgaaaacgaaaccgacatagtgtcggccggtcagaccgcgggctggccggtctgaccacgcgtataccaccggtctgaccggcaaccactacccggtctgaccggtcacataaaataacaacacctgtaatttacctgcaaatccaatcatctccaaaaccacttcgagaataatattccaaatatcaaaaccaataatctccaatgccaattgttcatcacaaaataataatcaaaaacacctttgattttacaagttcgtggcgccgctgccacccaccccagcacccgacgtcgctgctctcccccagcgcccgacgcagcgtcgccaccacccacccccagtgcccgacgtcgctgctctcccccagcgttcgaccacaacgctcgacgccaccgcccgccaacaaccccagcccgccacctaccgacccacctatggcgccgcccagcagtgagcatgagctcctccccatggtgctggtgagctcaagctcgtttcctccgccgtcaagctcctcctcgtggttgcagtactggcgtggtcgagcttgttccatccaccgtcgagctcctccggttctccccgtgttcaccggtgagctcatccccatggtcgcctcccttcttgcttgcccccatagctcgtgagcctaacaagccagctcgagctttcaaacaagctgagccgagctaggtttctagctcgttaggataacgagccgagccgagctagctcgttatccattatcctaatgagctagaccaggccgagacgagccgagctagctcgctatctacccctatgccctgagcaagatgcttgagagaaatatatgcctgtgtggaaggaaatatatgatgacgcttaactaatcaggcacacccctcgtcttgttgtttggttggagtcctatacctaagataaaacatgtccactttagattgtgacaactattatcaaagagagattgaatggagtaaagccagacacgcatgttccttagtctggcgagcaactttggtggccctggcctgagcgtgggtggtcctcagggtagtaataaacaaacaagcaactaagaattctcaggtaggctttaggctaggcaactcctctctagggcaagcagcaaccaaacacatccccataggttctgtttggagaagtagccaagagttatttgaagatctaatttttagcacaagaaatagccccccaataaaatagcccttgagttgtttagatccaagagctatttggcctttaatgcactttcccaatcatgcgaggagtgggggcggcagtgctggtgggggccggcggtgcggcgggtgaacggccgcacctcctgcgaggagtggaggtggcggcgctggtgggggccggcggcgaggcgggcaacggccgccgcgccgacgaggagtggaggcggcggcggcggcggtgaaatatgaggcgcgtgcgcgtggataaggcagaaagaaggccatgcggagagagaggaaagccaccttttttagtgggttctacccgaaatatcttcaatgagcacctcttggataggatagtttttttatgggttatttccaaatagccctcaaatagctcacccatttagatttgttgggctatttgagactaaaaaatatcccataatctaaacagggccgtagtctctcacctaacttcactttcgagtttgctagatctgtatgtggagcgagaagacgacagaactgatgagacgagatggaaagaaagaaaaacaatgtgggctgggttagctacggatgcacgtgtgcagccactactacttaaaaaaaataaggatctttcatgacccttaagatttattttcactagcggccataaaaaacctcgcttgtaaaataaaaacagacctgaaaacttggtcccaccaataaaaatggatttccacaagcagagtcttaagagcactacttgaaaaaaataaccccacatatgaaaatccatttttactagcggagtctaagggttaccaccaacaaaaagatcataggagaagggcgtgtggatcaagtcgtccttatcccatccctcaactatctctttttcttttccatcagccacttcctcaaccacttcctagatatcccctccctcatccatttcctctcctctccctctcttgcttcgatggcttgatggcggcgacggcggcaagaaaagccatggctgggctcggtggtggcagcatagggaggagacttcatggtggaggaaggaccaacaacggccaggctcggcagtggaaaggggaaccgtggcgggctcagcggtggcaaggagaaggtagtgatggtggaggagcaggacacctgatccggtgatgacaagttcgtctatggcggtgaaggggagtgctgcctccaccatcaatccctactcgaggagagctcaaccacaacgacgaaggggagggcggtagtagtagaggaaggggagtcctagcttgtggatccagtggtggtaggcatcgagagctctagttctagtggtggcggtctttgggagctctggatctgctggtggctacaggttagcgataataaggacaatggcttagcgaaatcgaccaagacctccttcctcatctttcccgaccagatctgagctcgcctgacctcctttctttgaaccggcagcggtgatctcggcggctcccgaaagggcgtcttccacccatttggcgacaccgccatcgacgacgtcgactttttcatcgaccaagacgtgtggatttggggattgggaatttgagacagtgatagtggatcctgatttttaatattttttctcctaaaaacattctcgatggtgggtctctctagctaccatcagcgaaaatcactttttcatatgcgacctttttaccttagccacttgtcaaagttgattttcgctggcggccggctgctcatcagcaaaagtttattattttcactaatcttaggtcgttggcggcgccgctgactgcccaaaaaaacctgttttggctgtgagaaaaagttgttattgcagtagtgaccgaaagaaaaattttagaattataccgttgaaattcatttttcttagaaatatacgagattcgaaagaatttacactaattgacgaaagcgcgacaaaatcgcaaaaccaacgcgctattgtgcggtctcgcagggcgactgtgcgagatcgctctgacatggggcctcggtctcgcatattggccaagcgagatggctggaaatgacgctaatgacttaattaatcttcctaattagtggcaaattaattactaataataataactagttaaacaaaaataactaattaattgctaatgacactaattaatctattaaagacgtgagttcgcgcgccaccagcgcgggagacagcggggtcgcgcactctttatgcgagactgcggtctcgcacttttccttccgcgacagtaccacaatggtatataccatttctgtaattttcttctaaacgtgtatatttctataaaatcagaggaaaaaggttttttttttcgtgatcgaaacgcgtttgcgtgggtctagaccgtattatattactgctcatgtattagctgttctgtacgcctgcttcattctgcataccactgcgcactgccgccgcttaattagtggatatccctaagcctaatttcacaagataatccgttggaaacacattggaattttaactaaactagtgttatacatgtgcattgcaatcgaatttggagtaatacttaatggcgctgtgctttcagtggtaggcgatgtacccgtcgacagtgagacgcctatagtgacttcgtcaatctctccaggatttgccggcccagtcttcgaggtaaggtttgcgtgcgtgtgtttatagggatgagtgcgcgtgcgttgtgagtgtgtgttgtactgtgtaattcttaaaaaaaaaatttggagtaatactggtgggaggggtgggtcggtttgtttttttcttgggattttctcagatagggagggtgggtctgtttggcttttatgggattttcccacgtagtcaggagaggtgggctggtttggttttttacatgattttggctcttttgagattctaattttttttcttcaaacttctaactttttcgtaacatcaaacttacctacacatataaacttctaacttttctgtcatatcgttccaatttcttcaaacttctaattttgacgtagaactgaacacagcctttctcgcgctgcgagcggtaggggatgatgaccgtgtatttaaaataatagagataatgtatagactagaaatatttataaccgggttaaggtcgagttcggcactcacctttcccaacctatactccatcatttttcacgcgcacgcttcccaaattactaaacattatgtttttttaaaaaaaatatacaagaaatttgtttaaaaatcatattaatctatttttaaagcttattttagttaatgcttaattaatcatttgctaatagatcgctttgctttgtgtgcggagaggtggagttcccaacctccaccttcaaacacagcctaaacaagttattgtgaacaaagtggagtaaactgcaggagccatatatatccaattgaattttcacagtgaatttcaccttaactaaatcgtttcttaactaattaaaatattcgtatttttcctttcgtcacctcgtccgtgcgatggtttttcatccgtcccacccctcctccaaaaaaaaatcccaatcggaattccatcatcacacaaacagaatcccacaatgagcacaccttctctccaaatctcaaatcatcacattccaaatcaaaaacaaaatcctagtccaaatctaaatcggaatcatcaaaaaacatccagaatattaacacgagatgacgagaggagagggaggggcgagccagaggccgccacgcgctgctccttgccacctcaccttcggccgaatctggtaaggagtggggcggcgaccactgcccgatgaggagagaaggagccgacgccggatctggcaaggagccaccaccaccgccgctcgtggtgggggagggcgccgccacagccactcgccgcgagggaggctgccgcgtccgccgcttgcgggagggcaaggcattgctgccgccgtcgccgatgctcgcaggaggaagggcgctgccgttgctcgggggagaaggttgccgtcaccactgccgctgctcggtggggaaggctgctaccgtcgccatccgttgggcaccgccggtggggaggggcacgaaaaggtgcgccggtggggagagaggcggcctgcgtggaggggaggaaggggaaaactggaattaggattagggcttatttggtccgggggttttgatggattaggagccgatctgagccgtccatcaaaatgaacggctcagatcgctcccgcgtcgggccagcatccatcatcgggccgcatcactgctaggccgtgctcgcttcatgagccgcatgtaggtcggtgtcacgccccgaactagtcccgaccggaactagcccgtgacgctccaaattaacctgttaatcgataccagtcccaggaaacagtgctggtatcataggaagacagaatatcacagcaacagaggtctctttaatatagagaaggagtacagtcatgttgggctgcggacagatcccgagctcacaactgcattacaaaagggaagcggaagccaagacttggaccaaacaacacaggcgcgacttgggaactaggccgaaaccctaaaactcaacgtagccggcttgctcctagaagaactcctcgtcagtgggatccgcttcatcttcttcagcaactggggggagttatttatatagagcaagggtgagtacgggagtactcagcaagccatgggaaataagtgtttaatgcaggcttcaaggaaaggctgttgtttttgcaattgattttatttgaactcttttctgaaaataactaagtgagtgcttctcaaacgacacggatgagacagtgcgtctcgtccggtcggagtatgtgcaaatgtatcagtctttagaattgatcaagattggcacccggccaacaactttcaaacgaccacccaggccaacaactttcaaacggccacccgggcctagctgatcccatcagctgcagattttccaaacatcgatcccctttccacaacagcaatttcacaagcagtagtcaaacaaaactacgctaggaatcacctcacatccgcccatgaccgtgggcacggctgttcgaacagtttgttaacctctgcagagggggtacactttacccacacgacattactaacccggatcacccagcccgtggggatcagccacgtcgggagacctccaagctttcatgacaaggcatttccaaagccgacacaggtttaccatatgccgacgagaggggtcccagaccaacaacaggttaggtcccagaccatactgtgccaggaagcccaggggtcctccccgacaccaccccggcgaatccacatgtctctcggcatcaaggctcccctgataagctagttactcagccaggggtgtcccattccacccatgtggtcgtacttgtcttatgttcggatgaaattccaaggaaacggtccttaggtgcaagagcgggaaaccgtacacccggtacgttccccggtccgcgattttggaaattcatttagttcgcaagcaccgacccaggtgtcgggttttccaagtcttttgtaaaacccaagttttacccaagatgtttttttcagattttaagtttgaaggcggccgtcgatactcgtgcagagtgcacgatttccgaggcgcaactgggtggttacaagggaacatggtataacaattaacaaaggaaggatcaaatgcaacaaattaggtaggtccgtcaatctgccttgcagacgggacaagcagattaagtgcgatcctatcaatgcataataatctttcaagcaacataattaagttcaaatataggctcaagatattcaaaggtggcttgccttgctcgagatctggagcttgatcctcgaaatcctcgcactgcgggtcttcgggctccgaaactatacgcaaaacgggacaactcaacaaacggcgaaaataaagccctattaatgacctctaagcgtgccattagatagatctcgagatttgaggaattttggaagttgaacggagtcaaacggacttacggttgggaagatattgaatttataagattattggatttttggtctaaaggaaaaggatttacttaaatcctttttttgaaaaagaaaagaaaagaaaagaaggagggggaaaattagacttccctcgggaggctagggcgcggcccgagagaaaaggggcggctcggccgagctaaatgggccggccggcccaacaaggcggcccagagcgcgcgcgcgggcggggaggagagagggagccggtggaccgggctcacctcgcgtggtcccgagtgggacccgcttgttggtgacacggttcaccgtgcggaacgcgcacgcggcgcccgctagggtttgggggagggacgcggtgcacgcgcgcggttcgcggaggacgcggatgcggcgggcccacgcgcagcctcacggctcgcggtggaccgcgcccgcgagtggggccgaggggagcggctgaccggggtcggctcgacccggtcttggccgagctggcgccgacgtggctgccacacgggccggcgggaggtagacgacgacgccggccggaacggacggcggacgacagcggcgagcggcggagcgaaccacggcgatacaggcgaaaacgagcacaccgggtggttgcacgggacgagaggagtcgagccaacggctcggattcgccggagggagctcgacggcggcggattgcggcggcggcaaccggcggagagaaaaggggaaaacggcgacgaggtcacgaggggccgattcctggcggcgagagcttctacgcggctacgggaatccgtcccttgcgccggattaggaggaaacgcatcgagggaggccggcgacgagaggcgcttccgagcttgggcggcgacggcggcgagcacacggcgagcggcggcaacggtcggggcggcgccggctagctacggggaggctactcgtgctactacccgagtctaaggggaggaggtggaacgaggaggaagaacggagggaggcactaccgtgcgggtgggcgcagtgacgagagccgacggcacgaaacgtgatcgtttcggcctctggccgaggaagaggagggggagggcgtgcccggagtccccttccgcgtccttgctcgtgccggctccttcgacacgcgcaacgacgaacggggacggcaaacagagcacgggaggcggtgacaatggcgtggcggcgagagacgaaaacgagggagattgcaggagggaggagcttgggtttataggggcgacaatgtcggtttgggagaggggaaccgacattggacggtcaagccggcgagctggcgcccggctagcggccaaaacgacgacaggaggtgacgccggcgagaggaggaaaaagaagaaaggaagagggaaagggggcttgcctccttgccgctttgggaaaaggaggagggagcgggggggtgacgcggcagagggaggaggagctctgcctcctctccttggaagctagcgcgtggaggggcgggccgagtcgatgacgacgacgatgacggtggggtggtttggagcggggggacgacacgggcggcaggcgcgggcaggcgcggcagaggctgacgacggcggcgaccaggcggtcggccaccacggcacgcgcgcgcggaaagcaacgtgcgacgcggcggtttgagcgg

SEQ ID NO: 4582 - DNA, 7395 bp, Oryza sativa
ccccgagccccacgccgccgcgccgtcccgtcgtcgtttaaagccggccacccctccccgcgcctatataagcccctccccggctgcccattgctccccacactacccccaccacctcccctgccttttccctctctttcccatccccggcgttgccgcctcgttggaagccgccgccgccgccgctgagccgacgcgccccgccgccgcgatgtgcctcgtcgccgcgccgtgctccgccgtcgacctcgccgccgcgtctccgtcgaccccgccgccgaaccggtgagcctccccctcccccaccgcttgccgtcgcgccgtgccgcccgccggttctagccgaggccatgagagagagaggagaaaacagagaggagagagagaaaagagaatggaggagagaggttagagtgggccccacctgtcattaattccatccaatttcccttagaaaaataattctgtagaaaagaaaatcaagaccttgaccccacctgtcagtcactatagctggtggataaggttgtattataaataaatgaattaggaacagtaccatttcacaattattagaattaattcaaatttgaatctttacactagcataacttattcatttcagctccgatttgagtgaaacttgaacctaaattcatctaaattcataagctttccaatgatatataattcactatttgataaaatatatttataaatattaaataattaatatcaagatgatgcataatagtcaacttaaaaatatgctaataaataaaattagtattgtacagtagagtggatgtaataatatttgtctctaacatgtcttgccactgtaataaccacacaaactaattttatgtgatgtctcaaatgaatggatgtataggaaaatactagtacttatttaatattcgatggccatataattaaatccatggcttataggttatttaaatcaagtatagccttatgattatgtaactaaaatataaacacacatagatgaatctttaacctgtttaggagaatactaacagagctagatgtggaggaatcactaattaaattaatcgatgcaataccatatagaatagcatatatatgcctaaattgattaccacttattagtaacccaatagaaccagtgcttaaacttgtcgcatcacatatacaatatcactcatagaaactagctaatgtataattaaactacaatatattcaggaatcacttggagcattgggtagtacactttctaaataagctcatgtacagtaggcgaccaaaacattatacgttgttgcacacatatattgtacatcccattatagttatacaattaatttatctttttcatatattaaactggggagtatataacaaacatgcatagtagataagtactaattataaatcttgacctcatatgtttatagttcaattgtaactccggattgttcattaagagataatctgtaactataatattataaacctcccgaatttaacatatagagcatggataattattagcccttttataatttataatggcaagtaaaatatgttcataattaaagtaaagcttccatcaataaaataataatacaaatgattcactgtaattatttgattgatcctaaatccatttaacaacagaacctctgatatgtaaccgtgctatttagatagctgcatacatagccataatccttccatagccatttgatagactaaaccaccgattagccaaatatatatgtatcccataaatgctatgttggttaactcctaaataggccacgatgacaatagaaagattaagaaactttagccttagcatgattgggatccattagcaaacacgaatagtacattttgttgcacatatttgattgttgtttgaatattggtttttctcgcgtattatagaccttgtgtatcggttagtcgtgaggcaacgtctgcaatttccaggaggtgaaggttgatcaagattatatcaataataaggattatcctgagcaggcaagtcatcactattccttgaacatgttgatcccaattgcgaaattgttttgtttacaaataaaattacatgcaatgatgaacatcctacttgtgattatgccatgccttgattattgtttacccttaaatatttgtaaccatgtttacgtatgagtccctagtcaactatgacaattgcttagaaatgctattctagaatcatgcatactcatatttatcaaatgctatatgcttgggcaattacctttgggaaggtaattgagatgcggcatgtggagacatgagcgccacattgccataatgttgatgacatgatttgtgaaaggagaaataaaattaaacaactgttttcgactggggcggacggaggatttgggtggtatctggaaaaggctagtaccgtccccggtcaattaaggaccgagccatgaagttaagcacgaaacgacccccgtacaaccgcacttctcgtatgggtataggcctagcggattagatagccgagcggaggcagtatccctgcatagatggttcacccttgagtgaggcaggtgtgctacggtgggacagctgttaaggtagggccgagaggcgtgccctacatcggtgtcgccattggtaggactgccatgagtgtgtgagagagagagaacttaacttgaaccataatttaatatgtgtgagacttctctttcccgggagcaccagaactcctcacactgctagaaacatggacgcctagagtgcatgaggatttaagttcatggagcgggtactgccaatgcgaggttatcgaaaaactttgccgtgacgcgtctcatgtgttgggacgaggatcatgtgttgggcagtcgcggagtgcgggtaaagtgtacatccactgcagtgtgagtaaaccaaatctattcgaatagccgtgctcgcggttaacgagcaccgggacatgtattacacttggctagactctaaattcttaacttgtgtgggatgggatattgcatggtgatttttatgctgatggagccacttcctgagaggagggaaggtggacgtcctcagaaaaccatgacgactcaatggcgggaagctatccttgggatcacaatggatggtggacagaaccgtcgttgtttaatgtgaacactggaactaaaatttgatcagtctatgataggtcttaggcttgtgaaaatatttgcaaaacgcagctttatgcaaaagaacctgaaaccattccttgaataccctctatcatatgcattgttgttgtggtggcttgctgagtacggttggtactcacccttgctatttatatatcttttaggagagtgttgaagagaagcccttgtcggtacgcttgcgtatcccacaagatgatcggagtgcggtcttgtgctaggtctcgttccccagtcgactgcctatggcatgttaaccagacccttatattattttgtcttctgctgttgttctctgatagttgttggcctacctggccctaatgtaagtatttaactcttttagcctaaattcattcgtgatatgttgtgatccaactatgtatgtgtgtaccaactactgatccagggattggtatggataaacacagaagatttccgatttccaaaatcgggggtctacacataatatagcgaaaataagtctattttccgtccctccactttgggctatgaattatatatagtgaaaataagtctatttttcatccctcctctttgggctgacatatatatgtaaaataagtctattttacatccctattctttcgaccgtggcatataatatgtctatttttactccctattgtttatgtgtcgggcctggcatgcggcccatcgtgctgtgccggcccaacgtgccggtggagaggcctaggcacggcccggtggtcgggctaggccggcacgggcccgacccttgacgggccgtgtcgtgcttgggccgggccaaaatgccgtgccgtgggccgggccgtcgggccttgggccttttggccatctataacaccaatgactctatcttcatccgcatgcgtgccgttccacttggaggagcaccacggctcgtcccttgctcgcccaccgtggccgacaaatgtggaggtggtgtcggggaggttgggaggtgcaggatgcatgcacgccacttccgctcggaggagcgacaccgcttgttcctcgcgtgctcgccgtgactgacaagtcatgacagcatacaccacgaccacactcgtccgtcatagcaggcgtgcgagggatgaatgtcggcgctcctctagaacgaaaacgacatgcgggcttagagaaagggaaggaataaaatgggagagatagagagatgatggagacttgctggtaggtcccaccctatttccgacgccacgctgttgccacatcagataatgacccgatcaacatgccacgtaggacgaaaatcgccattcaaaccgttcgaggaggtaaattgatccggtatttatagttgagggatcactagtacagaaaaccctataggtgccggttaggaactggctccattggtcggcacctttgcctcatttttattgctgccggttctaaaaccggtacctatactattaaaaaaataaaaaattgatggcgcctacagtgccaccggccttctccaccgccgccaccaccacctcgcctggccggcctccacgccaccacctagccatgcctgcctccatgccagcggccgccacccaacaccgcgctggaggagggggggcccggggagagagggtgtcggtgagatccagcaaccgcgccgcaacctcgccgtgtcggtcgccacaccacgtcgtgctagaggaggagaagggaagcggggcgaggtccctcgggagaaaggtggccgctgtcactgccacctcgccacgcctgcctcggcgccggcctccacctcacccgcgctgccacgaggagaggaaggcgagaggggcgaggctcctctaaccatcagccgccgtgccggccagcctttgccaccaccgttgtcgccgctacctcgccgcgccatcctcggcgccggcctccacctcacccacgccgccacgaggagaggaaggcgagaggggcgaggctcctccagtcgtcagcaaccgcgctggccagcctactccaccaccgccgttgtcgccgccaccttgccgcaccagcctcggcgccggactccacctcacctgcgccgccgcgaggagaggaaggcgagaggggcgactagcgaggctacaccgccgcaccgtagagcctccctggaggagaggaggggcgagagagagagagagatggcgttgtgtggcagtgtgggatggatggataagataaaggatgtcgtgtggatggcgctgtgggtggtcaaaaaagccggcttggtttttttcaaaggtgtcagttccgttgaaaaaccgacacctatactataggtgtcaatttttttaatagaaccgatacctatatttgtattacaggtgtcagttctgttggcaactttttgtaacaagttgacaagcacgatcgcagcaccttaagctttgcggtgatcctagagtcaccaacgacctcaatctagccaaacggccaaaccaagatgggttttcataactaaaccggctagcggagccgatttgagataactacccgtatcgtgggcaaaacggaaggtttttaggacaaacctacaaagaggtgttgcactcttacagtgacggtgcaaatcgacaaagatggactaaactagggtaaaatagaaaacataactgaaaagtaaagaaaaaacgattcaagtagattgtattagggggattacaatgaaccggccttgtcccttaaataggggttggtcttgccctctacaggcccttctccacgtccaactcggaatagaaacgaaaggaaacacgaaacatagccttcccgagcaaggaaacccgagacccgacgaaaacagacccggattcggaccctgacggtctgaccgcgcacatacctgcggtcagactagccctactagccggtcagaccgcacacatacctgcggtctgaccggccctgtgaaggaaacccgacactttccaaactttgacaattttcccctatttcatccataggtgccaaatttgggtgtaaacatgttctaaataaaaaccgacacctatcgtataggtgccggttttttaatagaaccgacacctatagtatttaaaggtgcgggttctatttttttatcgtgcggaggtgggaaaatgtctataggtgtcggttttaaatgaacttctataagaccggtccctatgagggttttttaagtagtggatgcgatttaaccaaaggcaatagtttaagaaagcaaaataaacttattcgggctcaaaatttacgcgtattacacaaggctcgtgtttgggccaagcccacgaagccaatgcaaacataccaattccggattgaattgccacgtaagcgccacgtcagtgccacgtcagatgaagacagattcaaattagccacgtaggcactacgtcagctaaaaccaccctcgaaacctccaaggaaccttatatgtatcggttttgatagttgagggaccggttgtacctggtttaaggaaaattggattcgttgacaagttaaagagaacttagatggacttattccacaccaaaataccacatcactccccagtcctcgttgccctcttgccggagccgtcctccgccatgctccgtactccatctccgatcggcgacccgccctgagccggcggagccgctcgacgttagggccccacctcaccaggcgacggcgtgggcatcctcgattctcaggggtgtggcggcgtcggcggcggcgcaacggtgggcgccgtccatccctcccagccggctcggcctggtgaccggtgagctctctggaacccgtcacatgaagtttcttttcgtcagtttctattgggccatcgatgatcgatctggtgaatctgtgatcctttgccgtgtcgggcttcagattctacggtctgcatacctttgcccttttgtattagagtataagttggaaaactgataactggccacacagttgaggtgattccaaacaccaacttcgtcataaccttcgaggcaaatagtttcttgttgatggcaaacgatcaatgtgtagcaaatgatccgattttttattattccatggtctcgaactgaaaaaaaaaagtagttcgattttacttgactaaattgctgttcacgttgggctggttctatgcacatactctctgctcctgacactaaatgtcgatttcttgtaggattca

SEQ ID NO: 4583 - DNA, 2550 bp, Oryza sativa
acatatgtaaatgccacatgcatgatttaaaccttttaaaaattagaatagtcatatataagtagcatatgaaagatagtaaattaaattgtgaaaaactctaatatatgaatgatagttttaaaaatatattaaatttaatacttttaaaaattctccagtcaattataatttgcatatgaatgatagtaaattaaatgttaaaaactctaattaacatatgaaattgccacgtgcgtgatttaaaacttttaaaaatcctctagtcaattataattagcatatgaatgctagtaaaataaatgttaaaaactctaattaacatacatatgaaattgccacctgtgtgatttaaaacttttaaaaattgtaagtatcacatataactagcatatacatgatttaaacttgttgaaacctctaataatcgtgcgtaattaacatatgccatacatcaattgatttatatggataatcaatatatccaaaatagtttacatcgtgtacacaataattacggcattacatcggcggtgacggttgaccgcacgtactttctcctcactattgttccctccttgtgatcgctgcgtgagtaaggggtgtcttcatttgataggaggatgctagggtcaatcgtcaccgtgaaagggggttgcccatccaactgatcgtaatcctcgtcagtcttgtcctcaactccgacgatttttcttttgcctgggagaaccacttgacgcttaggctcatcaggccctctgcccttctttcctttgctagacatgtccttcacgaaaaagacttgcgttacatcattggcaaggacaaaaggttcgtccgagtatccaaacttgttaaggtcaacagttgtcatcccactgtcatcaatcattacgcctccaccagtcaacctaacccattggcaccggaacagaggaaccttgagaggaccatagtcaagttcctatatgtcctcgatggcaccgtaatacgtggcagttgttccatcgtgtcccatggcatcgacacgaacagcgctgttttggttcatgctcttcatgtcttgggctctcgtgtagaatgtgtacccattgatctcatatccctggaatgtcgtgatcgacccagacggtcccctcgccaggaaggcaagttgttggttgatcgactcgttacccatgagatgttgtcgtagccacgcggggaaagtatcaatgtgatgtcgtgtaatccatgcatcggacttaccgatgttcctggcgcgaactagagccaagtgctcctcgatgtaaggagctaccaatgaagagtgttgcagaacagtgaaatgggctttatggaataaattgttgtctaccgtcattattgctttccttccgagagttccctttccccgtagtctcccttcatggcgtgattcaggtaccccgattgggcgaaggtcttcgataaattctacgcaaaattcgatgacctcctctgttccataacccttggcgatgcttgcctctggacgagcacggttacgaacatacttcttcagaacgcccatgtacctctcgaaaggaaacatgttgtgtaggtacataggcccgagaatacggatctctttcacaaggtgacaaagcagatgcgtcattatattgaaaaatgaaggtggaaatatcaactcaaaactgacgagacattgcaccacttcattctgaagggcttctaatctatccggatcgatgaccttctgcgaaattgcgttcatgaatgcacatagctttgttattgttgcccggacattgtctggaaggataccccttattacaactggtagcagttgtgtcatcaacacgtgacagtcatgagactttaggtttgtgaacttcttctccttcgtgcttattattcgcttgatattcgtggagtatccagacggtacctttatgctctccaagcattcaaacatactttccttctctgccttgctaagagtgtagctggctggactcaagtaatggcttcctttctcctttggttccgggtgaaggtcgccgcgttgttccatatgcttcagatcattacgtgcttccagtgtatctttcgactttccgtatacacctaggaagccaagaaggttaacgcaaaggttcttagtgaggtgcatcacgtcgattgcgtggcgtacatccaagaattcccaatatggtaactcccaaaatatagagttctttttccacatcgccgcgtgaccatcttcgctctctatatgctggcttccaggcccctttccgaacactactttaagatctttaaccatagcaaacactgttttcccgctgcgatgtttaggcttcgtacggtggtcggccttatgttcgaagtgcttgcctttcttccgtaccaggtggtttgctgcaaggaatcgacgatgacccatgtatacaaccttcctacagtgcttaagatacgtactttctgtttcatccatacagtgagtgcaagccttgtaccccttgttggactgtccggataggttgctaagtgcagggtaccgagctc

SEQ ID NO: 4584 - DNA, 2140 bp, Oryza sativa
taaatcattcttgtctcaaaattttgatatgaaagatttgggagtagctgatgttatcttaaacattaagctaattagaggtgagaatgggattactctcttgcagtcccattatgtggagaagatcttgaatcgctttggctacattgatagtaagccttctccaacaccttatgatcctagcttgttgcttcgcaagaacaagagaattgctaggaatcaactggaatactcccaaatcattggctcgttgatgtacctggctagtgcaactaggcctgatatctcctttgctgtgagcaagttgagccgatttacttctaatccgggagatgatcactggcgtgcgcttgagcgagtaatgcgctatctgaaaggtactgtggaattggggcttcactatactgggtatcctgcggtactggagggttatagtgattctaactggatctctgatgtggatgagatcaaagccactagtggatatgttttcacactgggtggtggtgctgtttcatggaggtcttgcaaacagacaattttgacgaggtcaaccatggaagcagagctaacggcactggatactgctattgttgaggcagaatggctgcgtgatctattaatggatctgcctgttgttgaaaaaccggtgccggctatccttatgaactgtgacaatcaaacggtaattgtcaaagtgaatagttctaaggataatatgaaatcgtctagacatgtgaaaagacgattgaagtctgtcaggaaattaagaaactccggagttataacgttggattacatccaaacagcgagaaacctggcagatcccttcacgaagggactatcacgaaatgtgatagacaatgcatcgaaggagatgggtttgagacccatgtgagttatactatggtggtaacccagtctatgtgatcggagatcccgtgaattagatcctgggaagaacaaaccattaataaactagaggagagtaccaatatatataccctatccaagtgaagatgcatatactctcgtgagctgcaaggcaggttagctatgccttaatgagttctgttggctttaattagcaaagatgttgtcctgcagagcattcttgaaggaactcacctttgtgagcttgactgttggtcgcagtctatgaagattttgggtgaatcttctaggaagcttactaaagacctaggagtatgacttatacgctccacccgaggggtagtctacagacggtctagtaccagataagactttgagtgaaacttgcttgcacaagacttgcaattcaaggcgtagtccattgttcaagttgtgagtaagtgtagcttggagttctaggtggatgttcaaccttaattggtctccatcgaaccgctggtatataaacagtacattggaaaaggcaaatctcagtgggattttgagatttggtgggggattgttggaattaatgaatgggccttagcccactcgaagattaattctttggaaaatcacaaaagcccacctcatgggatggcatgcatgtggagtttagtaccaccttgcttattctaggagagggggacctccttaaaagggaggatgccctcctagccactagaagcatgtgtggtggagagaagaggggaaacacacgcgcgctctcgctcgcctcgcctggcctggcctggcagggcagggcaggcggcgcgcgtgcacgacgtacgcgtcgaatggtccgaaaaattggctcctcacccttgcgcagatgcagcctccttttgcagttttgttttgctgcaaattcggattcgtttttgttttggaaacgttccgaaaaatccggtacgtgcaaacggcgtggagtccggataagttacgcgcgacttatccggttcggttacgcgcagtagagatcgtgcgggcgccctgatcaagcgacccttctctatataaaccgacccgccgtcttcacgcaatatatgcgaaaatcaatctagggtttgcctcctactctgtactgcgccgtcgctcgtagactactccatcccactcgccggcgtgcaccagcgatcgggagagcaggtctccggaacctctgcctttgacgtcctgcaccgggagaaggcggcaataaggtttt

SEQ ID NO: 4585 - DNA, 4334 bp, Oryza sativa
gcctgcaggtcgactctagaggatcccccggcagtggaggggggaagggctagggaaccacatcaaacacctaggccataatgaacagtgactttttcctcattatccacttttgaggcctatttcctattaaaacttgtcccataatttctagatttcacacaattagagttttacccaatatatgttttattttagatgaaagttgaccaaaatttaatattacccatattttatatattttcctattgtattatttaaatgaggtttaaatctaaaattaacctagataattttggaggctttgagggttctaaaattaatttaaaatatcctaatgtggccattattacaatagcacattgaatgaacttatttgtataacaatgcattttacgtgggtctactcattctataaatataaattgagacttattacaacattaatctaattgtttaattaaacactcacatattcttatttatgtataaagcctaatttatttatatgaccattattttatatgagtgattttcatgctatgaggagcttgataaggtgtttcaaatattaattatatattctagtgagatactctattatagatggggccattgatgtgatcatcatttcatgtgtacttatatttcatgtgagattggattcaagtgaattatattcaactatgttgtttccttttgttaaatatgaaatcaggctatcaacatggtttgattatttaatatttgatttgtgatttataccaaagggtttaataattgacttgtactttatttggcctggctttcatgtgcataaatatttatgggattgataataaatatcgtatcgttgtaaatcgtaactattgctcgggtgtaaatctttagattgatttttttccattgcgtcgatttatggtttggcaagcaataacaaccataacttccagcatgatgcaaaaagtttttaaaaagtttgaaattttagtgatttttattgtcagggattctcaggatgttacattatgtcacagctcaaagaggagggacgaaaactagacttatttaaaaaaggcacaatgggccacaacgcctttgggccggcccggcatggcccgacagctggtgggccgtgcctgggcgggaggcgtagcccatgggccggcacggcccggcacgaagtgtcgatcgggccgtgccgacccgatggctggtgggccgtgccgggtgggccttttggccatctataattggtgtaggggtaggggcaggagatgttaagttcgtggggcaccgggagaggtgtcacgcctggaaattcacttgtaatttccgaactaatttgtgcataaaatcctcgtacagaaatcagccgagatacacaaactgacagtttaatatacaaatccatcataataataacgttacatacttaaaaaagaaaagaaaacagcagcggaattaacggtctagcgaagctccggctccactcccacaggcagctcaactggggtataagccaaacgtcttctccttctagatcctttttcttcaactgaggttgattgattattgcaaggtgagcatatgatatactccgcaagccacacagcaaatatgcaagtgcacatggataccaaaggatggcataatataggctcatttgcaaaagcagcatttagcaaacatttagaagtaaaacagtagagtaattattcatcaactttaatcaacactgaacagcacacccatgctgctcaggcccaaccatcctgaacaaccatacccggctgtacagatctaactccaaaccaggagctaagcaaattattaccagttatagcatcaatagttattgtgagagatgtgagactactcacgaaaaacattgctcaacccgcccattaccgcgggcacggctattcgaatagttttactctggccagatgtgtacaaatttacccacaagacacaactccacaatatgtcaccctatcaccatgtgcccatgctgaacatgtcaccatttgtgtagttgtgacaagacccctcatatagctcaactcaaagcagcgcacctttcctggatcataatcaccccctcaaaaaccagaggcatgaactccccagcgacccccacggacttctcaccgcttctcagtctggctcaccacaataagccttgctatacaaagtgtctagccgttgcccattctgacttgtggttagtacggttaatgtctcacaccagtagctcgtgaaccggtccttaattgtcatgagcacgaccttcaaaaccatgcgctcacaacccaccattgtcaaatttcaattatcaattaattatcataacacgattaaccatcgtgagctactattaaatataaccataagtaataatgtagtatgatttatccccttaatgagctaatgtttctaagcatggctaagcaattatatatatatatatatatatatatatatatatatatatatatagcatttagctgaaccaaaccaatatataaggttcaagctaatcaatttattacccaaggtatcgaggaatagggtattcaattcaaattggccataacaaaggaatatgttcactccacccggtgacattcaaaaataaatgcacagttgaaataaatagagaatttaaatataggatcaacatgctcaaaggattgtgtttaggatctgtgtgacttgccttgcaataatcggtcttcaattagtcttctgaaccacttccgacgcactaacgaaccttcgcaatgacggaaacgacaagctaacacacaaaacggagaaaaagactaacaaaaaccaaataaaaagtacatataaagtaaacaaacatgtagatcatgattttaaataaatttagggacttgaacggcctcattctgactacatataaaatagttatgaattttacaagattaattccaattaaagcctattaaagaaaaaaaatattccaaattaatttaacaatttataaataatttataactgagatataataagatataagactaaaaactggaatgaatttagttgacgatatttagtaaaaagacctaatatgccattaaaaagagataggtgactaactggacatatgacaaggcaagcacacgcactgccatgcgagcacgagggccggcgaccctaggctacgacggcgatggcgaacggctgcacgacggcggaaaccgagagcacaaggaggaataggaggacgcgacgattcttaccaacacgagaaaaaccagcggacgggcttcaccttggcgctacgttgccgaagaaaacgacgacgatgtccagcaaccacgaagtcgacggcaaggctcggccggaggtggagtagatcggcttcacgtcgacgaggggattccagcgggttacaacgaaaaggaacaggtggccgggcttcttctccttgcgaatccaacgacggcgacgacgaccgaaggcgacgatggacgacgacgaccggcgcggctggagaccaaaacccagtggcaacccactggttcacggcggcgggcaacctccggtggaactcggcacaaaagaaccgtcggccggggtggagcttgaccttgcggagccgagagaggtggcggcgcaggagggcgacggtcgaggcgacgacaaacggcggctggagcggttgccggcggcggagagataagacgagcgcggagaggtggctagggttaggaaaaacttggggaaaaaaggaggaaacgaaagaggaggccgagggtctgctatttatagccggaagagggagagatcagctcgggaacggatgaattcggtgaaggaagattcgggcttatcccgagttcacccggataaaaacggccaaaattcgtgggatagataacgaatttggtgggggtttcttggggattaggtagaggagatagagaggaattcgtttttgcaaccaattttggaagggaagcaacggatgcaccggatttgatggaggaggaggcggctgcacaggttagctcggctctggctggagctggaagacgacactgtagcggcagggagggaaactagactttttgggctgggccggaagggatcatcaaaggacttccaatttaataaattaatcaatgagatgatctttgaattgttaaaaatacttccaatgctaaaataatttcaagaataatcctgaaaatacttgaacacttaaattacttaacaagattaaaatcagattatttaatgattaatgtattatttaaataattactgaaatgttctttgtattattaaaattaggaatt

SEQ ID NO: 4586 - DNA, 9208 bp, Oryza sativa
ctgattcctgcccgcttaggctatcaggcatagctcgggcaagacagtatcgggtcgtgtctagggtccgacttgtgctcttgctttgcttaagtttgatgcggcctttgccatccctctagtggacaaagcacctagtcagcatacttcttgacattaagaaatgcattttattccctcatccgagcctagatatgaggggataataaaccaccatcctaaaatgacacttaattataagtgaaccctatatattttaaactatatggcatattttttgaaagctaggcccgaccgtgtgttgtcaccaatgtgaccatgcaaaccacagtgctggataggccaagggctgcaagggagctgatatatatttttagaacatgaaagctttattgaactctgtaaattacatcaaggtggtgcaattgtcctaagaacacctgttgggggggggcgtatgtgtggtgacgtggacaaactaggtcaacgataagcaaatattggtcatgagttggatagaaagaattgcgtagataccacctccatcaaagatataaccatgcctagtttgaacctacaataagcacacatggcaacttcgtgggtacaacccgaaattatcgagtctccaaacctagataactcccttggagttcaacgatccgcaatttcattatgtctatcattaatatgcatacactaaaaatgccctaaactaaaagcagcagtttaacaacaaataattccattccaactggaaatgggataaattcccgtgtgcaacaccacggatcaacttagtaccatttccatgtttgcatagcaaaataacctactaatggagttttgaagtgtgctcaacgttttaaaaagataacgacaaaaataattaatcattactaaatcatttcttcaaaaaaatttgaacctgaattagcatggcatcatcactattcaaatggtttcaatattgatcattggccacaattattgaccataggaaaatactgaagaactatagatttgcagtcgcaactaagaaacatgtttaatataaataaataaataaagagtatcaaaacatttgccagctagcatcaccaataatttgtttagatacctatgtttggtcgaagtataactatagccttagccatagccatagccttaggcttttcatcatcattgtcactttcagtttcactgtcatcttcagttttgacacctaaacattgaatagaatagtgtgagcattacaaaatgttagttagctgtagttttggaagaaaaaaatcaaatacatttgcaatatttcaaaaatgaaacagaactttaattgtgagcgttacaaaatgttagttcaatgtagttttgcatgaaaagaatcaaatacagttgcattatttcagaaattaaacaaaactttgtgagcattacaaaatgttacttacaatctactagctaaagtctaaggatgcacacagcatgaaaggagtgcgcataaagtttaaaaaggataacaacaaaaatatttaagctcgactaaatcatttcttcgaaaaattctgaacttgcattagcatggcatcatcactgttcaaatggttccgatattgatagtcggccacaattattgaccataggaaaatactgaagtgctgaagatttgcagtcacaacaaaaaacatgattaagataaaaaataaaggttaccataaaattttctagctagcatcaccaacaattttcatagatacctttgtttgttcgaagcatagctctaaccatagccttagccttttcatcttcattatcactttcagcttcactctcacattcagttttaacacctaaacattgaatagtgtgagcatttattggaaaatacgagaaaaaaattatcggaaactcatcatattacctgcaccactagctatggcgcctttgttccatagttcacgataatattcttaagccttgtcatacgttttcatcacaagatggccctgcctggggctgctaccactggctcctccctgcctggggctgctaccactggctcctccatccaccctatcggatatcaccatcccaccattctttatgccaactcgcagcaactcaagctgacctgcaatatatcgcatcatatatattccatcatgcatgtatgttaataactaggtgaagaatccatgttgaacaatattgcattacttcctcataggctacatgaatttgatattcacttcctatatataacctaaaattcaaagaaaagattttctaaaaccgaatttccataaattttgtctgtattttcttttataattacgtgtactttctttcctgttgaactccttccagattgttgggttttctggtgcaaagaggattattagaacgatcaaaagtgatacagaattaggagcttcaacttgttacattacatgatattttagcacatacaagaatattgaactagcaaaatatctcgttgtttctttttttttcatggtaacacatttgactagagtttgttctcatcaacacattgtggtttagtctaaaaggaaaggagttgcttgcaattatttgtttgtgtgtactgatatgtgttggaacataaagtgaattaaccatctttcccccatcagctttaagcttttggattgaactgattagtgcatcaatgctagatacttaaggggcctcgcgtgaggaagaatgttagaatataaagtgaattgcctatctttccccatcagcttaagcttttggggttgaactggtcgatgcatataactcaaagtgtgcatacgcatacatgcataaatccacttctatgattctatatttgtaaaacaaaataaagtaaaaaattctgcgtaacagcctctcctgggcacttctgaagagcaacttgaagctttaagcttcatttttcatgaaaggtccagcctttgaaaattttaattcaattattgaaaggctgctgagctgacatggttttactgatggacaccatgcacgagagagagatgggaggccggaggggagttggcagcggctgctagcgctgtagaaaatggtagagcagagcagcggcacaattaaaaagcaaccaatgatatacggagcttgggaatacctaagctgaagcctagaggcggctgagcaagtgatcggtgagaaactctgtagtagtacttaaagactcccgtatgtacttcagcagaccagcatggaagcttgacaaataccgcctgtttcatatttcttgaccttttttatagctaacatggtctctaaaaatatatcttttattttaacacataaaagacaagtaaatatttaattttattgagacagtgttttcaaactagagttattagttattgatagtcaaagtttaattgttcgatctcaaccttatttcaaaggttaagaattatgaaatcgaaggaaatactttgatcccaatccgtcccatgatataaggtgtttgaagttccacaatataagacatgatcaaacttggcatattctacaaaactaatctttgacttttagattctgattatacgataatgttttagcaactaagttcacatgaaagtaaattcaaatgctaatttaattatatgagtaaagtgcatatagggagtagataatttggctatttctagctaactttgaaataaaaatgtttgtaccaacaatagcatatggttcctatatatgactacctctacacacatggcatgcaagatctgtaaggtcaaaatgatatggaaaaatttgcgaaaggggacatcctggtttgacagttttagctgcgtcgtagaagcaaaactttgggaaaacatattctcaaagtatggctcttaactgatggacactgtgcctattttttattatatttcttttattgagaagagaaaggaggccagaaaggagtagctaaaacatgcatggaaactcaggagttctcttgcgatcagaattgcttcaccgaggcacatgatacatgtgacctgtgaccatcatactattagaggtcatatgcttttgattttatattgaattacaaaattaccataactatctcctcaaaattacatagatttaatgggatttaagctatgtgaacagaaatatcacttgcgcaaaacatgtggctaagctggtataaacatcaacaattgattggagttaattaatctcgtttattttgcattttagatcttttgtttgaaacaaattcaacttaaaataagactgaacgcaactatataaatattaatatgttatactaaatatattttcagggtatatgtaacatggacacgtggtctccatgtgttcaaacatgtgctaactgctaatcactttttcagtagcgcacattcagctaagtgttaactcattttgagtgaaaaataatcacaaatatctgaaatttcgatagacactagttaagcataacagaactattatcggtactgaaattttgtatgttttttttcgtttctatttgattgtcttctgaagtaaagaaccaaccaattcagtgtcctggtagcacaatgtcaagaatcaactcatgcttaatcaccagcgtttatatagaccagatctcctgttttcatgcgtgaaacttcactgtataatgtggtaacactgctacagaacccttatgggtaccggttgggaatctggtttccagtcggtaccaatttggcggcaccaataccgaaccgcatgggatactcctatcgtccaacaagattatttagatttccactattattttactataaaattaattaataatgcacttgcaagaatttctaccaaagtgctaaaatctacatccaaaatgctaaaatctagcaactagtgaaaacacatgcatcaataaaagaaacggagatagaatatagagaaattaaccttaaataaaaaatttaaggcaaaacctcccctcctctagctagacgagtagaatagaggcgccactagctctgtctactcctggccagcttgaggtaagtaggaggtatttatactgcacacaataggtgctggttcttaggacaaaaccggtacctattttctattataggtactggttctatgttaaaaacagacccaatacccccaagcaaaaatcagcacctataagtgggcccaccttccgaaagtattggtggaccgttagtggggcccacttataaatgatggttctgtcataagaaccggtgcctacacctccctgcatataggtgctgatttttctaaatgaaccgttacctataggtgggcccacaagtgccaatgtgccggccggaccaactataggtgtcggtttttggttaataatcgacacatatgcttgttggcgaaaaatccgtgttcagccgatggtgccaaaactgtgttaacacggactaagtcgatgaacacaatagcctgggagatatgcttagctccagtgcaagtccaaaatattgatgagatgcgggcgtgccagtcagtttgatcctgtagctgataagatatgcaaataacagatcaaatagccgatcggctgacaagccgatggagtaattccagccgatgccgataccagccgatgccgataccagccgatgtcgatagggttttgaacaattggctatatatccaatgtatattctgatacttgagtaaaaaatgatataattaaagacaatcggcgggtgataatcaatataattcgacaatataatctagtagaaactaatcggctaataatgatacgatagaacaagtgtcgatccaaaggttaaagcatatattggctggaaatccgatgttataaaattcaagagattaattagataaacagtgaaatctttgttgcgatcggctaaaactaacttgtatacaatccttgtaagctgattgtttgtatttcttaacgatattactagaaatataattcccagcaatggcgtagaaataattcctggtatattatggttaagtttatccacaagcgcacggatataccattgtagcattccacccaagagtattccaagggtatcgtatttgtttaatcccgtgggaagattatagtagagagaaccgtactaataatttatatgttacttgtaataatcatagtctaagcaggggttaatataatccatagggtaggatgacatacaagcattgaactactcattctcatactaaattatctaagctaagtggaaagaaagtagaaaagaatctattcctatacatctagtatacatattatacatacattctagttatatgattaactagctaatgccctctttccgatgccctcctagtacttcgagaagccacccctaactgttgagttccttacgacagcccgtcatgaccatacaaccggagctaaatacgttcaccaggaaattaacttaggactatatacacgcgtggaggaattcccgtactgagctatcaccatcagcggctgtcggtgatatgggcctgggggtatcacgtttagagggaggaggccttccccaagcccgcgtggcttcccctgaggggggtcgagcccggggtggagcggcggctgccccctcccagcttggggtcggggctgcgccccaagcccacgtggctcccctctaggagggtcaagcccggggtggagcggcggctacccctcccaacttggggtcgagcccggggtggagcggcggctgccccctcccagcttagggtcggggccgcccccaagcccacgtggctccccctgagggggatcgagccctgggtggagcggcggctaccccctcccaacttggggtcgggttgccccgacccgctccccgtatcagcccacgtgtacagggttaggtgggcacacctaacgcccacctaaccgcatttaaagtggtccttgcagccatgctatggcacgccgcatttaatgcggcatgttgcacatctgacaggtctgtgaccgatttgtggctagtctatgaccggtcgaatgaccgatgggacggcggctgtgtacccccaccctgtcagtgtgccaggcggcatgcggcgtgctctgtcccgtcacatcataatgagaggctttttagtctctcatcatagccagagtcggtttatccgctctggtcaaacaggagcccagaagtcttcatctcttaaatggcaactgacaggggcaccccctgtgtcaggcggcaagatttgacgggccacatcatcaagacgacgtgcgcttggcttcccaaatcaagatacaagacatggatttaatgcaaagattgtaatacttctccactaagttaggttgttgggcccatgtggtaaccccttaaggtataaaaggaggtctaggcctacttaaggagggggatggacagattgaggggaggatgagccattttagactctagagcagcttctgcccctcatgatcaacaccttctactccaacaaggagatcttataatttctcccacaatcagcatagcacaggagtagggtattacgcttctcagcgggcggaacctgtataaaccccttttgtctcatcgtcttggaggggcctaaccccctcaagatcacacagtttcgctctccaagccctcgaatctcacccgctacccccggccgaaccaaaaaaggggggcctcacggttccctggtggaggagttcaccttccgacaacggcccacctctcatccgcagcatataaccccaaataatgattcccgataatttagacaccacgcctaaactaccagatactactctaatatcatcgttatgacatagagtaattacaatagcaaacattatacccgtacctatgcatctcctaaataagctagcagtataatcagtataacattaacataaagtaaagttggtattcatatactcggaaagtattttaataccagaattgtataaggaagaatattctaaataaagtacaaatcttacaaaagagaaaaggagagctactagagccatacctgaactcttccgaagacttccagacttcgatttctattctattcctactcactagcttgagaatactaaactaaacttgagagaaatgagaaagctcttgcttgaagtgtgtgttgaaatggagggagtgagagccttttatagcttgagtatgacggttatgacggttggaaaaggtcggtaatactctccaaccgtcactgtggatcaatcccagccgtccatcaaaaccctgcatcgaacgaagccgcggtgggttcggccgaaccatgggctgggctggcttggctcaatttcggcaggtggcctcctcttttgctcccatacgcagacttgtgaattttggcccaattggtcatgtcatttctacattgttggtccattcattgataagtctgattctcgacattgttcgattgattgatcgtctgatttgatgtcgattctcctccactttatggttattctcttcaaaaggttagtaatcctaatattagtgaaatattattattctaacataaatatgcattgcaagcataactagttctcctctattttggtagtattgacggtcgaaattgatcgctaacgaccgtcaacaccgatgcaacatccatataactcatcggctaaaaccccgatgaaactcttattataatcaacgacatgttatgttttatgattctaaacatgactagagatgatgcatcgcaaagtatgcaaagaagcataaagtctaaacaatcaaacctttgagtaattttcagggtggtagatacattagctaatctaatctagcaagataatttagccgatactagcataaaccctataacaaatctcagccgatacaagtaaattacaatgctaaactagattgactaagatatatgataaataggttggcaaatatgtcaaccgaatcagagcaatccaagaggttgaagcgatgcagccttgaacaacgccaatgtagccaatacaattgccatggccggtggaacgtaagacttaccctttccccggagatcgaaagccgatgcaaccccgcgtcaggtgccaagttccgctgtgataagtaaaaacctcggaaaagaaagtggcgatgcgccgagagtagttgtattaatctgtggagatagtttacattga

SEQ ID NO: 4587 - DNA, 4100 bp, Oryza sativa
atatatatatatatatatatatatatatgttacttcgcatttatcctaatacatcttttttatcttgcagaaaagacgtgttgtcggagtcgtccgtcaagcctgagtggaagagctagccctagaaggaattggagcaggcaagtgacgtaataatataaatgattgttatatttgtaatgcaattaattaagattattagacctgtaattggacttatcatataagattgtgtagtgttctaatattatttgagttttaatataagattactttatttataattagacttagtatgtataattattgactacggaattggtgcgacaagtagcaattgactattgtagtcttaattagacttagcatatacgcacgaaacacttagcatatacatgactattttagtcttagcatgtaatattatttgagttttaatataagattactttatttgtaattagacttagtatgtaattattgactacggaattggtgcgacaagtagcaattgactattgtagtcttaattagacttagcatatacgcacgaaacacttagcatatacatgactattgtagtcttagcatgtaatattatttgagttttaatataagattattttatttgtaattagacttagtatataattatttactagctagggttgtataatatacgtcacctagacttagcttatatcacgatttgtaattagacttagcacgtaaggttgtgtagggttctaatgtacgacatttacacttagcatacatgacttagattgttaaaacataaatgtctcgtgacttagcagatgtttcttgtatcaacagatggctgaccgcgatgaggaacagatattgtacgatacaatcgcggagggaagcagccagtactggaatgaagaagaggggaacgaggatccaaaccagtacttgaacgaggaaggaaacgtggagagggatgcggaggggaaccaggaggaggaggctagtggtagtcaaccctccgttggacagaagagggcacgcgggcaacgaggtgcagcgaagaagcttgagggtcggcacatcataacggaagtgcaagaagatggacgtcctagtgccccggccgaagccgccaagaactatgtacgtcacagcggttgggttgtgcgggataacgtgcctgtcagtacggtgtactggcgaagaacaagggcacgcggagatcatgagagctttgtcccagattcggagaaagagatgctgtggaccacaatgctcgagacattcacccttcctgcgggtacagaggacaaagtgaaaaggtggactctgaagaaaatggcagaacagtttcagagcttcaagggagatctgtaccagaagtatatactgaaggggcagacaccgaacttcgacacattcccaaagctaagggatcactgggacgagttcgttgcatataagacaggtgaacaagggcaggcgatgatggaaagaaacaaagaaaatgccgccaagaagaagtaccatcaccacttggggtcaggaggctatagcgtcgcgatgccgaagtgggagcagatggaggctagcttgattgagaggggtatcgaaccggcaacagccaattggccggaacgatcgaagttctggtactatgctcacggtggaacgctcaacccagctgatggctcactggtcttcggcgatcagatacgagaggctgcgcgacgactaacagatgcagtggaagcctcctctcagggcacgttccgaccagacagagatagggacgagctgacactcgccctgcagactccagagcatccaggacgaacacgagagaaaggggtgattccttggaagattggtttcaaggaggacatccacacgtacaggagtcggatgaggagcaagagagataccgaggcgaagattgcagacctagagttccgggtatcgagctacgaactcaacatgcaagaggaggtggcaaggaaggttgatgaacgcatggccgcacatcggtcccatgatccccagccgaccattcctcctgcaatggtgagcccgtcaggaaaccgtagcagctgcgcctcaacggggcaggtaggatcacagagcatggacgccatgcaaacacaggacgaatcgacttgtcccgttgatgacatcactcagcggacaccatgtgagctgcatattcctttcaagaacttatcaataaaggtaagatttagccattccgctagttgttgcttatatatgttgattactaataaataatctctcacaacatgaaggtggcgtcgggcatggccatcccaacggacccttcaggtacttaccactgcaggccgattccagcaggatactcgaaggtcgaagttgagttggtcgaaggcgcgtacgaggacctcgagctggattaccctggaggagacggtgagacgcatctacgagacacaagccatgccattattctatggcgcaggtggtacatcatcctccctgggcgacaagcggcgtctcgtgcaccatctcctccggctccgccatctcctcctcaggatcctgcaccgtctcctcctcatgctccgccagcaccgtctccacctcaggctccagcatcgactcctcctcaggatcctgcaccgactcctcctcgtgctcctacacctactcccccgcaagctcctcttccggcaccttcaaagtcaagggcccccccagctccaccgcctacccacacaagggcaacgaagaaggcgaaagttgacgctgccaagaacaaggacccggggtacgattgcacgcaagaggagcttgacgcttacgttgcatcagaagtcaagagacaattcaagcctcgaagtccagaaaagaagattcctatagaccccagtgtcaggaacttcttcaggggtatgtctgcatctgtcaaggaggccatcaagctatcggactatgagcgaacgctgaagaaagcatcttctggaaagtccaaaccagtccctcagcttggagagcaaccaaaccaggagatcgagccgttggtgaccggtaaagaaatgacgatagaacaatttattactgacaccggtctaactacggatcaattgctaggagtcgcaccaatcgaaaaggcggaagtgaaatacatgtacgaactcggtaaaccgcttgtcaagcctgagctgctgcagtccctacccacacaaatgtacaagttccatcagctgtacatggagatgagcgccaccggtagagagatgatcggagcgaggatcagggacacggacttcttgcaaggagatgacattctctggatcaatttcaggggaatctacgaactataccagctggacgccctcgacgtctctattatgagttgctggattttgtaagtatatcgttcagttagatttcttactatacgtctcctttaattaattaggtccttgtatataagtagactatagaaaataatatactcccttttatcgttgtagaatggagattcaaagggcccgacggcggagggttttcgatactggattcatcgaccctcgaaaagtaaacgtcgcaatgctcgaccaatatccacaagaaacagaggacaatctcgtccatctcctgaaggcgcagcattacaagacgttcatactgttgccatacaacacagagttagtttaattttactgtcttcctacataccaaatttcattcccgtatgaacttgctaagtgtttcatatgtaatgcatcccacgcacattgcagattccactgggtgcttttactcttcgacctggaggcctgcaccgtcaacgtatatgactcaatggataaaaaagagtctacgtttgacaaggttttcgaacttatagacaggtaccgtcataagttcctttgttaattaagaaaatcttgttatgttaattgctactacgaatcatagctttaaactccatgtagggcttggtatcggttccctcatttggtccgcggcaaatggacagaaagacttaggcggaagttcaaatttcctgtgagtacacatgctctacatttatatttctccgattcaaatacatacaagtgtat

SEQ ID NO: 4588 - DNA, 11392 bp, Oryza sativa
taattcatttgtatcaaatattttgatagaaatctgggtaattaaacaatacatttattgtagatttatttcctcctgttttggctggatatagcctcacgataagtacttccttcttgagatatgaatcacatgggcattagctggcaagctattaattatttatatcaaatctttttagataactatgaccaattaagaagtacattaattttagattttcactgctatgtttgcatgctacacagtaaatggtatccttttccccaatatgaacatatatattcaacaacttctcttattaaggactcatttttactgaccgcgcatattttccagcaaagctcaaccttcaagcctgatagaagctcttttgctgccctgattgaaaatcgcaaaaggttaatccagattaaccatagaaggtactaccaaaatccccactggcatgaatccactgccagaattcttcaaacttttttccttatttttatgatatatggacaaaaaaggatattggtgatgaactaatcttcagcactactttatctttttgcttccaatgtttgttttgcatttcttgtcgtagttgaaagactccatgagtgaaaagaatttaaatttgttttaaaatttttaagttgactatatgtggggaaatttgttttgggtaggattagaaggaatggattcatatatttttgttacgaacaattggtcaactatataattcaaaagagtaaattgtacgggcggtccttaaacttgtaggggtatgtcatataggtcgctaaactctcaaaatgcatatccaagtaccagaacttgtcatagtgtgtaatataggtcacaaatcgctacaaccccttcaggatcctacgcagcgttgacgtggcatgccacatgtacatgacatggcattattttgactgacaaatgggacccatttaaaattttccctttttctttttttcttctcttttcccctttcttctccttcatctatcatccgtgcagaaaaaaggaaaaaacagaagaatgagaagaaaacaaaaaagaaaaagaaaagaaaaaaaagaaaaggatacgtcacgtccatgtggcattgccacatcagcgtcacgtagtatcctagaggggatgtgtcaatttgggacctagataataaactttgacaagttctgggacctggatatgcatttcgagagtttaggggcctatatgatataaccctacatgtttaaggactgctaatgcattttactctaaatcaaaatgtttgaaacttaacaaccccgtaaggtataaaacaaaatatactgaggcaaatattatcttgtgacttggaggaattaaacaataaatttactgtgatatttcccacttgttttgtttggatacaacgtcatgaaagattgtacgcctctttatcaaattccttctcctgacatgactaatttattattttttcaaacctttagataaatcatattattaaggattatatgtaattatacagagtcatgatagataaacttctttgactacttccttcttcagatatgatttagttaggaagtaatgaggcaagctattaagtattttaagtatcaaatcttttcatagaaatctgagtatttaagcagtacattagttgtacatttgtctttagcttacatgttattaatttatttgtatcaaatattttcatagaaatctgggtaattaagcagtacatttatgattgatttatttcctcctgttttggctggatatagcctaacgataagtacttccttcttgagatatgaatctcatgggcattagctggcaagctattaattcatttatatcaaatctttttagataacaatgaccaattaagaagtacattagatcttgattttcactgctatgtttgcatgctacatggtaaatagtatccttttccccaatatgaacatatatattcaacaacttctctttctgaggacttttttttgctggtcacatattttccaccaaagcttgcaaccttcaagcttgacggaagctcttctgctgctctgattgaaaatcgcaaaaggttgctccaaattaaccacacaaggtactaccaaaatcccctctggcatgaatccactgttagaattcatcaaactttttttcttatttttatgatatatggacaaaaatggatataggtgatgaactaatcttcaccactactttttctttttgcttccaatgtttgttttgcatctcttctcgtagttgaaagactccatgagtgaaaagaatttaaatttgagttttaaaatttgtaacttgactatatgtggggaaatttgttttgggtaggattagagggaatggattcatatatttttgttacaaacaattggtcaactatataaatcaaaatgtttgaaactttacaacgctgtaaggtataaagcaaaatataccgaggcaaatattatcttgtgacttggaggaattaaactataaatttaatgtgatatttccacttgttttgtttggatacaatgtcatgaaagattgtacgcctctttatcaaattccttctcatgacatgactaatttattattttttcaaacctttagataaatcatataattaagggttataagtaattatacagagtcatgatagataaacttctttgacaacttctttcttcagatatgatttagttaggaagtaacaaggcaagctattaagtattttatgtatcaaatcttttcattgcaatctaagtatttaagcagtacattagttgtacatttgtctttagctggcatgttattaattcatttgtatcaaatattttcatagaaatctgggtaattaagcagtaaatttttatagatttatttcctcctgttttggctagatatagcctcacgataagtacttccttcttgagatatgaatcacatggacattagctggaaagctattaattatttatctcaaatctttttagataactatgaccaattatgaagtacattaattctagattttcactgctatgtttgcatgctgcacagtaaatggtatcctttcccccaatatgaacatatatattcaacaacttctcttattaaggactcatttttattggccgcgcatattttccactaaagctcaacctgcaagcctgatagaagctcttctgctgctctgattgaaaatcgcaaaaggttgctccagactaaccacagaaggtactaccaaattccctctcgcatatccactgccaaaattcatcaaactttttctctaatatagcttttgttcttcgttacttttttttttgaaagtttattttgcttttcttactggtggtaaccggaagccacggagcgagaggaatttaaattcgaattttaaactttgtaatttgtgtatatgtggagtaactagttttagttttgggtacgatcagttggaatgaattggtatattcttgtcacaaaaaaggtcaactctataaaatcaaagtttttgaaactagacaacccggtaaaacagaatcaaatcttttcataggacttcaagaaattaagaaataaattaattgtggtatttgcttcatgttttgtttggatacatcataaaaaaaatatttctctttatcaaatttcttctcctgatatgaatattttattatttttcaaatcctttgttagaaatcttagtaattaaggatcacattaattataagtaattacatagcctcgtgatagtattgatagctaaatgtctttagcttgttccttcttgatatatgaatacactagcaattagcacgaattctgttaagtcttctaatatcaaatcttttcataaaaggctgagtaattgggatataatattattaattcgtttatatcaaatcttttcatagaaacctgggcaattaagcagtacatttattacagatttgtttccttctgttttggttggatacaacctcataataaataaaccgctttaagtacttccttcttgagatatgtatgaatcacttagcagctatcaattcatttatatcaaatatttttactcaaatctgaccaattaagaagtacattaattctagatttttgcactattttttggatgctagtacataattaatggtatcctccccccataagaatatatattttcaacttctcttaatgatgacttttgttttactgaccacaaattttcttccaaagctcagaaccatcaagcctgatgcaagctctcgtgttgctctgatcgaaaaactgcaaagatcgctcgagattaaccacaaaaggtacaaccaaatcccctctgacatgaatcccagcgaaaattcatcaaacttttgcaatcctttttatgatatgtgggcaaaaggagcatgtaagtgatgaactaaccttcattacttaatttttttccttcaaaagtttgttttgcttttattactagtagtagcccagaagtcagggagtgaaagtaatttaaatttgagtttttcaaccttttaattggctatacgtgaggaaatttgttttgggtaagatgaggtggaataaattgatatatttttgtttgagacaaatggtcaactctatataatcaacattttcgaaactagacaaccccatcgggtaaaatgaaattcactctggcaaatcttttcataggacttggagaagttaaacaattaattagttaattgtggtatttgccgccagttttcatttgataaaacatcatgaaaaattatacctctttatcatattccttctccttgtatgattaattttttatttttcaaatctttcgatagaaatctaagtaattaaggattacattaattataagtaccaataaagcctcatgatagataaacattttttaactaattccttcttcatatatgaattaattggcaagtaccatgcatgctattaagtcttttaatatcaaatctttcgtagaaatctgggtaatgaagcagtacatttattatagatttgttttctcctgttttggctagatgcaacatcatgataaataaataaatttaataagtgcttccttcttgagatgtgaagcagttggccattagcatgcatgctattaattcatttataccaaatctttttacctaaatctgaccatttaataagtacattaactctagattttcactgctatgtttggatgcttacataactaatggtatcattttcccctatattactgatcacacatgttttcctccaaagcttagaaccttcaagcctgacagaaactctgatcggaaaaccgcaaagtcgcaccagattaaccacagagggtacaaccaaaccctctctgccatgaatccataggccacagccagaattcatcaaactttcgctcgcatttttatgatatatggacaatagaaaacgcatgtaaatgatgatcactaatcttcgttactttcttttttgttgcttccaaagtttgtttcgctttttgttactggaagcagtcagaagccatggacgcgtccaagaaatccgtcatgacgaaggaggagcaacaactgtcgccagcagcaagcccagcggcagcagtcatgacagccgaggctgatgccatcaacgaggaacaagacaaggctgctgctgctacaaccgcagatcacactgctcctcctcctcctcctcctgctgctgctgctgttgcagatcacgctggggagatggacatggctagtggcagcggcgttgctcacctggcaccaccggcggtggcgccggcgccgcggtcttctctcgctatggcggtctcggggctggcggaccatgtcctggagcgcatggtgaaggtgctgatgaggaagtgccacccgccgcaggcgttgtacccgctgattggcaagtcgccactgcggccgccatggtggccgacggggcgcgagcagtggtggccggagctcggcgccggcgccgtcgtcccgccgtacaggcctgcgccgctgctgtccaaggcggagaaggaggtggccgtggtcgccatggtgaagaacctcgtgccggacttcgagcgcctcttcatggccgtgcgaatggcgcccagcgtcaccagcaggatcaccgacgccgaggcgagggcgtgggacgacggcgtcgccggggagcgcgagacgtacatggcgcggcacccgcaccgcacgacgccgaccagggcgtggaagctcatggattccctcaagccggaggcggtgaggatgaagctcaaggcgcccaagccgaagccgcaggtcaccatcaaagtcgaggacgccgcgcctttcctcactgtctccgctgccgctgaccccgccgccgtcgaggccgccatgggggccatcgaagccatgagaaacagcagcaaggatccagatgctccgtactatcccatgccatctccacttcatgggcataatgaagttggtccaaatgattacccaggtatgaatatgatacgaaattatttgatatttcaccaatatgttttgttccatatatgtgctgctgaattctgaatcacttttgatagttctaataatcctcttttgcaccagaaaacccagcaatctggaaggagttcaacaggaaagaaggtatgtgtaattataaaagaaaataaagataaaattcatggaaattcggtttaaaaaattctttactttcaattttaagttacacattagtcatcacggattctgcacctagttattaacatgcatgcatggtggtacatgtatgatgcgatatattgtaggtcagcttgacttgttgcgagttggcaaaaagaatgaccggatggcgatatccgatagggtggatggaggagccagtggtagcggccccaggaagggctatcttgtgatgaaaacgtacaaaaaggctcaagaatattatcgcgaactacggaacaaaggcgccatggctagtggtgcaggtagtatgatgagttttcgataattttttctcttgtctaaaatacaatagaacatatagaaaatagtatggttggctaccgagaggagtgaaccgcctaggcagataagggtcagggttgttagctggcttaaccagctgagtgcacataggccaacgattgatcaccctcaattatttcaaacaaaaaccacacgttgaaagagtttttttattgattgatgatcgtagatctttgcgtatgtcgacaccacttcctacgccttgctagatatatagtaccgtattgttggcttttagctgtattattttttttgtcggtcactccttgcatgtcgtgtgcatccttagatgatgttagctggtaggttggaaataacattttgtaatgctcacataattttgtttaatttgtcaaataatgcaactgtatctatttttttcattcaaaactacaactaactaacattttatgaggctcacaattaaacttttgcttattttttgaaataatgcaaatgatttgattttttttatccaaaaatataactaactaacagtttatagtgctcacactattcaatgtttaggtgttaaaattgaagatgacagtgaaaccgagagtgacaatgaagatgagaaggcaaatgagaaggctaaggctaaggccaaggctagagctgtgtatcaacaaaataaaggtatccaagaaaattattggtgatgctagctggcaaatgtcatggtacctttttatttttattttaaacatgtttcttgtgattgcattcctatggtcaataattgtggcggatgatcaatatcggaaccatttgaaccgtgatggttccaatctaattcaggttcattttttttaataaatgatttaatagtgcttatatatttttgttgttatcctttaaactttgtgaacagtccttagatgttttgtctatccttagacattagctagtaggtaggaagtaacattttggaatgctcacaatttttcaaatttgagaaataatgcaactgtatttgatttttttttacccaaaactacatctaactaacattttgtactgctcgcagttaaagttttgtttaatttttgaaatattgcaattgtatttgattttttcatccaaaactacagctaactaacattgtttaatgctcacattattcaatgtttaggtgttaaaactgaagatcagagtgaaacagaaagtgataatgaagatgaacaggcaaaggttatggcaaaagctaaggctagagttatacctcgaccaaacaaaggtatctaagaaaattatcggtgatgctagccggaaaatgttatgatattcttttttttatattaaacatgcctcttagttgcgactgcaaatctttagtacttcagtattttcatatggtcaataattgtgcccaatgatcgaaatcagaaccatttgaaattgatgatgccatgctaattcaggttcaaaacttttttgacgaaatgatttagtcatgcttaaatatttttgttgttatcctttttaaactttgtgcacacttcaaaactccattagtaggttattttgccatgcatacatggaaatggtactgagttgatccgttgtattgcacacgggaatttatcccatttctagcatgaatggaattatttgttgttaaactactgcattcagtttagggcatttttagtgtatgcacattaatgataaactaaatgaaattgcggatccttgaactccaagggagttatctaggtttggagactcaataattttgggttgtacccacgaagttctcttgtgcgcttgttgtagattcaaactagggatggttatatatttgatggaggtggtatctacaccattctttccagccaactcatgactataatttgttttccattaacccagtttgtccgcgcacctcacataccctcccccccccaataggtgttcttaggacaattataatttactaagttgaataaggcttccatgttctaaaaatatatatcagcccccttgcaatccctggcctatccagcagtatggtttgcaagatcacgttggtgacaacacatggtcgggcacaactttcagaagacatgcctatagttaaaaatatagtgttcacttataagtgtcattttagcatggtgttttgttatcccctcatatctgggcacggatgagggaagaaaatgcatttctaaatgtcaagtatgttgactaggtgcttcgtccactatagggatggcaagggctaggtcaagcttaggcagagcaagagcataggtccgaccctagacctggcccgataccgtcttgcctgagctatgcctgatagcctcagcgggcatgaaagacacgccaatgctgagtgggcacctgaaactcaatgagtcacaatcgggcatctgctccttcaccgccactagggtggggctagcatcccccatggagtaaggaaacacaacaccacaaccaatggtaaacaaggactggaaattttccctcaattaaactattcattgtcacccacgtgaccgggccaagatgccaagtagaaaatagaggtgtattgcgatatgtgggttctcatcttttgtccatgcatctaattgccacggcacgatgctgatccgcgcctacgttgccgtctgctgagctactagtgagttctcattaggacattgtcctcctaagccatgcctccacaccacacctccccccttctcccggcgtgcagagttattaagtacgacacttttttggtatgttcattgcacattaccgtattcgatccaatgttgcatccagcaaacacacatgtacaacattacacagtttccatggtaaatcgtatttgcacgtaaagaaccagcagtgaagctagctcctgggctggtcgggcgaccaccggctccatcgccgacttttgcactatttttccattagaaacacatgtaaatatttatcgatcaataggaaacactcttcatcacctgagcttgatgacgtcattggctcctccactgcaaagaacatacttggctagatgaagataaaagcaaatagctgcactccagaaaaacatatttgatcctttccttttgtacaaacagaggactcaggaacatatggcaacttggtatatatagcgggtatggtcgatgatggaatcatccttttttttaagtcaaagaaagactttccattgtcaaattggagacatctagcaattctacactccaaaaagtccagaggtttcccaaaggacggtaagatgggcccttccttccccgagtgaacaactcaaacttccctctcccctaagtgatagcagtgctagtttgataacagatcttgtctattagcctgaggagggagtcttatgagtgaagcatgaaacaatatggtaaggttgagtggaccgaccgagatctaaaatactatggttaggaacaacttgacttatctcaacaagtggtttaattagctcttctttcacaaaacacaaatccttttggtatgaggctctatgagcttatcatttgtactcttatccatccattttaactccttttatcgactggagaagcatagcttccttacacgcgcatgacataggatacgtgaaaacagatatttgtactagcgatcagccgatcatcaggagaggaacctctacatcccacgtttcttcaaatgcattctacagtatatttagggaaactatgagtcattgagagagaccacatttgtaccaatcaaatgcacttgtggtgcactaacattccgttttggtctcgtacactccttatgttaaaatgtcacctagacctcctttggccgcatcattcctctcaaccaaaactgtaaatcaagcccactaacccccgtaccatataaaagctatgattttaaccatgaaaaattgatagatccaatagcgttggaggtagtttgatttgatggagtgatgacttatgcagcaagcattgtcgactaggcgaattgtggacgcacctacagagtaggtggctgggcgctgacagagcagatgccctattggcactcattgggtttcaggtgcccactaagcatgggcgtgtgcactgattcatgctcgctgaggctattaggcatagctcgagcaagaaagtatcaggttgtgtctagggtcagacttgtgctcttgctctgcttaagcttgacatgggctttgccatccctatagtggacgaagcacctagtcatgaatcaaaaatgtaaaccaaaactgtaaatcaagcccactgacccccgaaccatgtaaaagctatgattttaaccataaaaaattgatagatcca

SEQ ID NO: 4589 - DNA, 17107 bp, Oryza sativa
cgtgtaccctgtctaggatctatttggcatagccaatagattgaaacaattcaagggatacttttatcccatgccaagttggtatggccttaacccacttatatttccataccaaattgcagagatcaaaacatttaagggatgcttgatggaatggaaatctagaaaaaaaatagaaaaataacatgataaaaataattggacactgaactttttttttcttctaaatttaactttttttgaatttgaaacccattctaaatagcaaatgttcaaatattttaggagtactgatacaatgaaaataactaaaattttaaataacatataatagaaaatagaatttttggcattatgttggaaacaaaatctaacataatttcagttcgaagtatacaactctaaactacaacttgagagcgataaaagtctcattttttaatatattttctgatttagaaaaacttttactgctaaaccatagtttcatactgcaatactatataattacaattaaatcattatttcaacatattcagctcatttaattagatcatgtaatcgtattagccatatttttaatagaaaatatcttcaattgatatatcctaaaattcaaaaaaacatatatagtgcaaaaaaagatgctaaatattaaaaaaataaatgcattatgtacaaatgcattatgtagaagtgatatatagtttcatatatatatttcttataaaaccaaatttgcacagttttaagtaattttagtttagaatttatacgccagcgatgtttactagcattcaaaaaaacaccacacaaattattgaaaaattaaacatgtttacaatagagtaatcataaaaattcctaatcaaatttctaacccagttaaataagatgcccgcgcatatgcgcgggctaccttcctagttatatactaaaagtccattaaactttctacaaacgctcttaagccaccacgtggcactcctacaaacgctcttaagccaccacgtggcactatctaatctcaccgtcgattttcacttaaattagtagactcgttattttacaccattagattagatctattatttaaaaataataacttcctcatatattatataacatagaaacgttaatataacatagaaacgttactgttcagccatagagtttatatacgatacagaacgttacgtacgtattgaaaataaaacaataaaactttcccaatgttacggtatttatttaaaatatgattttctacagtataaagataaaatatatttacttcacaaatataaatatatttagtcaaattaagatctattataaatatccaatcaatgttctttaaaacatcttataaatctatctattatctatcaactatatatatactaaaagtacgttaaacatacgacgaatgcatttacgctgctacgtgtctctctaataaattagagaaatcctagaaatttatttatatactaaaagtgcattaaacatcctgcaaaaactattacgccgtcacgccgtgctataataaattagagaaatcctagaaattcagagaaaaaagaaaggcatatgatcctttaatttttacttaaattggaggacccgttatttaaaatattagtttagatctattaaaaatcccatgctgctaatctctatctggaaaaaaaacataatgtgcgtacgtcgtacgatcgtctccatcctaaaaaaataaaacttaaatacctacaccatatacgataaataaaacagataaagccaaataaataaaagaaaacatgcacacgtacatagaatcggaaagaaatactaatcgtgaaaaatcacactgatgtgttgtcaacatcctttaaactattattttattaaaaataacactacacagatatgcacattaaacttaatctctgatagataaaatgtcaaagcaaccgtctgacaaaacctaacattgtgttttaagtacatctgttttgggttatttaattttggagatcagattctcaaaatatttggatttgttcaaaacttttttattcttatttgatgagtgagaagcacaaataatagatagatgagaaaaattaaattaaattttagacagtggttttgcgataataaaactacagaatttagctttggtttttaagtggatcattttatgtttattttgggtgacattgagattttaagtatctgaaattttttttattgctatttgaggagagagaagcatacatcatagatagatgtaaataaacaaataaacaaataagaattaggcagttattttgctacaatacaatccttaattcatcatgagaattatgattatccatgtatgttttttctttgccaagtagtattggcaaacatgaacaatccagtaaaacacgtataaaactataaattctatatactgagtataattgatggacgaatgttatacacctctgaacccaattttgtcaattctttacctcaaatcaactcaaaacttaaaaataatactgtttttgccacctcttcctttctgtatatatctgtccttcaatgttgggtgtattacttgctatgccatcataaatattgtagagacatgtaaatggttgagttaaggtggtgtcctaaaaggccaccataaccaatgtaactaaaatgacatacttaccaatgcaatcatttgtgagtgtgccaatagtgaattgagtgttaaaattgtactttaagatggtctttaagggcacagttacatcgatgcgaaacccgtgtttcaaggcattatgtaagaaagccttagttggctgctacggtcgacttcatctgttagaaaatcattcatgaatatttttaacggtgttatcgtattatctggtagatatgatatttttagacaatttatacatagatgtgaaaataagttatgcacactgggttatgcagtgtagatgatatttttagcgtataaataatgtatcatttattttagtggtacaaatacagtttcttttattaaaagtgcacctaactttcaaaaacaatgatagtaagtagtggtgacaaaagacgagtttatatatgaccaggacaaagggatttttacttaaatctaataaacattctatcacatttagtaatctataccatctattttacggcaaatatatttgttttttttatttagggtaatctatattcccttacaggatatatgtattaatgtatatactaagatatgatttattttagcattctttttcttgaacaacaaataagatgcccgtgtatatgtgggggtttcttttccgatttatattctgaaaatatcctccattttatattttgtccttacattggttgaaacatagcctatgatacatgcatgcgcgcgcgaatgcgcgggctaccttcctagttagtataataattagtgctaatctaaatggtgcatgtatggagctcatggttagtttctaatgtatggatacatacggtggagcccggatgcctatccgtgctggctgggccttggctccgtcgctggtacagagaatgaggttcaaattagttactactttcgtcccctaaaatatagtaatcagaatatttcctaatacgacaatatatagacaggagatctaccccgattcataatattaagatgtgtcatattctacaaatggagaaaacaactcatgggacatgtatgtgatgacaataaataaactatggccatgtttactttatgtgccaaaatatttttgaagtatatggacacacatttaagtattaaacgtagactaataacaaaataaattacagatttcacctataaactgtaagacaaatttattaagcctaattaatccgtcattatagcaaatgtttactatagtatcacattgtcaaatcatggtgtaattaggctcaaaagattcgtctcacaatttacatgcaaactgcgcaattagtttttttttcatatttaatgctccatacatatgtctaaacatttgatgtgatggaatttttgaaagtcggaaggaaacactgcctatgatgtaggcccccacctagctaggttaagagctgatgtgaaagggatcgatccctaggttaagagctaatgtgaaagggatcggagtgaggttgaacctgccgacatctctgccaatatggtcactctcagtgagagagtttcattctcactaaatagtgtcatgtcaatatttatatgacgtctcttaaaaaaatatttatatgacgtggcaagtaattaataaaaaagagatgaaatgaatttcatctcgatgaaactatttatacaccgttttcaatgtgacttgtttctacatgtgttgcctatgaaacaacaaaaataaaacagtatattgtgttagctatttcaaccatcaattaaatgtcttactacctccgtcccaaaataagtgcagccgtagatatccgtgtccaacgtttgaccgtccgtcttatttgaaaaatttatgaaaaatttaaaaatatttagtcacacataaagtactattcatgttttatcatgtaatagcaacaaaaatactaatcataaaaaaattttaaataagacaaacggtcaaatgttaaacgtgaatagtgcaaaactgcacttattttgggacggatggagtattctttatatgacactcttttttttttactgaactttatatgacactcttagaaacataaaaataaaacgtcccactaggaatgacgttaggccatttttcacatagagttccaagagtgacacgtgcatcaaacaaagaggttcggattaataaataaaacaaacgcttctaacgcatttcgtgatttcatatgctactcataacatttagttgttgaattgtgttgttaaaagagttgataccagtacgatttcatttttaatttcaaggcacgaaatgaaatgattctgttgctgtgggttttattttgtttctaagcattcctaatggataaatgcatatatatgtagtttcatttcttgatttttaggttgagattcctaacagattcaagttgatgaacaaaactaatatatccaatgcacaattttatttcgtggtttgatatgtcgtccatagtattttattattgaattgtatcatgaaactatttggttataatagggttttatttctgttttcaagacacatgagataaaatgaatagggttccattctgtttcgaaggcataggtaagtatgtaaaacaagttttttaaaataaaactcatttcttctcacttgtaaatttcttggcatgtcattagtttagcctatgtgatatcttatttaataacatcgaaactcttgttaaacatgcattggaaatgacctaggtattaaaatttcacctaaatgaaactcattcattttctttatattttttcagtttagccttatcgtttaataagattgaaactcttacgcaacctgtcctgaaactggccttaggttaggtgctaaggagactattagagagagaaagttgagagttcttttaagactatagagaggagagttgacgttgtccttcaataaacatccatgtggacaggagtctgactttctccatagctgtgccaattttatatgttcggtgtacgtgaatatagaagagagggaagcgagagaggacacttgacttcgcccaatgagaaacatcggcatgccgattttgtgacgaggttcggtgttgacgagaataggagggagggagaaaaaagaaacacacatgtagatggatcggactttttatatcttacccttttttaaaaaaatcttattttacaaatatactcttaaaaaaattgttctagaaatgaacatttttctcgatgctagaattattggtctgagattcaatgtctcggtgccaataacattgacatcgatatcctcgcttcttgctaaagctaagtcaccgatacgaaggatcggtgcaaatgacattagtgctaaagatctatttgtaagaaaaaatatttgaattttaaccttttctgaaattcttttataaataaatccttagtgtcagttagtagcagagccaagcctgatcagcatgggctagtggcctagtgcccagtctccgccaaacgaacgcgtgactttccagttagaacattaggcaaaacagtgattacccttgctagattatttggcaaaccagtaaagaatgcatgacagcatgagtgctcgaactagattatctaggcaaactatcgaagcaattaagggcaaagcatcacaattcatgtattaacatatagcccactaattaagtaatacataattattgtccaatcaatctaatctattgatcaaaatggtttttctcttctaaaccacaatttgatagcgttaacttggctttcattaatgatggatagcccatagagttgtatgaatatgtgtgttcattagaattgcccagattttagaaaatatatagatccgccactgctgccagtgttattgtaactaaaaaggattaaaatataaaaaatgcagggtaagtgaagataattaaacaattaactgttagtgtgtagtgttgtttccaaagggcgatttttgttgaaataagacatttatctcaaagttgatacaactatcattagattgcacagccaaagcaaagtttttgggtgaatacacactaataactatcagtttgcatactagattgtgttagattaaataagctggaccaatttaatcctaataaattctatgtgcccataattaatgttaaggaattaatatcacgttgaaaatcaacgtggagggatctcaacttaaatagactgctattggagagcaattgttgagcggttaaggtggtggtggggctgccacacgcatgcgcgcgagccgggccagggcaagggctggctgctctatttcccaaacattatgttttaactaaagatgtaactgatggatgcactcgttactccaacaacgaaacgttatggtttgattgaagacataaccaatggaggtgctcgttactctagcaacagatggggaattcaatcggattgattcgggcgctctcattactccagcaacggacatttcaatctcgacttgattcctcctggaacattactctcttgtacactatataactcccaccttctcgttactccagcaacggaacgttatgttttgattgaagatataaccgacggaggcgcttgttactgcaacaatagacggagaattcaatcagattgattcgagcactcccgttactccaccaacagacagagaattcaatctcgatttgattcctcccggaatattactctctcatgcactacataactcccacctctagaatagacatagtacacacaaatgcccagtacatcttctctctcgaactctgattctcttgttgggaaaatcttgttttctctgttcctacgcttcttgtgtgtctctggttccgatcacctacgcacacaggacaatcaattttttggggagcgcattctagagcgactgctctcatcctcttcctcttcatctactctgcactgctagttcttcttcctatcaaaaggcagcaatggtggaggtggcggcatcgggaccgggcaccggcacatgcgagaacagcaacaccaacgtagacaacaacaccaacaatgcctcatctagtaccggagcattctccaagtaaccatgttaaccatgttattagatgatacttattttgttattgccatgttctgtttagcactatcactagatcattctacacatatgtcatgtcatgttcagtatgatgtttttctgaaaattaaaatatactgactaaatttccaccacatgcgcttgagtgaaacaacctctagctaccttctccgatattgctaacttgccgctgcaaccaaaaacctgtaaacccgatttttttggaggatagcccaaagtatggacccggtagcaaaatattacggctgccactagcaggactagcaggttttcgaattcctccctgacacatgacgaggttgaaccatatgatatggagaacattgcgtgagcagaccggcatagccctatgtatgtacctgatcacgtgacctagaacttgaattaattattctttttcaaccatatattcaacttaatgacacgaaatactattaggccaactatatggaaggtggttgattccaccggacagtgaaattctaccatgacaaactgattacgtttagctttgacggccattaatttttcagcccccaacctgattacagaaataacgattcatctagtgtcagctaaccgacgtgagagacttacgcttagttcacaatcgctatgttttttcaaacaaatttgtcaatactctgaccataaaagttctttataacttaataaattataagtggaaaattgctaatagtacaacagagtcaataatctgaaaagagaaaggtattacgtcgtttgctctgttcaactaaaaccaaatcatactaaggtacgtcgttcggagcgtcacattttcacgtccagttgtctgccaatatcgagcagcaggcacggagcaaattttcgacaagttgaataaaactgcgggtgcaaaacagcggccggccttatgctgaattatttgacgttattgcaacgacagatttttttttaatttagtcattattgccggccggtctaactcaatataggttattttatatattcaagttggtttcattattactgtccctgatgctacaagtgtagaagaaaactgtgcacagtgaaattacactcttagaaccaaagccaagtatcttttattttactttcgataacatagttcctatagattttaacaaagttcatttatattatcgtgtagaatattttctatttcgtattttagttggataccataaaaaaagtggtggagacttgtgccatacatcaattcttttatttatcattttagactgtccataggtggaagatgttataaataaaagaaaagcagtggcgagcagattgcctgaagccttaaaactgagtataagcacattgcgcttcaaacaagagtttacaaaaataaatttcagaagactcgggtacatctaaggtgcaaaagactataggtattttagcatgtgccatataatcccgaggattataatactagtgttttataaaaaccacataatttacgtgtactgtgtgacataacttattggttattttatatatcttagatcataatattgatggttttctgcaatttacttttttttgaaatgattatattgctcctcgcacattcgtaactgctggcttattattgaaaacaaaattattaagctaaaaaaattccatctataaaaatttgaatcagacaaaattgtttgacacaaaattggaaaaccaaatttaaaattgaaattggaggggaaattacacaaatcagtacttctccgcttcttagaatacaaaaagtagtattcttttaataattaacttcaaccaaattgagatgaacataccttttagaatttcatcgaatttgtttaagattcatttcaggatttattaattttttgtttcaaattttggggccaaataattgtacacccttctatttatacccaaaacatgattgtccataatcacgaatccaacaagcattacagaatcctaattacttaggaaatctctcaaactagggaatttctatacaactccaaactccaatattttcaaacatgaactccaattttcatgccgtgacaaattcatcccaaattaaaaaccattatctaaatggaaaaaagaatttattaaaaactaaaaagaaattagaaacaacaaaatacgtacaagaaaattttaaaatttaaatgtagcttgcagtattttcattaaattatccatagtccaatacgtcctcgtgttttacttgaatttttattccaatacgtcctcgtgttttacttgaatttttagagcaccaaaaataattattacacaataaaaacaacgtacagagttttctaagcatagaaactgaaaataaatcatccctcctccttgtgccatgtctagcccagtcttccatcttccctcctttcatgcggcctgcttcggcctccctttctctgggcctcctccacatcatggcccatcccgcctctcgtccccagcccacctgcactgcctccctccctccgcgcctgggccgcctcgcctcccggcccagccgccggtcgtcttcctcctctggccgaccgttcctctctcgctccttccttccttcctcctccattgaagccgccgccaatccgccccttcctgtggccggctctccctccccgacctataaaacggagcctcctccctcccctcgctccattttgccacctcccaaattcctagctgcctccctgtctccaccgcgccacccgagctccggcaacccctgccgccatgctcgttcgccgtcagacgttgtcggttccttccccggcaccgcgacgtcaacctcctcgccggcctctctgcctccctgcccgaagctcgttggatccgcgccctcgccggctcccgtgcctccaaccctctgccaggccattgctcctcgccggagtaccgcccggcctcgccgccactcccgtttgcggttgcatgttcctccttggctgccacctcccgagcccttttgggcgccggaacactgtcgacgccaagttcgtccatccttcaccgtgtcagctgtcctagtagcctaccaaagatccctgatgcgtccataatggactctagcatgatacttggcccaacgggcctaaagatggtgacataacacccggacagattctggatgcccattgtttcgatgattttcattgacttcaaaggggttttaatatgagactagattcattagaaaggcggtctagttagctttccatacttgtacagaacgtcgaaaatagagttcagatgagataagggtgatgattttagtgcgggctgctccagtatttttgagatggacttgaatttgatatgagatagacctccatcttgacttgaacgcccatcttgaccttctccatctcctagtctctagttctctccatagttcctaatcatatttaaatcattatgtaataattagtcctcaaaatcatataaaagaaatacctaggaacgagctcacatgtaatttcaattgttgggcatgagctctagtgattagatcttgcatagcaacttgaggaatattgtgtgtatccaaattgttgatgtctccatcatcatccccctcatgaagtagagtcgtcctcgacccaagcttatcttcttctctcaaatatagctccaaatcgaaaatgttaaatgtgggactaacctcaaactttagaggcaattcaagtttatatgtattatcatttatcttttccgatattctaaaaggcccactggctctagacgccaagtacaggaccgctggttagataactctacattgaaatgtcatttttgggagttaaattgctaatagtgttgaatgatgaatatattaatttgaaagcacgtaaagtttttatgagagcttcggaagttagagaagcatgttgattgaaacaatacaagcaatatgattttacatgccaatttgacctccctttatagtatgtctgattgtggcaacatttatttaactgtaaaattattgtagtgaaccagcgccgctacggctgggaaggaaaccagaggtgcatcgctgtcagcactggcgtcctgtccctgcatcatttgtccgcatcgcgtgcctgcagcctgttagagatagaggtttgttacatagagttgttacgtgagataacaacgcatgagatgataagataggaagagattttgttttctgttttgtaaccaatcttcaccattgtatgcgccactttgggggcttttcccaaacatatattaacacgtacagcggcctctaacgaggttagaacgcttctgccaacttatatggtatcagagccaatcatgcacgcgtgagatcgcatctaccaaaaatggcgagttcctccaattccaccaccaatccactctccggccaagttgtcccagagaagctcacaaggaataatttccttctatggaagacacagatccttcccatcattcgcggtgcccgcatggaggggtacctcaccggcgcgactcgcgctccgtcggcagcgatcgacgtcaaggaaggcgacaaggtcatcaccaagatcaatccagcctatgaggaatgggttgtcgtcgatcaacaggtgcttggatttctccttgcatctgtatcaaaggacatactcacccaagtcgtcaatctggaaacggcggctgcgacatggagagtgatcacaacgatgctctcctcacaatcccgtgcgcgtgctctgaacacgcagcttgcactgttgacgacccgcaagggcgatctcagtgtcacggagtacatcggcaagatgaagacgctagctgacgagatgtcatccgccggcaagcccctcgatgacgaggagatgatgtcgtacatcctcgccggactcgacgacgattatgagcccgtcgtctccactcttgtcggcaaggcggaggctgtaccagtcgccgaaatctacacccagctcctgagttttgagagccgagccaagctgcgacagcaggctaatggttcctccgtcaacagcgcacgacgaggaggcaagggaggcggcggcggcttcagcaacaacgtcaacaccggcaacaccagcacgtttcgcggccgtggcggtggtcgcggcgatcgcggaggccgggggcgaggaaacggtggcggcgcgcgcttctccaacaaaccgcgccccacctgtcagctatgtggcaagattggacatgtggtggcagactgctggtacaggtatgatgaaaatttcattccagattcaaaaacagcagctgcggcttcctatggtgtagatacaaattggtacatggacaccagagccactgaccacatcacaggagaactggacaagctgacaacccatgagaagtacaacggcaaagaacagattcacacggcaagcggtgcaggtatggacattaagcatattggtcattctattattcatacccccatacgcaatattcagttgaaaaatatccttcatgttcctaaagctaaaaagaaccttatctctgctcatcgtttagccgttgataatcatgcctttgttgaagttcatcctcgtttctttgccattaaggatcaggtcacgaagaatcttcttcttagaggaccgtgccgcaatggactgtacccgttgccaacatcttcattcgccacatccaagcaagtccttggagccatcaagcccacaatgtcaaggtggcatagccgtctaggtcatccttctctagctattgttcaaaaagttgttagtaggaataatctcccatgtttaggagatgtcaatgagtcaggagtctgtaatgcctgtcaacaggccaagagtcaccagctaccctatccaaaatcctttagtgtgtcaaataatcctctagaacttgtgttttcagatgtgtggggacctgctcctacttctattgggggcagaaagtactatgtcagttttatagatgatttcagtaaatttacttggatctatttgcttaagagtaaagctgaagtttttcttaagtttcaagaatttcaacaacgagttgagcgccttttcaatcgcaaaatcatctctatgcaaactgactgggggggagagtatgaaaaattgcactctttcttcactaagattggtatctcacatcatgtttcatgtccctatgcacatcaacagaatggttctgcagaacgcaaacatagacacatagtagaggttgggttggctctcctttctcatgcttcaatgcctctgaaattttgggatgaggcgttcctagctgctgcctatctcataaaccgcacacctagtaaggtcattcagtatactactcctttagagcgcctccttgatcaaaagcctaactattctgctcttagaacctttggttgtgcttgttggcccaatctccgtccttacaacaaacacaaacttcagtttcgctccaaacaatgcgcttttcttgggtatagcaacatccacaaaggttttcagtgtcttgatatatcaactggcagagtttacatctctagagatgttgtatttgatgaaaatatttttccctttgaaaggttacatgcaaacgctggagcaaggctgagatccgaaattcttttgcttccttcctccttatatcaaaatattgcaactaatggggttgaacataatgaccgcatgcctaatgtccctgagcaatctaatgtgcctgttgagcatgtgacagatcaggagatacaattcggagaaggttcagaaaatacagcacaaaatgatcacagttctgcagcaaatattgaaggagatgcaccggatctggatgccacagaagatcctgaggacatttttcctggcagcagcgatcccgagggaggatttcagccctcacctgtgcacacgcctgcactgtcttttcccgacgatgaagaaatcggcgaaaccggtggcttgacgtctctgcagcagggggagcagtcgcatgcagccacgtcgtcaagcagccatcatgatggggggagcggcagccctctgaccggcggatcgtctgcacccgacacagccgtggctgagcccgcacggccggtcactcgtcttcagcgaggtataagaaaacagaaggtttataccgatggtactgtaaggtatggcatgctgacaactacaggagaacctcaaaacctagatgaagctttgactgataaaaactggaaagatgctatggatgctgagtttactgctttattagaaaataaaacttggcacctaattccacctagtcatggtaaaaatgttatagactgcaagtgggtctacaaaattaagagaaagtctgatggtagtctggatagatataaagctcgtctagtagccaaggggtttaaacaacgctatggtattgattatgaggacactttcagtcctgtggttaaagcagctactatcagaactgtcttgtctattgctgtttccaggggatggtgccttcgccaactagatgtgcaaaatgcttttctgcatggataccttgaagaagaggtatatatgaggcaacctcctggttatgaaaataagagtaagcccaactacatttgcaagttagacaaagcactttatgggttgaagcaagctcctcgagcttggtattcaaggttaagtactaagttgattagccttggcttccaagcttccaaagctgatacatcattgttcttttataacaaaggaggtgttacaatttttgtacttatctatgttgatgatataattgtggctagttctagacagaaggcagtatctgctttgctggcagatttgagtcaagaatttgcactcaaagatttgggggatctgcattacttccttggaatagaggtcagtacggcaggtgatgatattttactgaaacaagaaaaatatgcctatgatttgttgaaaagagcaagtatgctagattgtaaacctgttagtactcctctgtctgtatcagaaaaactgtcagctcatagtggaactgctctaggagaaacagatgcaactagatatagaagtatagttggagctcttcagtatctgactttgactaggcctgatatttcatttgcagtaaataaggtctgtcagtttttacatagtccaactatagatcattggatggcagtgaagaggattttaagatatgtgaaattctcagttgatcttggtcttaagataagtcgttcatcatccactcttgttagtgctttttcagatgctgattgggcaggatcaattgatgacagaagatcaactggaggttttgctgtgtttctggggtcgaatttggtttcctggagtgcaagaaaacaggctacagtatcaagatcaagtacagaagctgaatacaaagctgttgcaaatgcaacggcagaggtaatgtgggttcaggctctacttaaagagctaggaatagattcacctgaaactgcatgtatgtggtgtgataatctgggagctacttacttggctgttaatcctgtgtttcatgcacgaactaaacatattgagatagactatcattttgtcagagaaagggttgccagaaagcaattagaaatcaagtttatatcttcaggtgatcaagttacagatgggtttactaaacctctcggtgctccacaacttaggaatttcagatacaatcttaacttagataagttatgattgagggggagtgttagagatagaggtttgttacatagagttgttacatgagataacaacgcatgagatgataagataggaagagattttgttttctgttttgtaaccaatcttcaccattgtatgcgccactttgggggcttttcccaaacatatattaacacgtacagcggcctctaacgaggttagaacgcttctgccaacttatacagccatcccagtaagatcccgttaatcatgattcacttggggggaggcaaagcaggaggaagatgatgccaaatttgcattcattttaatagatgttgataatttgtttcacctctctgctggaaaagtttaagaagcattcaatgtttaagaattaattttcttttgaaaagaatcagataattaactacgagcaaagaattcagcaaacttcatgtcttcatcttaacaagccagcccaaagtttttagatttaattgatcaagatttcattctgtttttgtttttaaattcactgaaatatttgtttttggttgtatgcatatatattaggttcagtttagtagaacaatcctatatgcctggagtttcgaactttcgatggcgacatggcgtgtttgcagtcca

SEQ ID NO: 4590 - DNA, 15717 bp, Oryza sativa
cctgcagatgtcaatgttttgtcaaatttctcatgccattgcttaggagcttgtttcagaccatacaaagacttcaacaatttgcacactttgccttcttgaccttcaactacaaacccatcaggttgatccatatagatctcctcatccagctctccattaagaaaagctgtcttaacgtccatttgatgaacgagaagaccatgtgaggctgctagggaaagtagcacacgaattgtggtcaatctagcaacaggtgagtaagtgtcaaagaaatcttcgccttctttctgagtatagcccttagcaacaagccgagccttgtacttttcaatagtaccgtcaggcctaagcttcttcttgaacacccacttgcaccccacaggtttacacccatagggtcgctctgtcacctcccaagtcccgttagcgataatggaatccatttcactacggacagcctccttccagtagtctgcatcaggagatgcatatgcttctgaaattgacttaggagtgtcatccacgaggtacacagtgaagtcatcaccaaaagacttagccgtcctttgtctcttactccttcgaggagcttcactgacatcctcctcagagacaagttcatgtgtatgttcagtttgttctggtggtgtgattgaactgggaattatttcagagggttggttcgaaccactatgtgtatccttcattgggaaaaagctctcaaagaaggtagcatcacgagactccataattgtaccaacatgcatgtccggtacctcggatttaactattaaaaatctataggcaatgctatgatgagcatatcccagaaaaacacagtccacagtcttaggtccaagtttgcgcttcttcgttattggtacattgactttcgccaagcacccccatgtgcgcaaataagaaagtgatggttttctaccaatccatatctcatatggtgttttgtccttatttctgttaggaactctgtttaacacatgatttgaggtcaacaatgcctccccccaccatgccttaggcagtcccgcggtgtccaacatggcattcaccaagtcagtcagtgtgcggttcttcctttcagcaatcccattagactcgggagaatagggaggtgtcctctcatgtatgatgccatgttcctcacagaataagtcaaactcgttcgagaaaaactctccaccacgatcagacctaagcctttttatctttctgtcaagttgattttcaacttctgccttataaattttaaaatagtctagagcctcgtctttcgttttcaacaagtacacatagcaaaatctagtagcatcatcaatcaatgtcatgaaatatcgttttccacccttcgtcaacaccccattcatttcacaaagatctgaatgtaggagttctagtggtgccaagtttctctcctcggcagccttgtgaggcttgcgaggttgcttcgattgcacacaactatggcacttagaacctttgacaatggaaaacttaggaattaaacacatgctggaaagccgagacatcaagccaaaattaatatgacataaacgtgaatgccaaacattagcctcatcatccacaatgccacaaatatggttcacagacttattgcagaaatcagaaagggaaaagcggaacaggcctccgcactcataacctttaccaataaaatatccatgtttagacacgactactttattagactcaaaaaccaacttaaatccgtctctagtcagacgggagccactaacaagattcctgtcgatagaagggacatgctgcacgttcttcagctgcacgatctttcccgaagtaaacttcagatctaccgtgccaacaccatgaacagaagcatgtgacccattccccattaggacggtggaaccccgtgcgacctgataagaagaaaacaatgagatgtcagcacaaacatgtacattggccccagtatcaacccaccaattagtagattgattaactgaaaaaacagtaggtaaattaccatacccgcttccatctccagtgttgccaatggtcacattagcagacttagaagtctgccctgcaggtgccttcatccccttgcgttgtggacacttcctagccagatgaccaacttggccacacacaaagcaagtcctctcatcctgattaggattgttgttgttcttcttctgcttcttgaagttggtggtctgctgagctttgtatttccccttgctcttgttctgggccttgtgcacaacattggcactggactgcccaccatcgcccttagacgcggcatctttttcccgagctttctcctcaacatcaagagacgcaatcaacccctcaacggagtattcctgtctcttgtgtttgagtgcagtaccgaaactcctccaagatggaggtagttttgcaataatgcacccggccacaaatttgtcgggtaagacacacttaaggagttcgagttccttatccatggtttgtatctcatgagcctgttcgactacagaacggttgtcagccattttgtagtcatgaaactgctccatgatatacagatcattgctagcatcagtagcaccgaatttagtattcagtgcatcccacaactccttagcgtcggtcatatgcatatacacctcgaccagacgatcgccaagaacgctaacaatgcatcccacaaagagagtagtggcttcctcgaattgcttctgctgttcagcagtaagaactccttcaggtttgccagtactcacccagaagcatttcatagctgtcagccacagagtgaccctgatctgccatctcttaaaatgcacaccggtgaatttatccggcctcagtgcatcggcaaaaccagccatagtaaaatcacagtgcctataataaggtttttggattgttgagattatgggcatataatgatttaatttattccataaataaatcatgacattacagatgaaaactagcatgaacgcatcattagatctacacatgtaaactacgcagaataacatgaacatatcaaatatgcgcaacatattgaacacgtaccgaggtgatgaaaagaccggctgcttggtcgaaacttttcgcaggtgtctacgaaggcacgaaacacgcgagcgaagaggaaggcgagccgtcgcgaacgaacagggagcagtcgcgcgaagcgcttcccaaaaaccttattgccgccttctcccggtgcaggacgtcaaaggcagaggttccggagacctgctctcccgatcgctggtgcacgccggcgagcgggatggagtagtctacgagcgacggcgcagtacagagtaggaggcaaaccctagattgattttcgcatatattgcgtgaagacggcgggtcggtttatatagagaagggtcgcttgatcagggcgcccgcacgatctctactgcgcgtaaccgaaccggataagtcgcgcgtaacttatccggactccacgccgtttgcacgtaccggatttttcggaacgtttccaaaacaaaaacgaatccgaatttgcagcaaaacaaaactgcaaaaggaggctgcatctgcgcaagggtgctgcatctgcgcaagggtgaggagccaatttttcggaccattcgacgcgtacgtcgtgcacgcgcgccgcctgccctgccctgccaggccaggcgagcgagcgcgcgcgtgtgtttcccctcttctctccaccacacatgcttcaagtggctaggagagcatcctcccttttaaggaggtccccctctcctagaataagcaaggtggtactaaactccacatgcatgccatctcatgaggtgggcttttgtgattttccaaagaattaatcttcgagtgggctaaggcccattcattaattccaacacacttcccagagtctttccaccgtgcatcttcggagacgtcctagcgacagctgcaaaaacaaaggtttgatcctcttttccctcaacggttcaaacgaaataacaactcccagtgggcatagtcgacggtgaacatggaagatagacgcgatatcaatgcattccgagtgatgagaaggaactaaaggtaccctttctaaaccaacacctttgatgttccacatatccaaaaagtcgagaagccccccatcacccttgagatcggtcaacaacaaaaaacacagaatcaacattcaagaacaaaatcaacatccacatatcaaaaataaaatccaagaacacagaggggaggacaccgaaggagagaaggccactgccactactgctcattgtgggtgaagtccactcttgagcgccgcatgatgggagggcagcaccattcgttgagggagtcgccgtgccagggacaattgagggagccgctgccggcatcaagtggtccgtccctgagctcacagcgatggatccaaccgcccccgtgctcgtggcggcagatttggccacccccttgctcacaacaacaaacccagcggagaggaggagggacggcgtttgtggcagagatgaggggcggtggtggcaacgtagataggagtggtggcagtaaccaagagagagacggagaggctcagagagagtggcgagagagagagagagagggagagagaggctggactctagagacagagtcatccatatataaaaatccaggtcggctcgattgtcggcttgactacctgaggagtgttggttttctaaaagattacccggttgaagcattagcttgctttagatggtatacgggcggcaatggaatgggttcacatgcccattatagcggataccagattaccggtaatataatccagatgtggcagttagccttgtgaaggactgctccggccagatatattcacaggcaacggtgattactgaagtaattaataagcacaatgcagtgttaaattttactaaataaagagcgaaccaaatagagttggcggatccagcatgggggcggcggggtctcgagccctccattactggcgtgaagactatgagagaccccacaaagaccccactaaaattttttaccatgggagggggactgtaactctatctagtttgcttagaccccactactatttatttctagatccgccactcttcatatttttgctcagcaatgtgcacggcaacatatatggaatggcgtttctgtgctcccgaaggaaccccattctcttccaaactgttcagattcttacccagaagataaattttgctacggaacacctcaaattttagataatttgctgatagatatggtaaaaacgtgttatggctgaaagacaccataaaaaactgataatttgctagagaatactttcgattcaattgaagagagaattcttttcaaagacgagaatgcccctagggccaaaagcttctgagttgaggctggagtgaaaatggaatatgatgtacgcttgcgatgtacttaaggtgatcacaaatttaaagttgcataatttctaaactttcactctaacatcatgtgttaaagcatgtggtcctaagggtattcttgtttttcttaagaatttatctccagcaaagtgttctacaagaatttatgtgcagcaaattgttctccaacaaattactattttttgggtttttttttcagctatcacatatttttgtgatgtctacaagcatattatagaaatttcgggcatcatgtaacaaaatttgcctacccaaaatataagaaaaggaaatatcctggggaaatgagctatgtgttgaaaactcatgaaaaccatactttaatattttgtaaattcatgaaaaaatattagagataggtgtaaataagaaataaattctcactaaatgttaagtccaaactcaacttcatttgagagaaagaaatgacaaacttcatatgaatataactcacaaaataaattagaagctagaaattaagaaacctaacttccccaaactttatatgagtagaactcacaaaataaactagaagctagaaattaagaaacctaacttccccagatttttatgagctgtttatcataatcgcaacttctcaaacaagatcttaagctcaactaagatagattttttaagagtgaattcagaaaactattgatacatcgaccaaactatatatcatgaaactatagttttaagaggtatatcacaaaactatagatttaataatcaatttgttacaaatttacaatttattttaaggtgatgttctaaggtagatttatgtgctataatatcggtgcagaaaaactgaaaacgaggagagagcgagagaagagctgggggcagctataaaaaaaatgtatatttaacttgtactcatatataactattcaaaaaaatgtgcacgacatagttggctagcgccacgagcgagactgcaatcaataggttgcgaggctgattctttctttagctagtgcatgtgttagacaatttcttttaccaaccccggacgaatgtcaatgcaatccgactgttagaagggaaattcactgtttaatttctagcgattccagaagagtttggtgctgcaaaattcgcagcttttctgatcttctttctcctttatttattgatctcctcaagtgggagtttgttacatactacaaacttttcttctttttcttttttgtttcatattacacacaaacatgaccgattaaaacgcacgatgcaacaaacgcgctatcccacgtcgtggcacatccgacttcggtcagaaaacgagctgaagaaacgcttaattcttggcttcactgaatataattccggtaaccccggattatatccaattaaccactacatgaaacaaaattaattaacttaattcacatgagaggtggcgtgcaacagcatcgcatcaacggtcatccccgggccgaacgccatcatcactcccaactccggccattcacccgccgccgccgcctccttgcgctgccggcgcagctcgtccagcgcgaagatcaccgtagcgccagacatgttcccgtagtcgctgagcacacggcggctcgccgccagcttgccgggctcgaggccgagcgccgcgtcgacctggtccatgatcgtcgacgagcccgggtgcaccgcccagaacaggtcgttccacccgccgccgccgtcgccgccgagaagtgggccgaacatgtccaggaggcaccgctcgacgttgtccccgatgagccccgggacctgccgcccgaggacgccgtccaagcggcgctccgtgaaccgcatgttcagggcgtggtccgactccgggatgatcgtctgcgccgccgacactatctcgaacagcgggcgctcgacgtcgtcggcgtcggcgccgacaatgacggcggccgcgccgtcgccgaacaggccctggacgaggagcgtcctgaagcagccctcgtcgggcccggtgaagtacatgagggtgagctcggcggcgacgacgaggacgcgcgcgccgcggctgttctcggcgaggtccttggcgaggcggagcgcggcgcagccggcgaagcagccgttgaggtggagcatggtgcggcgcacggaggggcggaggccgaggagcgggacgaggcggaagtcgacacccgggacgtgggcgccggagttggtggtgacgacgaggtgggtgatgtcggcggccgggcggccccactcggcgatcgccttcttggcggcctccgccgccagctccggcacggcgtccgcggcgatgtccagccgcgcgtcgagcgacggcgcgtcgcggtccacgaactccgggtgtgcggacagcatctcctccgtgtggtgcaggtaccgcctctgcacgcccatttcctgacctgcgaccgaccatggacagcatgctctcgcattgtcactactcactaaacttgcaaaaacatatactacatccgccctaatactttgaattttaatttgtagatttttttttataatttgtagtttgtaagagttctaatttgtatatattttttataatttgtaatttgtaaaagttgaattttaacatgtatatttatcgactgatacatcacatgctaatacatctttttttttgcaaatttattttgtaaccatttgggtgatatatgtaaacaacgagtggacgtgtgaacgttttctcgagggtttaaaatccattctcggtggaggttgtatatgcaaaattaatatatcgactgagaagagttggatagtagaaggagagaggctgtcgtgtgtttacacgtacagatacgcttgaacttgtccttgagggcagtgaggtggtcgctgttggtgacgcggaagtagaagtcggggaactcctcctgggtaacgcagttgggagggttggcggtgccgatggcgagcacggcggcgagcccgtcggcgcgctgcgaccgccgcatttcgccgagcgggtataaggcgcttcccatggtcgtcgtcggtgccatgcaaacaattaaatcactgcaactaattcttcgatctcgatcgatctccgcccgccttgcttggcacgtctcgcacttttgttttgcagaccacctcacacacttatggtgtttatatagcagtgcgctggatatatgacccactgcttgtttgtcagttgccagatttttcaaaacatctacgtgtgctgttttgtgtatctatctattatctatatatctatctatctataagatatatcttaaggctgcgttcggcagctgccgattaagagaagacttatctcttcactttccgagtaattaaacggtgtgtttaattttcttcaaaaattttcaataagagttgctttaacaaatcatatcaatctatttttaaattttaaaatagttaatactcaattgatcatatgttaatggctcacctcattttgtatatctcaatcttctcttttcatctcctttcaaacacattaaagtccattaaacatcctataaacgctccacgtgacacttctacaaacgctttcagaccatcatgtgacgctctaataaattagagaaaatcatatatattctgagaaaaaaatctatccatttagttccactcaaattagtggatccgttattttgaaccactagattacgtctattaaaaattaattccgtcctaattgatttcccgtgtaagtaagagataaaatacctacgcatagcttcacatgaaaataaacctaaaacacattaccccttgaacttcttagtattaaaaatcaaccaaatctaaatagatagccacatataatgtcaaattacccgtagcaaagcatgtgcattcaactagtttacatttacatttatatgctcctaattgtcttataattaagtgccttatatatgtcgccttccactttggcgtgcagtgtaaagtttagttctgacttgattaattaggcaatttcaatattaccaatcaataattgtatgttatacttgcattggtttaaaaccgcataaattttagtgaaattcaaagttcatcttggagtcctcgtttagtttttttatttaataactcaaattcaaaattaacgattctagctagatgtacactagatgtagattgaattgttatgattcgattagggcacattatttttctagttacgttgtttaaattatcaaatgtttctcttttagaacattagtatcaaataactacgacatgttctttcttagcagataatggataatccggctttgacttaagaacaagctacccccacttcctatgaagttttcaactgaatcaacagtaaatatgcatactaatgaaaaagatgacaagaaggagaaacattattaggaggcttcctattggtgaatcttcatccaatgttagtgaagatttgcatgaccattttctccaaactctggcgtacaatacatatatgagttccttgtttttatcacacttttatagttgggcccaaaactgcagccaataaatataaaagtacttgcatataagatttaaaagtagctctgtcaaacaccatatcactcatggtaaaccaaagaacctaacataaaatatatggatctactaaaataagctttatggttcttacgtcaacggcactaagctaactcccccaaaatgtgaaacattatttggtggattcaagccaaaataaatacggaccaatctccaaagaaatttagcaaagtgacaatcaaagaatatatgttggacagtttcaatatgcatacaaaagcaacatttttttagtactagcccaatttagtcttgctaaattatccctgtttaagatatcccctttaattaagcaaatatcacataaatatttttattttaagaggaatcccattttgttcttctcaatatatataaccattgttgattgcagctaagtacataggatggatagagaacataccattttgatgaagattccatcaaaatatatctttatcctcatttagattaatatcccaaatcattggttcattgatgtacttggctagtgcaacgaggcctgatatctcatttgctgtaagtaagctgagccggtttgtctcaaattcgggagatgatcattggcaggctctggaaagagtaatgcgctatttaaagggcactatgagctatggaattcactataccgggtactcaaaaatactggaagggtatagtgactcaaactggatatctgatgctgatgagataaaggccacaagtggatatatgttcacacttggaggtggcgctgtttgctagaaatcttgcaagcagaccatcttaacgaggtcaacaatggaagtagaacttacaacactagatactacgacaattcaggccgagtagcttcgtaaactcctgatggatttgccggtggttgaaaaaccagtgccagctatcctaatgaactgtgataatcaaacaatagttattaaagtgaacagtttaaatgacaacatgaagtcatctaggcatatcaaaagaagactgaaatctgtcagaaagcagaaaaactccggagtgatagcattggactatgtccaaacggctaaaaatctggcagatcagtttaccaaggggctaccatgtaatgtgatagacagtgcattgagggaaatgggcttgatacccacctaaggtcacacaatagtggaaacctgtccattgtgatcggaaatcccgtgaatttggatggcgaaacaaactattgtgtggctgagagaagagacccttaaaaatggctcattttcatgatgtacttctcttctattctgcatggtaggatggcttatgccttaatgtggtccaagtggcttttctaagcagagatgttgacctgcagaacatctcaaaaggaacacacctatatgagttcgactgctagccacagtctatgagatttgggcgatctctagatactcatgaaagggccttgagtttgacttatatgctccaaaaagaggggatgcaaacggcaacccagtaccaatcaagggtttgagtgaaacctgatcacacaagactaacaattcaaggcatagtccattgtttagttgtggtctgatgtagctcattttctaggtggaagttcaacttaacagtctctaccaaaacattggtatatcaaacaggttcaactttgagaacatttcttatgagccatgaaatttggtggggattattagaataaatgggctaggccctaattttctattaaatctcaaggccccataataaatgttaaggataataataccaccctgagaattaaaagaggagtatctcaacttaaatagggagttattggaggctcgctgttgaccggttgaggtggggattagaaagccacacgcgcacgcgcgcgcgccgagccaagccgagccagccggggcgaggctgtgggcgaggcgtggcgtggcatgcgttgcgtctctctctctctcctttttgcaacggaccggaatccaatcccgcgagattgcctctgtaatggatagttgattcaatgcgattgattgcatcgttactgcggcaacgggcggattcctctcctgcgctattaggaaatagagcaccccgatcagatctcaaggcttagtttccaaacgctggttcttcctcctcgcgcctgtgctgcttctgtttttcccggttctgatcgcttgcgcacacgagagatcgggacgaggagggcctctaaaaccacacattcgcctaagatctgcaccgggtaggcgggtgatcaggtttgcacgactgctcttcttctgttcgtcgtctgttcatctgcatcaccatgtctggagttgtcgcacctagagatggcacacctggagcgggagccggagctggcgccccgatcgacaataccaacggaggcagttctgccacataatccagcggagggactttcacagggtataactctctaccgctatttctgtttttgttacttctgttagtcgcaatgctattgcgttctctacatgatgatgatgcttattctatcttaagcacgctcctggttatgtttaattttatcactagatcacctcacattgttcatgccatgattattgtcttaatattttggattaaaatatgccgatatatgactatatttccaacagttacatgattacatccttacaaaatataagaatttacatgttattaagcagatattaaggttttaaaaacactttaacactccttatatggatggttaggggtgggaaaatggtaaagatatatatatatatatatatataggtcatggttaatgggaccctttactctaaacaatgccacatgcaatcagttatattttaatatgttttaaatgctataagtgcttacctttagcatcaagcatgtggtttccccgccgtcgtgcagctaaagatatatacacatgcatgacgccatcgtgcgtgaaatttcttggtacagactcgcggtggcggatttatgaatttttttttagcctgcacaaacctaatgatagaaaataaattaacaagcaaatacaaatacatatagcattttatcatgaatagaagtaaattggctatcatcatttatatactaaaagtccattaaacttcctacaaacgctctcaagccgccacatggcctcctacaaacactcctatgtcgccacgtggcattttataatctcaccgtcgattttcttttaaattggtggacccgttaattttaagcgttagatctcccttagagaaaaatcatccccactatttttgagaaaaattaccgtatttgctttaactaatagatagaaaaaaaaagagaataccataataggacaagaggccagtgaggatcgggcagggtacatacgttctttttttttctttttctggtggcatacgttctattttttttcctggtggcatacatacgttactacgttagtatttttttcgcctttttttttggcaaacaatactttttttgctttacacattcggcaaacagtactattactacgatacgatacgtacatgtacgggagtttaggggggaagtgttaatagatataaaatcacatgttaccaatttaagggaaaatcgatggtttgattttttttctcataatttttaatatttattttaatttagagatatgacatgtagtgacctacaagcatttatacgagcgccacgtgccggtttaaaagcgttcgtgggaagttcaatggacttatatatactaaaagacaattaaacttcatatagacgctcatataaacgctcatacatcgtcacgtgacattctataatcacaccgtcaattttcttttaaattggtggacccgttaattttaaccattagatctccatctcaaagaaaataaatctggtatccccactactaacaccttacatacatgaggtaaaaaaaagctgtacatactctttccaccctccgaatctcccctcctctcctattttctagctaacttatcctattttataattaacactcaatatatcaaaaaaataattcagacatctaaataatcataaccctcaagttacaattttattctcattttttgttaattgttgtgttatttataattaaatataaaattcaaaatccatattgatcatattttgttatctaaatattagatcatgcaaccattctaactacaaatgtctaggcctaatggtacacctataaacgcttctaagtcatttgccacatgacactattaaattaaaaaaaatctataagtgtgacaaatgaaaacaaaacatctaaccatcagtttacacttgaatcaatggatgcactatcttatatggttagatctatctttaaaaggaaatcccaaaactccgtcccaaccgtttgtcccgttcctctctccctaccattcattatctgttatttttatctccatagcaactaaatcgaaaattatctttacgagaaaaaaaacacacccacaaatggactccgtctaacaagtctagcgagcttttcctttgccatgtgcttctcttctctttctccttaagctagcacttatagaaacaacctaattagaatttaaaataatcgtaaatttttaaatcttatattcaatttatgacatttttaaactattgtaagtttcaattaaatcaataatttaatacattgtggacccatctattcaccttgaaacctccaataaataaaataaaataccaaaatttctaattaaaaattaaaatatcccaccttatgtttttaatagcagtcaacccattatttataccatgctaaatagctaatggccttcttccaactccttctgttttagattacaagtcattttaaattttgtctatgtcaaattacttgaattagtttataaaaacatagtaacattttcaacacaaaacaattatattataaaaaacatattcaattttgaattcaataaaaataatttggtgttgtaaatattgatatatttttcgtcaacaatggaagtagttaatttctcttaacattcaaataggggctatttacagatacttagatgcgcttttatgaataaatgatcttttttagagataaatagacgttcctaagatcatcatcacatctaaattatacatattatatctgatgtcactaatagattagagtaaaagcttttaattatatcttttttcttgtcataacgtgtaccctgtctaggatctatttgtcatagacaatagattgaaaacaatcaagggatacttttatcccatgccaagttgtatggccttaacccacttatatttccataccaaattgcagagatcaaaacatttaagggatgcttgatggaatggaaatctagaaaaaaaatagaaaaataacatgataaaaataattgaacactgaactttttttttcttctaaatttaactttttttgaatttgaaacccattctaaatagcaatgttcaaatattttaggagtactgatacaatgaaaataactaaaattttaaataacatataatagaaaatagaatttttggcattatgttggaaacaaaatctaacataatttcagttcgaagtatacaactctaaactacaacttgagagcgataaaagtctcattttttaatatattttctgatttagaaaaacttttactgctaaacc

SEQ ID NO: 4591 - DNA, 14189 bp, Oryza sativa
  unsure (1)..(14189): unsure at all n locations
ttttggaagcgctcgcgcgactgctcctgttcgttcgcgacggctcgccttcctcttcgctcgcgtgtttcgtgccttcgtaaacacctgcgaaaagtttcgaccaagcagccggtcttttcgtcacctcggtacgtgttcaatatgttgcgcatatttgatatgttcatgttattctgcgtagtttacatgtgtagatctaatgatgcgttcatgctagttttcatctgtaatgtcatgatttatttatagaataaattaaatcattatatgcccataatctcaacaaagtgattgatgaagctacattctactagcttttcggagttcggaccaatgttttcttctcactgcctgcaagattattgcctttctaattgtgccggcaggatgtctggtggagcaaggaaaaatatataaggagaaagagcccttctagttttcagttcatttctaaataactaaccaaactttatttcgggattggtgggatgggagtatggagttggctccccttttggccgccatgaagagcattagggctatcgcctattgggaatttggaattaacatattcttatgagttactttctccgtttcacaatatatgtcattctagcattttccacattcatgttgacgtcaatgaatctagatagatatatatatgtctagattcattagcatcaatatgaatgtgggaaatgatataatgacttacattgtgaaactgttggtactaacaaattagtctacagctataagagcaagtacaatagtatagccaactactagctccaattcatctatagccaatctaatagctcattcatacaatagttacatactacactattaatacctggtcccacctgtcattcacacactgtgtcttggagtccgtgctacagctggctacaaatctgtagcccgctgcccttctctctcctcgtttatcttcttaaaatatatttacaactggcttatagcctgctattgacctgctgtaaggcagcacacatcattcatgtcttatttggttaatccctcccacaaatggattgagggagatttggagggaattgatttcatatctattatgatgtgtaattattccccttcaattccccccatcttcttcaattccctacaaaacgaatatgtaaatgagatatgtgcttaccgatgtgtaagtggggtccgaaattaccggaattttggaaatcgcaatccctgccacaagagcatcagcttgtgacgtacacggctcagtcacgtacgtggaccgtgctcaaagcgctagctggccaagcacaaacacagctacgtcggttggcaggtatgccatccatacgaggaagcggttaactacgacttgatctactcctttcatctaattcaagacgcgcacacatttttaaaattttactcctaaatatttgaccaataatattttatcaccttatatatgtgggtttgccctcattatctgtgttagttaatttgcaaagttagaaagatggacaaactggtaagatatatatatatatatatatatatatatatatatatatatatatatatatatatatatatatatatatatatcaaccagggttaggctgtttgactgcttgcctaacccagtttggtgcataatatgtagacatttctcgcgcaattacaagactaaatctaatagtttaacgtccgacatatatataaatataataatgttcaatgtcacaacccatcttgatttctcagcaactaagtccgtgtggatctcatgttcaaccaaaaatgatagcacctatatggcatgtaattaaagccagtgctttgcacaactcacatttacgtccttcgcctgatacccatatataatgtcctcatcaagttccacctgttccatatagaaataaactatagtaaccaagaaattaattgtgcatctcctaattataacctacaagagaacataaattattccagagagaaaagaaaggtaattctatatgtaccaaattcatgttctgtataacaagaaagatcagtgtagataaagcaagtggtatatgcccactttccactagcaactagctagtttttatcatactatcatggatgaataacaaaatttcaagggctgatcaggttattattaataagaaaggtaggtgtaatggaggtgacaaaatgtatgatgccctcagagaaagaatgatatattgtgatggttgatttacctcagttggcttcttggattttttccctatatttgatctcaaatcagaacctagaactttgggtttctttgctatccgttcatccgaaagatcatcttcattcatctcacctgccatcaatttagatccttttttttcttagcgaaggtcacattggaaaatggaaatcacatgctattaaccttttatctgataaaagaaaggaaaaattagaaccatgccattataattttgcaaaatttgagatatgccatcctgaccctactgatgacatatctcaaactttgcaaaattataatggcatggttccaaatcacctaaaaaaaatccaacatctgtaacgtattagctggccaatgcatattaaaattcccttcacatcatcacacggtacgctgaaaattatgttcaaattaaatcaatactagcggaagtcacattaccataatcaccaccagggaggccttcaaagtcttccatatcttccatgtcatccatatagtctccttcaacatactcttccacctcttcctgtattgacaattgaattcacgatacatggattagttcacgaaatgtgagatgagcatgtctgcgccaattaacgatcgatgcttacttcttcatcttcctcaggatctacatcacctttttccatgtcaagaactttgaagggataactatagatcatgccgtcatcgccgcaaagacgttccttcaattccctccgcaaagacgttccttcaattccctttggatagcctgcatgccaacaggtatatcagaaataataaggcaaactatgaaacacatgaataacatcagaaataaaaaccttttatatttgagcggcatgttcagctttcgccattctcctgagatctcgctgagtctgcttccggggcattgtcatcagcttctctctgacagggcgagataggaagatgattataattttcataaaataagagaagtcaacaaaagaaagtccacaaaaagaatatacatcaacaacacaaatcagattataatgaaactgctgtactatatatgtaataccatcgaagttgaaagttgcggtctactgctacccatattatttctccattagtattaaaagaagttcctataacgatatgacaccacatagaagtgtacataaataattactattttctctttcaacaacgatatggtgtaatatgatcaaaacaatataagcagaaaactcataatgaaaacactatggaaaataaactgaagagctagcctacctcactttcagtcgaagcttcctcattcttatccgatactgagtcatttttgtcaggcgctgcttaatcttgtgcacaagtaacttgggccaaaattcctacacaatgaaggaaagagtgaaagacaagctatgagactaagtaaagttgacatccagatggggaatgacaaaatatgtacgctcgaagtgcatacaagatgcctgttgatgacttcaattgctttctcataattccttggtagtttgaccctctcccataatttatttggatgatgagctctttcagctgttttcatgtataggtagaaaatacctgcaaggccagaaaaaaaaaaggataaatacaaaatacaaacagaataatgtaacaaaaaagatcagatgataggcataatttctatatgggaaagaattgggagcatatatcacaagtatgcatgattcaattgaagattagactgcaatatatctgcatccttggacagttagacgaagagcaattttacggtccttgagaaggtaccataaagtcctattttttctattattaaattggtacctcattgtacctaggtactatgaggtaccaaaatttacactaaaattttggtatctcatgatacctcctcaaggacagtagaattgctcttggactaaaggattctgaaagcctataagcaattcactcatggaaagaaaaaaaaacactttctgcagtactatggagtatattcactttaaaattaactaaatgaatggacttttaggcaaaaaaaacattaactaattaataagcttccatgctggctagaccaaactaaaaaaaaacagtcatttgttgtgtttaactttgaggttttatatatccaatctactcacaaatcaaaatatcatcgatcttataagggaattaataacaattatcagtcacaattaaatgatttccttcaaatcaaaagcaacgcatctcctaattgcaactgcgaatgtcagtcaacaagggggagataatcccttatatgccactgaaaattggtctgatcccttatataccactgaaaattggctcttcccttatatgccattggtccaaatttgcgcactctctcatgccactacggtcagttgatcgtgtgttgaccgttaacttttaagtaaaaaagacatatttgccctctctgagttattaggcatgccctatactcagaagggtaaatacgtcttttttccttgagaattaacggtcaacacacggtcaactgacgggagtggcatgagagggtgtgcaaatttggatcaatggcatataaggaaagagccaattttcaatggcatataagggatcagactaattttcagtagcatataagggattctctctgtatatattcaccgtcatggtcgcggatggtggcgtagcggctgttggcaagagggcaggagctccggttgcatattccggtggcgttgtacgggttccggcagaatatccccgtcgtgatcctgccgcaaaaccaaaaccatttatcgtcagaaatcaaagaacaccaccacagcgaacgaaagaaagaagatgattgctgctctgctcgcatatatacttggccatgaagctgcagtggttgtgccggatgcagtgccatatcacgtcgtcgctcatccttggatgccttcctctttgcctgctaggtgcggttgcgggtgatcacctcaccggcggtggaagccggcctcagcaggaggacgccggcgccgctgctcgcgcgtggggtggaggagatgggcgtacgcaggcggcggaagaagatcgatcgactagggtaaaaataaaacctggtgttggccttaggcccagcacaaagcccaccgcggccccaactagatgaactctaggcccatatcaatactgcttgctccttatgcatttcactcagccctgacccagttttgaacccttgaactgtggaaggaataagttcactttgggtccctctatttgtcgcccagtccgattttcgtccattgaccgcaaaaccgggtacgacccgtccctcaacttacgaaaaccgggcaaacgaggtctctcggcggttttgaaggcggttagcttcatcgtgctctgctcgaattcctgcagactgctgccagtatattatttgcccttgcatgcccaatgggggtaagagagaagaattgaaaatttggataagttttcttggaaatcaaattgggcaaaagagaaagattttaaggaaatctgaagtcaaaaattgacatttgaatccattttagggatttaatggatgtttttggggcagggatttgatcatttcggtgaatgtgaatattcatatttttggagaattccaaataccacctaccttctctctttaatagatgatgttgttgatgttgttgacttttgaaataacgtttgactattcgtcttatgaaaaaactagtgtaaatatactaaaatataaatcatactcaaagtttctttctggtaaaatatgtcaacaaaattaaatattatctaaaaaatgtcaacaaataaatgatatttatatacaattttttaatatgacgaatggtcaaaagatcatgtaaaaaaccaatattgttatctattaaaaaaacggagtgcgtaattttgaatccaccataagcagactatccaagcaatccaaacatgacttattagaagatacacaaatgtagtaaaatcacatgagaaagacaacagttctgatccaattccatcccagcaatgtatatttaattgcagagattattaatagatacacaacttatctatacatcctatatagttggaaccaaacactaaacatacattaagccactagaaaataatatcctttgaatccttatagcgctttcatcataaccatcatccatatatcatattcatttacaacctacttagtgtaattattatcataaagcttaacattaatgagccacatcaacttagaaaaataatgcccattacatttctctcacgcttgattataaccatacatgcgtcatgtataactgaaattctacctaaattgcctaaactgtgggccatccttttaacattatttctaaattgttttatttgagctttcttgtaattaattctgagatacccacagcagcgcgtggggtatccactagttaaaaggatggcccttcccgctacccattgcttgatattggcataacttatggagctgaagcagtaggaattggtagaaaaggtcctagaaaacgcatgagaaggagaacatgcgtgatgaactccccaccggtgctgagatgctcatagtggaaagcacccccgcaacgcggtgcaacatagtaaagcatctctagccaaatctcagatatgagtttccatcgttcagcttcattgccgatgctgaaaagctcggcggccacttggcatgcctgtggcatgcaacactggatagttaagagcttccgcaatactttgccagaggtccaaatctttcagttcttcatttgccatcgaggctccttgttcctgttcattggcttcaaaaaacttcttgacagcttccttctcacttgttttagcctgttgatcctgttggcgataaattttttccccaatttcaccaagagctctgtcatgtacaagctgggagttgactgtaagcatcacgccacacttgaagacaaggtacatgatatagtttgatagctctcggctcaccttcttcttcttgtttacttcggtggtgctatcctcggagtagtagcatatatctgtcgcaatgtgccagatgagcacagccgtggggaaatcgacatctctgccaatgctatcctgcaacttcgtcatacttgtctgttccaaatcttctgatttgcatctgtcgatccgcttctgaagtgttagctgaccacgggaactggcgaagttccagtcctctttaacttttccgaattctaacaatttatcgagcaccagctccttcaagtcttcagtaatggatatgtgtgttaaagtcgaatcaagcaactcaacaccacaagtattggaacactcactgatccatttctgcacggatgacaacaaacctacggtaccttgcatggtgtacttcgtgatcatgttgtactgtgctacctcttgggaccattgtttcctgcctcgtagtggccgaatggaattgactgcccacaagattatgcttgtagttctttcagaaggaagtttggagatcaagtagggacaaacatacatggtggcagcgaagacatctagaactattgcacctacaagtaatatgtaggagatgatgatatcggctctattatgtagttggccgcccttttcgatcggcgcacatgaagagcactagggctatgggggtgaacatacactggacaatgaccagcaaggtaataaggagggaacgaaatgatatgtggcagggcacaatagtcaagtagaaggctcgacgtaggatattttttttgtgtacccacgatttcatatgccctgcggcggtttggattgtcataaaactctttgagcatggatggtatatcctttgctgctaaaatgcacttcacatcatcgcgtggagtgtccactgaaataacttcactttcagtatatccgatgttttctgcttcggtatgtataatttttgagcttgacttcccatccaatgttgactcaaatctttctttgacatattttttggcttcttcttctactctgcctttctcaacttcctgtagcacaaatttcaaatagtgcagggatgcagccctgagactccttggtctggcaaggataaggcagaaggtacgcccagtgtaccttaaacacccacagaggaacataagcaccacagcagcctgcagccggcggtctgtccaagatgatgtggagatgacgtagccagccacaactacttggatgaccaagttgagtaggtgccgcttccacaagtcattgtcctccttggagaaggtagtgaggttttcctgcccaccaagatggacgagcagaaatggcgcccagaagagtatgagttggtgctgcggtccgttcacatgaaccgcgaggtggccaagtacgaaaacagcaatggagtgtcacgcccagaaattcacgaaccagaatttctaagctgaatgtgcattaaacccctgtccaggaccagccagggtacacaaacgacaattgttgacatacagatccacgtcttacaaaaatataaaagattacaaatgcagcggaaaagataaaagcgagctaagcctgaagacttgactcctgcagcgagcgattccattccacaggcaatccttgacagcagcgacgaaaccaacctcttcgagacatctccagctgagaagaacttcaactctggtgagggggaaaagagagcaagactgagtactacccactgtactcagcaagtcataccggaagaggaggtatgatgcaagatatatccaagggaggctaaaggttcttttgcataaagccggcatttcaaagcagtagttgaaagcagtaaaacaattgtagtaattaatcaatattaaccaatcactgctcaacgctacaccacgttgagaccggcccaaaccaccacctgaactaaccagttccaaaagctaactaggggtgaaactaatcacggtgaatctggtcgaccgcccataaccgcgggcacggctattcgaatagctttactctgatcagaggtgtacaactgtacccacaagacacagccccacgacacgttcccgtgcgccgacatgccaccacgacataccagaaagaggccgtgacaggacccttcacataaccccctctaaccgatcgcaccacaccttagggttcgcccccgtccccagcaggcaacgggcagcctccctttcgtgccgcggtgaatccggaagccgatcaaccggacaccccggccgacccaactccatcacgcccaccctcgcttgggtacgtcggctagagaaaagttacactacaagcctagccgttgcccacgctggcttgtggtaagtacgataagttcttccggggcatcccgcgaaccggtccttaactgccatgggcacgactagcaaaaccatgcacccacagcccaccatgacgtgtattttaattaaccaacaccattacggtggcactaaaccaaagctatgccgataatcaagtctatgctttaatgtgatccccctttgtgcactagttgaactaagcagggctaagcatctcctaaaccaacatctagtcattttaatacccaagttatcaatggcgtaagggaaacaacatatagctgagtaataggacccatcccacatgatattgtaaaacaatgcaatatttaatagaaatgcgggacatttgtaaattgggtacaatatgatcaattgtaatgtatgacttgccttgctctcgcactgatggaaccacagcaacgtcttcgagaaaccgcgaatcgacgaaacggccgaaatctacgcgacaaacaaagcacacaagcaaaacatgctataagactactgaaacagagaacaaaaccatttttaatggattctatacatttttatgaatttactaagacttgaatggacttaaacggagctcggatgaattagttatgatttttagaagattctctgtgtttttactataaaagaaaaactcttaatcaatttattgcgcaataattcctcccagggctgacgtcagcaaggggtggggcggcgccgacatgcgggccccactggtcagcggcactaagagagggagaagggggtggctggcaggcggggccccccgggcggcggctcaggggggaggaggtggcaacggcgggtgggccccaccgggcagcgtcacaagggggtgggaagcggcgaggcgcccggtcggcccggctcggcttcaaaccggccggccggttaggtgatgcggcggcgcaagcggccaccgacggcggcggccggcgagaagacgacggcggccggcgatgcgagcgacgacgcatcatggcgacgcgcacacgaggagcggcggcgcgcgcgagaggaagagaaggggagggagttctcaccggggattcggccggcgtgggtgaagacgacggcggccggcggcggcaagcggcggatggtggggcgcgcgggatggacgagatgggcctcgatctcgcgaggccaacggcggcaacggagcggcgcggcgacggcactagcgacggctagcggcggttggaggcggcggtaggcggcggcgcgtgggaagagcggtgcggcggtggcgcgcggcaagcgaggggcggccggaatagcccccgcgacggtgaagctagcggtggcgacggcttcgcgcggcggcggctctagcagcggtggcgcgcgaccggagggcggcggcaggcggcggagctcggtgcgacagcgcggcggcgataggaagcacaggagggcgcgacaaaggagggaagcgcgagaggaggttcgggggagcgttttatgggcgagggaggggaggaaacggccgggggggtggccgatttggccggcgacgtgggggtggagagagagagagaggagggattcaaaatgaatccgaccattctcgggcgcgcgcgagggcgggaaacggcgggacgtgggcggcgatgtgggcgtgcggcacgggcggagtgggcgcgggaagcggggaaaccggcggcgtgggtggtggcactgccgtcggttggaggtggaagaaggggctgacaggtgggccctacctgtcgatgacccagagagaggagggagggaggtaggacttcgggggaggggagaaggaacgggccggcccgacaaggagggtggcgcgggagagaggttgggcagacggcccaacaaagaaaaaggagaaagaaaagaggaaaaaaggaaaaagatttttcctaggattaatatattgcacattgctaattttaattggttaaaattatttacaatgctctgaaaattccgctaaaaatcctgttagcgtattttgacatgtagaatccaagaaaaattccacatgccgattctgattattatttgcatttattaatttagggtttctctcttgcctttaaacaaataatttcttccaactatttattaattgaatttttgttagggaaaagaacttctgggcgcaacatggagtcagctgacaagtatgccagccatagaaggaagcgtaggatccttgacgcgctgcgtgtccgcatgctcgctgcgaggaagaggaagacttgaaggaagaagctcacaaggatcaggcactggatctcccactcgtcccacagctccttcacatgatgcccaaaactacattgtaggtaagtgagaatcaatcctcccaagaacaacaacaataaatcatttattcatgccactctatgaatttgtttctcaatactaattagagatcgaccctctttaattccaaaagaacgaaagatcagaaaatcacacaataatcaagagaagtcgagctggatggtgattattacaacgttagtgattatgtatgtattgtaaactgttctgcagtacagttggaaggtgcaatacaatgttcagttgtaaatacttgatatttcatcgtatacagatggattaaatcatcaactgaatgatgattaaaacattcagttgtacttggactccaagtagaaacaatgttcgatacaaaaatattgttctttcttggagtccaactgaatgaagataacaacaacggatgagtgtgttttgcagtaattaggagatagcagcaggagacatgaaattcactagtattttgatttgttccatttcttttattcaatgacaaaggaaaaggatgaacacgagttaatgataaatgccttgatcattaaaagttgcttgctcttcacataattggcagatcaaaaggaataatccaaatgaacgaagccgaaatccaactacgaatgagagtggtcaatgaagtgcctataattaaccaaaaaaatgcatgctttcagccgaaaatatcaatacatacataaatatatacaggaaaggtatatatatattgcatatgccagttttgaattgccatttaatgaacactatacttaatacgctaattagaacgctgtaatataatatgttgctaggcagcatttatccacacaaaaacgaaaccaaaaagtggcatagcatgttaattacctttgtttctccttaagattgcgcatattgccgattccctcaccatttctcacaggtctcatttcagtcaggttgtggggtgatgcaagttcgaacagaatggaatgttgctttgctaagctcatttttagatcagatcaaaatgtagtgaacctcaagcttgtctttttttaacttttggtgcgacaaatggatgcttgcttcaatggtcagcaagtgtttacacacggaagcatctaagctgcaagcaacatataaatatgaaaaaataaataccagatgttaacaccctggatttttttcccctatttaaaaactattttctaatgcaaattttgatttcaaatgtggctcttgttagcgattccaatcttgtgccaagaagatctcaatccccgcctatctaaaattctcgcccaaaaattcaagaaccattaaggccgtgttctgtcccatatgttcccaactcctctcatttgttttccgcgtgcgcgcttttcaaactacaaaacggtgcatcttttgtaaaaagtttatacatgtaagttgcttaaaaatatcatattaatcaatttttcaagtttttttatagctaatacctaattaatcatgtgataatctatcgctccgttttccgtgcggaggtgagggttcccaaccccttcaaaaagaacacaagtccaatttaaaatcaactaaatatacttctgtttctccttccttacgcctcaccgcgctaatacaagccgtgttgtgcgtccccgtgtactgctggagcatgtagttgactagggttgcactatattcatttacattagcccactcttttgaggagcagaccctcgtacgcaaaagtagggattataatttcgcttcaaaatttcgctctccccccactccctcctttgacaagcaaatatctcttcggacctgcttagaagcccaatttcagatcgaaaactagtgtaaaatactagcctgtatttcttgtccatctagactgtaaatggcacctagatggaccgtttctcgaaaaaaagttccagctgaaaaaggcccattacaccagaaagaaagtaaactcctccagaaaccacacatgaaaaccatggtagtcaggctcctctcttcttgcttgagcttgcgtagccctctcctctgcgtctcctatgtggacccccgtttttataacaagaatcattcgtgtaaacagtaccaattccctggatcaagtagtctggtacacacgagttcatagctgaaataccagatgcacatacacgagaatctagtgctaattattacatcataaacccgcaggcattgtcttaaattatcggaccgagcgggtccnaatacattccaaagcagaaatagatatgggcagcgga

SEQ ID NO: 4592 - DNA, 20393 bp, Oryza sativa
  unsure (1)..(20393): unsure at all n locations
aatttacttttagggtttgttcctaaccaataacccattattcgcgagttatgaactccgaaatcaaatccaataaaataatggaacaaaatcggcatgatgcaatttattcaaaaagtttttgaaggcccatatttttggagtttagatttttgtcggtccaatttttagggtgttacaaacctatccccctgaaataaatctcgtcccgagatttcttaccagttttcgaataaatgtgggtattccgtctttaagaactcttcactttcccaggttgcttcatcctcggtgtgattactccattgtaccttgtacatatgccacactttgctcctagtcctcttctcggctctatccaatatccggaccggatgctctggatacgtgaggtcattgctaaggtgaatttcttccaacagagcttgttcttccggcactcgtaagcatttctttagttgagatacatggaagactgggtgcacatcagcgatattttctggtagctgcagctgatatgcaacttctcctcttctagccgtgatttgaaagggtcccacatatcttggtgctagttttcctttaaccttaaaccttttcggtcccctcatcggataaattttgagatatacgtaatctccttctttaaattccagattccttcttcgagtgtcggcgtaacacttctgccgtgattatgccacttttagacggtcccgaatcaggcgaaccttctcttcggcctcgttgataatgtcaggtccaaataccgcccgttcacctgtcttcgaccacatcagcggagtccggcatcgtcgaccaaacaatgcttcattgggggacatcttcaggcttgcttgaaagctgttgttgtgggagaattcggcgtagggcaaacacctctcccagtctttactaaaatccaatgcacaggctctcagcatgtcttccaggacctggtttgtcctctccgtttgaccatccgtctgtggatgatgagccgtgcaaaaagcaagataacttcctagggcttcatgtactttctcctagaagtgcgaggtaaactgtgtgcctcgatcagatataatcctcttaggcactccatgaaggcacactatcctggtcatatacaactcggcgagcttagcactgttatagtttgtcttgacgggaataaatcttgccgtcttggtgagtcgatccacaatcacccagatagaatcgtaccctgttgcggtcttgggcaatccaactatgaaatccatacctatctcatcccatttccattcgggaatcctgagaggttgcaacaaacttgccggcctctggtgctcagccttcaccttctggcctacgtcgcagagtgctacgtattcggccacatctctcttcatgttgggccaccagtaaccctccttcagatcctggtacatcttggtacttccggggtgcaacgaatatgccgattcgtgagcctcttttaggattaatcctctcagtcctccctgttcgggtacatagattctctttttgtaccatagaacacctttttcatcggttgaaaattcctttgcacgtcctgcggctaggcgtccctttacttctcggatttcctagttgtctttctgagcttcctctatttgggtcctcagaagaggttgaatgtccagggtgtttatctgtccacgaggcactatatgtagatttagctgggccaattcctctttaagctcaggagccatcccttccattctcagatgtttgcaatggctcttacgactcaaagcatcgaccacgacgtttgccttaccggggtgatagtgaacctcgagatcgtagtccttgattaattccagccatcgcctttgtctcaagttcagatctgactgggtgaagatatatttcagactcttgtggtcagtgtagatatcgcaatggtttccaatcagatagtgtctccaaatctttagcgcatggaccacagctgcgagctctaggtcatgggtagggtagttttcctcgtggggtcgcaattgtcgcgacgcataggccacaacctttccgtcctgcatcagtactcctcctagtccttgccttgatgcatcacaatatataacaaagtctttcctgatgtcggaaagaactagaataggtgccgatgtcagcttctctttgagttgctcaaagctttcctggcactgttctgaccatacaaactacttttcctttttgagtagttgtgtcattggccgggctatctttgagaacccctcgataaaccttcggtagtatccggccaagcctagaaaactccgaatttcggtcaccgacttgggtgctttccatcccgtaacggcctctactttagcagggtccactgctactccaccggctaagattacgacctagaaaagcgacttccttcaacaagaattcacacttgctgaattttgcgtataacttgtgctttcgaagtttctggagtaccaatcgtaagtgctccacatgttcttcctcatctttggagtagatcagaatgtcatcgatgaataccaccacaaacttgtccaagtaatccatgaacactttgttcataagattcatgaagtatgctggggcattggttaaaccaaacgacatcactgtgaactcatacaatccatagcgtgttgaaaacgcggtcttgggtatatcctcggtcctaatttttagttggtggtatcctgatcgaaggtcgatctttgaaaacaccttagctcccttaagttgatcgaagagatacacaatccttggtagtggatacttgttcttgatagttacttcgttcaatgaacggtagtctacacacattctcatgctaccatctttcttcttaacgaatagcactggggctccccatggtgacgaactagggcatacaaaccctttttcttgtaactctcggatttgcttcataagttcctccaactcgttgactggcatccgatagggtctcttggatatgggagcagttccaggtaaatcttccggaaacacatcaggaaatcgttgctctaccggcattcctttcatgggtagcatggtgaatatgcctccggcacattcggccagtctaggatcttgatccatagttgttctcatatctgatccccagggggtggttaaggtcacttctctacgcctacagtcgattacccctctattctttgttaaccaatccatacccagtatgacatccagggtctgaggtattaagaccataagattggagggaaacaccacatccctaagacgaattggtacgtctatgcaagcatgattcacagttatctcgcccccaggtgagtgtactatcataggctttctaagtcccactagggttaggttgtgcttttgactagccttcagagatataaatgaatgcgatgcaccagaattgaagagaactttaaccggggtagaattgatagagaacatacccattagtacgccatgatcttcctaggcctcttcagctcggacatggttcacttgtccgtgcccaaatccagtagcggtcctgttagattgcggagtcttgaatagacctcgcccggcagcaggggtagcagtgccacgaacagtcattgcattcgcgccagtccggacaggagttttgcgtggatgtgggcagttgttagcgtagtgcccgtattccccgcagttgaagcagtccacattcttcttggctccaggggcaaccaaagttggtgtaggggtgcggttctgaattgcaaccggcctgttgaagttgctaggtgcagcgggacgattggtcgccacgatagggggcttccatccggatggagtggctcccttgagtcgctgaggcactgtctgaggtgggcgactcatagcaagcctcctcttgcggttgtgttccaccgtcctttgatcgttctccagcctaacgactttgttgatcaggctctggaagctctcatggtcttgcccaatcataggtccacgcaattcatcattcagcccttctatgaacttgtcgatcttttcctcttcatctgcgaggtctccaattgcatagcgggccaactgagtgaacttgttcagatattcctgcaccgttgtattcccttgtcgcagccttctaaactcgttcttcttcatgcgcatcactgcagcaggtacgaagttctcgcgaaacgctgcagtgaactcttcccaagtgggttcttcagcatcgtcttcccaagcttccttgtaagtatcccaccaatcaccagcgggaccctctagttggtttactgcgaagatcaccttgtcggcttcgcgtaccctgacaagagtcagtttcttttctatgatgcgtagccaatcttctgtttccatgggctcgtcggccgtagcgaacgtgggtggcttggtcctcatgaactctccaaagcttgaccctccacggttgccttggttgtttgcgatggcttgcagaagttgagtttgggtggccataactccggccagagtggttaggtcgggtgtctgtgtttcatcgttgctagttgatgcccgacgtcggcttgccatctgtgtaggttgattgattaagtatcctaattttctaaccgccttttacggctttatcccattaggggaaattgttttgatgtgaactttgttttgcaagcatggtggaataaactcatttataacacaacaacaataaatatcataaataacatcacagagtttcacaaatagtacataaatcatgatgtaatcgactgcatacatacgcagtccaaataaggttcatccaaaagatacatcgaactaatcatcaatctactcgtcaatctagatagggggggtgcatctcgcatgctatcccaaaaaaaacatctgtcgcgagatcgaaactgcaaggagtccgtcagtctagtcctccaaccatccgcaggatcccggggcaggtagagggtagtcgctggcacgggcaaacctgagtccccacggctcggaagtagtggcctctggatctggcttgggcttcttgctcgggggtcgggtgctcttgcgggcagtgctgagagtgcgggggcctccgaggaacgtgatgcggggaacgggtgtctcatcctccgaaggatcagtgatgtctggctcgatctctggcttggtatcggtcctctctgcctcggagtcaatctggatcggagtctccatactgtaacccagctgcggtgacgggacagtgaccaggggagtgtgtacaatctccggtgcaggtggctgggtcactgtagtgtccaccaggcagggtgctgactcagtagatgtcatgccaacctctcccagaagggcgtggaacgcgggtgggtatggcggggtgaggaagaagtagcagttatgccctgctgctgtggaagtagaagctcctggggtgctgatcgtggctgctcgaagctgctcctccagctggctgacgtgctcctgactctctctcagctgctcctcaagtgagtccatcatcccgcggcgatcgttgtactgatcagatagctgcttgaactggtcgccatggacctggagctatgccttcagtgagtctatctcactgccccaagtctgatgctcctcctctagctgaagctgctgcaccgagaggtcagtcaactcagtctccaactctcccatacgcctctggttgtcgtcaatctccaacagagcctcctcgtagaagtcatctactgcctcagcccatcgtgacagccgagtcaccatcgggttgtagcagcagggtgtgtcctgaactgtgcagactgagttgctctcctcccggaacgggtgatgattaaactcggtactcgctaactcagctcggtggatagagctgagtcggaggaaggcctcccgggctgcatcctgcatcgcggtctctggcaagtctcggcggtgacgtgtcggaaagctgtagtctaactccgaagaaactcgtgagtgaacctcgacccaagcctcccaaactgatccacactgtctcactcggaaggtcggaaatccggagtaccgcagacgcctcatcattcaatgcagctcaacgacatacccctctgagcggggtaagcccaactcccaggtagcgggtgaatcctgatctgccatctaagtttaagaaaaacccaaagtcagttgagagtaaaaactggttttgtgaagaaaatagttaagagtaaggtgtaaaatcgtataaagttttgtaaacatagcatttttatttttgaaagtgttgctaaataggaatttctcccttggccatcttaggaaaggggtggggcgcctttttggtctttcctacagtcgtatggctctgataccagctctgtggacccccgtttttataacaggaatcattcgtgtaaacagtaccatttccctggatcaagtagtctggtacacacgagttcatagctgaaataccagatgcacatacatgagagtctagtgctaattattacatcataagcccgcaggcattgtcttaaattatcggaccgagtggtccggaatacatccaaaagcagaaatagataaggcagcggaattaaggcagcggcatgccattgccacaggcaacgaccgtactaagacctactgagcaccatcgtcttcatctccctcctggtagtaggcatagggatcctccggagcttcatctcccgcttctgattaattttatatttgcaagggtgagtaccaaccgtactcagcaagccaccacatcaacaatgcatatgatagggtatttcaaaggatggctatggttttttttgcgcaaagcaaattttgtaattcttttcacaagcctaagacctagcattgactgatcaaactttagtaccagtgtttgtattaaaacaacgacggttctgtccaccatccattgtgatcccaaggatagctttccgccgttgagtcgttatggttttctgaggatgcccaccttcccccatctcaggaagtggctccaacaacataaaaattcatcatgcaataacccatcccacacaaattaagaatttaaagactaaccaagagtaatacatgtcccggtgctcaataaccgcgagcacggctattcgaatagatttggtttactcacactgcagtggatgtacactttacccacactccgtgactgcccaacacatgagccttgtcttaacacatgagacacgtcacggcaaagcttttcgataacctcgcattggcagtacccgctccatgaacttttgcatcctcatgcactctaggcgtacacagtttctagcagtgagaggagttctggcgcacccgggaagggaagatttacacccatgaattaagttataattaggttccactcaacacacgacagtcctaacaatggcgacaccattgtagagcccctgccttacacatgagaaaccactatgcatggatattgcctccgctcggctatttattccgctaggtctatccccattcaagaagtgtggtcgtacggggtcgtttcatgcttaacttcatggctcggtccttaattgaccggggacggtactagcctttcccggataccacccaaatccaccgtccgccccggtctaaaacaaatgtttaattcctttcatgtcatcattatcatggcaatgtggcgctcatgtctccacatgccgcatctcaattaccttcccaaaggtaattgcccaagcatataatatttgataaatatgagtatgcaagattctaaagtagcatttctaagcaattgtcataattgactagggactcatacgtaatcatggttacaaggatttaaaggtgaacaataaacaaggcatggcataatcacaaataggatgttcatcattgcatgtaatcttatttgtaaacaagaattaatttcacaatagggatcaacgtggtcaaagaatagtgatgacttgccttgctcaaggtcttgcgggtcttggccttcacccggatccgcggctcgctcggtctctatagttacgtgcgtaagaacaatttgaattcgattagaattcaaacaaaatccaaataatgaccgaattgaaaaacgagcgcgagaggtgaattctatatcggctattttattcgcgaagtggaatttttcctcctcctaagatgttttgcgtttcctaagaaattttgtggtttaaaattacgtcctagacttcatctaattatttagttcttaattatatctaaattactaccgcgaaattgattccttatggagatgactaagaattaatctataacaatctataagaattcatctaattatattttcattaatcctataattaaattctaatatttttaaatattttaaatctccccctaatttttcctttcttttctctccctctctcttttcttttcttttcttttctctctctctctcttttcttttcttttcttttcttttcttttcctctcctctctttcttttcctctttttcttttctttccctcccggcccctttctccctcggctccttctccctctctccctctttctgcctaccgagaccggctggggaaagggaaaaaggcggcggcggcacggcttaccggcggcaacggcaacggcggcagcgcatggcggctgcgacggcggcggggaactcggcacggcctaaaagggcgacggtggcgcggttgagatggggaggaggggggaaaattggggaaatgatgtggggaggtttggagatgaagggggggcttttataggactttgggggcaaatgcccggcctaatgatgatgtcacgacggcgcacgggtctcgaaacgacggcggcacggcgcggcagcggcgatggtgacggcgcgcgtcgacgcgacggcgcgacacgctgcanatggccacggcgcggcagcggcgcggcagcggcgacaagacgcgacggcgacggctcgcggcgcggcagcggcgacgcgacggaggtggcgcggcgtgggacgcgaggcgacgactcaacggcggcgcggcgggtgcgggacgcgaggcaacgcgacagcgacggcgacggcgacgcgaccgcgacggtgacggcacgcggcgcggcacggcagacggcagcggcgcgggacgaccgacggcgacgcgacggcgcggggcgcgaggcagcgacggcgacggcgtggcagcggtggcacggggctcggggcggccacgcgcgggacagggggaggggttttagggctagaccgcaatcgaacacctatggggcaatgaatagtgacgttgtccatttaacccgatttaagcctatttatttatttaaacttggttcgataaacttaaattttgtacaaataaagttcacttaatatttgtgttattcccactaatggatccacccttgattaattttacccatattttatttttatataattttcttgaatttaattagagttaattcttattccattacttttaaatttaattgatacaaatatggttgtaataatattttactcatttctatcctcgccaaatcttattttatattgcactttaattatttactttgtcaatttacttttagggtttgttcctaatcaattatccattattcgcgatttataaactccgaaatcaaatccaataaaataatcgaacaaaatcggcatgatgcaatttattcaaaaagtttttgaaggcccatatttttagagtttagatttttgtcggtccaatttttagggtgttacatccttccatcgccccacccttctctccggagagtcgcaagcttgtgtggtacttgtcatcacatgcatctctctcagccggcccctcccatcctcgagctcgtgcaaggcgcagcctccctccctatcccaccggcgcggtcgccgctgtggaggccatgattcttgcctccactgcatgatgggacccgacgtgatgtgctacctagcacactccatgtctccatgagtcgttatgtgaatagctttgggaatcaataaataaaaaataggtaaaataggttccacggcatcgaaagtttccaagtattaaagtgcaacggaacctttcgatggtgcaaaccaacattcgaaaactttcaatgacgtgaaaccaattttacaaaaagaaaagacaattattgttgtaggacactacaatttgtggttttaactctaggacacgtcaaaagtcgatctttaggggaagacactctcaaaatgtggttatttgttgatgggcaccgcatacactaaaatattaaattccgattgaataggagagataaacaacatgaaaggtcaaaaatgccccgggtcgacttgtcatattcttcccccacatctcactccctctcacactccagccgcaatagcacctccgctcgccaccggcgaccaccacggtcctcccacctcgcctctcctccacctccactgcagcggcgtgacccgtctcccttcaacatgcgcgtgcggcggcgtggcccagctccctcgcttggctacccggcgtgcgctaaggggcgaggcggcaagcattgtgcgcgcgtcatcaatgccgagggcctctacctccaccacggagccacgggcgatggagttggaggtggtggcgtgcggctgctcccctccatagacctgccttcaagcggcgctgccctgaccttagagcagagaaggtggaaggggagaaaagcgctggcagtttgggcggggggggggggggcgactgggggtaagggcaggagaacggcaccggtcagtgggtgaggggaggaaggagctggttgaggggatcagattgaatgagagatgggggcaatttggtcatgacgtgtcaaaaagtagacccgccctcgcctagtcagcactaaaatactaaataaatagttaggtgcggtgtccgctagcaaataaccaagattatagatagtcttctctttatgacacagaacatgtgtgaaacatagcacgagactctaaacaaatacattggatagtagcagataaaactcgatgcagaataacgtttgcattgttgacaaaatttggatattcttcagcccatgttgtcatcagacaaatgaactaccaacaagagcatagttacaagaccagaaatacagaaaaaaaaaagatggtggaatacaaggtttaagcttgcatgttcatcagatagtgtaagcagagataataacttggctagcatatacaaagggctcactcttgaaagaatttctgctccagaaaattctctatccctatcaccttttactcctgcacaaaacattcatccattgaattatgctggccaatctgagtaatagtaaactaaagaagtaataaatccccgttggacttcacactttgtatggtttcaagaaggttttgaaaaacgttatacctctagattgtgtaacatatgtgcaaatatatatatagatcctgttatcgtatataatattttttgtactaatagtaaatttcataatagcatcgtatatgtgtacgtaggatcatcgattcactaaaaaatactagcaaatttcatattgttccaccaaattctagtatacaaaacttctataaaaactcctgtggaataaaattgcaagaatatagagttacatggggaagcaccattagtgcagtggtggagccatgtataaaaaaactctatacatcaacattcaatcatagcattcttagctggtgcagagattaaaactaacttgtagttccattatataaaaatatagagctaacgacaatgtggtttgagtcatctgcccaacaaaatcctaggtcaaccaatgtttaccacgatcctagtagtgatatattattgtgcagaggaacaacaaaggaaactatgaaacaaatacctggtcatcgtcgtcgtcatcatcgtctcccttcttaaggcgggtagttccaccctctttgcatataggtattttcatgtgtccaaaaggagtattgacatcaatgtgcccctttatggtgtaaccagttccctttccccttatcatatcccacatagcagagccaaaatccttgggcctgaagctgattggtaaattcatggttgttacctcctgcttcttaatatttgtagtttctttcatctcagcagaagcaatgctcacattagagagccacacttcataatccatagaattcagtcccaggtcaaagtcatttttgttgtcaagattcaaatggagtgttgcggttgcttcctcaaaggagaactgctcaaacttgatcttactcacattaacgtctggtctgtaaggcactgggatctcaccatttttctccagaggtatagaaatccttccgatgaccgggatatctatatgaagcacaactctgatcttgtatggaatgatactcccaggcttgatgtccccatatgtactcttgatgtcatcataaataagtagcagagggattttcactgtctctgaaccatgagcatgtatggttccagaatcagggattgtcccagacatgagctttctctcttcgctttcgatcaagtattcgatgtcgacgagagggatcggcacggggtttgggttggtgatgagaacatcagcaatcagctctaccttctcaaggctgatgtgaggtatgtggatcccggtaacatcagcagtaggctttccaaagcttactgcatcttcaatcttttcaccaatgtcttgaatgaaatcctttaccttgtcgaagaaacctcccccctctccatcattattgtcgtcatggtccttgtcagctttcctttcggtcacttttgggctatccgaagatgacatgctgtgatacagattgaagagttaacatatcagatttcacaaacaatttcctgtcgaaaatgttcagaggtgaaatatgaacgacaaaactgacaagcgcaccaatggtaattggtaaaatattaaatacacagtaaaatgaaaacatcaacaagaatacaagattacataatcacaacaggaagcggtcaaaagatatacgaagttactatactgttgtatgaaacgacccatttgagctgatctcaaagaaatgttgtaattaaccctcagaaccagatgttcagcccggacattcgactatttcgaaatctatgatcatgtgaattcaagcatacacaaggtgcccccatcttaaatttgtatagcaaggatggacgtaaacaaaacaagcaagctccacctgatccaaggagactactaataaattaagatggcagccagcaaaatatttccatggaaacgtgagaggccaatgataatgagtttggaaaatcaacagtttccggctcctgcaggttattgtcaaattccagccttctcaatggagcttcacaaatcgaaatggatgcatgacggatgcaagtaaataaaaaataatacggagaaatcattgtccttaatcttagaatcctgccgctaagctctgtcgatcgagtacctcgcattgttctgacaaatcacaatgctgataaaaccgtgcatttataaacctacacaaactaatcccgtaatccccatcggccattgatgagaatggatcgcatttgttatcttctacatgcgtcttccttcgttttttccccttcttttttaccgttttataaacaaaagacaattgcgtcgacatctcctctatatgtgattctatcaaaaccagcaaataggaaaaaatggaacgaaacagaaaaataatttgatcttcagggcattcgaattcaagaagcagcgcactgcccagctcagcccagattctctctccccacgatcaagagaagagaaaagaaaatgacagcacgagcacatattggatcagatcatgatcatcagtacgctggatggaagaaaagcagctggactggattgatcgtcggtcggctacctgctagggtatcgacgacgacgatcgaagcgaaacggccgcgatcgagcagagcagaggaggggagaggagatgggcttcgcgtccgtcggtggaattgggatggagagcggaagcggaacgccattagcggcttaagcggcacctgcgcctgcggcgggctgatcggcctttaccaccgtaagaattttttttatttttattttttataaacctttttgattttttaattttaaaataaacattttaaaaagttattttcaagagctaaacattttgaggtcaagtgataaaacaatgttatttggctatacggtccggatggtatagaagctttgttttgttacgctgccctgaagccatgacaggactgtcacgctcgctgcgggtgatgttataatattgttttactgttttgtcacgtttgccgggatgatagggttaaaatgttgaaattttgaaaaataagttttggaaaggtttatttttaatttaaatttaaaagttaaaaataatgattagtcatgcttttctttttgtctttctaaactatcatcctcgttgtcaggttttgggtcattgggcttgaggccatttttgtcttctggatgggcttttccaggtccaaagtcatcatacgtgggtcgggctgaaatttttatcttaatgtaaaacctcctttttttttctcttgagatgaatataaaaaggtctgcctaatgtcatccaagtttaaaaaaaaatgtgattgcacttacattttcaaccgttggatgataacatgtatcgccatatcgcccctccagcgtatgttagaccgtccgtgaatgcaggcatgtttgtgttttgtgcaataaataaattattattgctttgtcagttgaaagaaaagcccaaattatctttttttacatttttattgggggtataatatgactgaaatttcagttatttcggtctaaactagtttgaaatttggaacaaaatatttgaataaatatttccaaattcacaaaagttatgaaaaaaatcaaaaaaatttggccaaaataatttcatatcggagagtacgatagacaaaattttcaaaattctgacatgaaagtttaaggagcaattgcttatttaccatgtttcgaaggataactactaatttgatcttgctatttctagtttgcttatttgaacctgcttttcaaaattgaaccaactgtttgaccgtatttacaatacaccattagtgttttatttaggaaaagaaaaaatctatttattatttcaactgacaaaaataccctccctttaaacttatccatctccctacctcacaaccgacattatatctctctcccccctctctcgctcttgcgtctctctcggtggctcagcacgagcagcggcgcaggtgcatggatcggcgacgcaggcgtgcagagggtgaaacagcagcggcagcggcactgacgcgcggaggaggggctggtagcaacggcaccggcgcggagggaggaggtgccagccgcgcatgtggcagcgcggagggaggaggggcggtggcgcgcatggccacctacgcctgctgttgcgccacgaagggagggaggtggcggtggctcaggcgcacgaaggtgaggcagttgcggcggtgacagtggcgacaacgctgacatgtggagggaggggacggcggcgccatggccgcctaccgctgcacctcggagctaacacggacgtggttcacgccgtcggtggcgaagccgtaggatcttgcaccaccgctcgaagccggtagagtttactttattgtgtcaaatttctatcaaattgattcgaatatatcaaatttggtgccaaattttgtttatttcgttttgccgaaaatctttcaaaattttcaaattgatttgattttagcagattgaagctaaatctatcaaacttgtgtcaaatgtgaaagatatgtcaagttcgttacaaatatatcaaaagatctgaacatatggccgtcttgatataacagggtcaaataaacaagggcaaaatataccatttacctcttagttaacattgttaagttgtcttaacagaatagagttagctttcatcttcgattttgaaaaatatgatcaaataagcaaactaaaaaaatataggatcaaattagtagataacattcaaaataggatgaaataagcaattccccttgaaccaggggtgaaaacggagcggatattatccggtccgatccgctccgaatccgtccgatgtgagaatatggtaaggatttttagatatccgaccggatgcggattttgtcatgcggatgcggatgcggatatggtatcaacgatatccgacggatacggattatccgatattttaatcggattattcgatatactatttggcggataatccgcaactttcagaccacacaacaactctatttagcacattttacatcgggcggcccatctagcccatctagtgtaacctaatccaatcctccccgaaatctctctctctctctctctctccgtgactcttctcttggccccttctcctgctcccacacgcgccgctacatggcgccataggtgtgccgcgccgccgccgctccttcttccagtccgccggcaatgtgttgtgtgctgtatgctgtatgcagtgtgatgtatggaactagtgtgttgcttactatatgcagtgtgctactgtgttgtgtggctgtgtgttgtatgcctgcattgtggtatgcctcattgccttgtgcttgtcgtactgatgagtgtgaagtactaaactactgcactgaacactatatttttaaattttaagcaatgcagtgaactgctgaactgaacacttatattatatttttgatggatgtgttatattaagcaaaattatattattgatatgttttagttggttttttctagagaactgagatcatgttcatatgttgttttgccatcgtattgcggctaattgtattgccgctctcttgttgtatggattgaatacaaacttgacatccgacaactttttatccgtttttgaactgagtccgcaccgaatccgacgtccgaaaaaatccgctccgcatccgtatccgcacgtcatccgcatccgtttaaaaaaaatggtttaggatatggtatagctattatccgtccgaatccgctctgttttcacccctatcttgaaccctggatctgctaacgtgctagagctttggtccgtccggagttgaagttctaatttaactggtaataaattttaataatttcagtccataataattatacagtagctaggaaagatattagtaattactacataaaaacgagcgtgtagcgtgcaatgggtaattttcacagatagcgtgtgtaacaaaagactatattcggatatcctatgttaacaaattggttatcctctcctcgcagttcgcttaaaaattgtctcagtttaagttaaattgataaataaatcatttagcgttacgttacggagtctcggttgggcttaaacaacaagcgagccttcgcacgccttcgttggccgatcgatctccccgtggacggacggagggacccacccatccacgtcgccgctattttcgcggcgcgcgcgccgccgatctccgatcaccggcggctgggtgcgagccccgcaaccgcaaggcgtccctgctgctactcccgcccgcatcctccctgcgcccaactccaatctcttctccgcctccaactccaggaggtcgctctcctcctcgctaatttcgcccgcctccgccgatttcctcggggggaggggagcagcggtaggtgccgtacgtctccggtgagctcccgtgccgacgcgcatcctctttctttcgatttcgccttagcctgtaataacatgtagatctggaacctaggtttttctctttttcttaatatatagaagtatatatatatataaaaaaaaaactgtgggttcaaccagaggtatccccatgcccacgttaggttcaaccctgttcgcagaatacgtggaaattttgtgtacagctgagattgttttgttctgaatatgagtagttattaccatttggttgttatttagataaattgtattccagcatattttgattattttctcttttcgtgttttactctttcagtaacttttgtgtggtagtaatttatgaccatggcgacctcgcgagaggttttcaagtatcaccctttgcctacaccgggagtggaaaacagttttaaggatgagatccaatccaaggttttgggcacgataggggatgtgatgaactcatttgatccaaagtcattcccacagcatgtagaaggagcactgggaacagctggaaacatcatcaattcctttgagtcaaaattggctgagcacaagcaatttgattttggtggcaaaaccaatttttatggctatgattgtgcggacgatggttggggatctgcacccttgaaggcagataagccggtaaaccttagaaatctgctgggtggtttaattgcaatcatcagtcgtggcggcaaaaattctgaaattcaaccgccaaaggacactaagtctagtgtcgcattcttagggtcaggtagcgatggagaaacattcttgcacgcctcagtctatgtgccaagtgctccaccattgcttgacgaagaagctctgaattacaatgtgtatagggttgtgattgaagcagaaccaccagaatggttacctgatagttatgctaactcatgcatgcaatgcgctgcttcttttactgttgttactcgtggaaggcatcattgtcgattttgtggagggatattttgtaggacatgctcaaaaggcagatgtctgttgccagccaagttccgtgagcggaatccgcaaagggtttgtgatgcttgttatgataggcttgatccgttgcagaacttattcattaattctattagcaatgccacacagactgcaaagcatgatgttatggattggactagtaccagggggtggttgaatttgcctattggattaacaatggaacatgagatttacaaggccgcaaattctgtgaggagctatagccaggtttgaggttactgattttgatttcttatcgcctccttacatatttaatcgccactctcatacatgtttaattgcaatatttaggatatacccctactaatgaatcatacaaattttaatgcagattgcaaggctaaaccccgaaaggtctattcctcatgcagtccttagtggagcaagtgggcttgctatcctgacagttgtaaaagctggtgcacttcttacatacaaacttggaactggcctagtagttgctcgaagatcagatggatcttggtcaccaccatcagcaatcgtttcagttgggttaggatggggagcacaggtattaactacattgctaatttcatctctgtctttgatatggacaatttgttgtccatcaatttatgaaatgcgttttttttgtgttgttacacttaatacagtttgcttaattgctctagctttccttgtggtgtagaaattatccacatgcattgcccattatttgtctttgggtaaaaaagtaatgtaatggacattttttgtatttcctgatggaaaatagtacagagtgtgcatgcctgcacaagagctcgtaatatttaagtgcttgttgtggcactcaatttacctttaggtaaaaatagtttttttttggatatgaacatcaggaggaaactgcttccttttgttgtgaatgttacgtgattactggcattaacaaacgaaattatgttttatgtttacttgatgagtaaaaatatgttaatatgatttcagccataattcaggaggtttcctaatatttactttttacatgttatactcttgtatgttgtattcttatgtttgatcatacaggttggtgctgagctaatggatttcatcatagtgcttcgtggtctggaagctgtcaggacttttagcagccagatgcatttttctgttggggcaggtttaagtgctgcagcagggcctgttggtagagtgctagaggctgacttgagagctggtgataaaggctcaggtgtttgttatacatatagctgcagcaaaggtaatctttccatctgatcgtagttcttaagcctccctagttgcattgaagtcagtctctgtttctattggagtgtataaattcgtaggaagaaaatatgttgcgtcacatgcataggaaaatacatggatatgaagtcctctatatgacagctttgctgatttagatccatggaaatcatttaggtaaaaacctcgaaatttagtttaaggtggaacagaaatttcggtatatatagagattaatatgctggactttgaagatatgat

SEQ ID NO: 4593 - DNA, 2309 bp, Oryza sativa
aaatcgttcaaaggaggtcccatggcagtatcgactcaatttttgcccggttttactgacgtggcatcctagttaacaaaaaaataaaaataaataaatatgtgggacccacacgtaagtgaaaaaaatatggggtcgacaatcctaatcagcaatctcctttttctccctttttctcttctgtttcgttttttgggggagcggcagcgggtatactgcctcgggaccttttttaaaggggcaattttgtttctaaccctatttgatgtctaatattgattttacccctactttttaggattttcatttttaccctcacttttttgaactgaatgcttgttttgcccctactttggatggtgaagttaatagtgttaagtaattgacaaaatggcatttataccctctcatgtatgttcattaataatgtttttgtccccattttatacatgtagctttagaactttatttttgggagtatatttaaaattagatgacccgcattgactaatataacaatttggacaaattctgaatttgatggaattttgacaaaatttcagcattttgatagaacttaaacaacattttaacaacattttctaaaatgtaattatctgttcctttagatactagtcaatgtgcttcatttaattttaaatatactcacaaaaataaagttataaagctacatgcataaaatggggacaaaaacataattaatgaacatacatgagagggtataaatgtcattttgtcaattacttaacaccgttaacttcacctctaaagtaggggcaaaacaagcgttcagttcaaaaaagtaaaacgaaaaaagtaggggtaaaatcaatattagacatcaaaataggggcagaaacgaaattgtcccttttttaaatggttttacatagtttagggatacacatttctagttctatggttaagggacctcaaagaatgttggtgttaagttgaggtatctccgttgaacttattccctctaagaaaaaccgaacccatttccagacggaatgagctcatctcaggtcccttaacttgtcaacgaatccaattttcgtccttcaactaaaaaaaccatacaacgggtccctcaactgtcaaaaccagtgcagatgaggtccctcggcggttttgagagcggttttggctgacgtggcgtatacgtggcaaatttgacttggtcttcatatgatgtggcattgacgtggcaattatgtggcaaatcaatcccaaaaacaaaaaaaaacttcgtgggacccacatgtctgtctcacacacaaattaacaaaaaaaggtggggcccacgtgggccccacaagtccctcttctcacttcctctctcccctgtttctccctctccctgctagctatggagcgacggctgactccgggcgtgcgcgcctggtctctccacctccggaatatgaacgacgcggcggagctgtccgtggggaccgcgtcggcaacggacacggcgtcgtggtgcttcgcaatggcactgatcaggcttgtgttgtgcacgctccacgctgaggccgtggtccgtggaggtccgcggccggcggctaggcggcgcggcggtgaagccgtgcgaggaggtgtacgtcgtcggggaagacgagatgttgcacaccatcagcctcactcctcccgtcatccctctcccttctctctcttcttccctctcctccctctctctcttcttcgcggggagcgccggaacggacgggctggtgggcagtggagcagcagccggcgacctcggcgaggcggcgccctcgtcgccgccttccctctccggcgatggccttcacgcggcacctggaccagtagccagtaacgacaacgacgacatggttggctcgtgcaactgcctgtggctcaagcgacatccccttgtctgcggcagcatcatcgtgatcaacccggtcaccggcgagtccctccatatcccgtcgccgccgttggcgaccagccgcagccacgcgggtatgatcagcttcggctaccattcgacgactggcaagtacaagatcgtccatttccttccaatggcgggctggtggatgaagtcacgctggggggcaccgcatcgtcgtcgtcccctcccgccatggcggcggcaacggtgatggggtggtgaatatcctcacgctgggagacgacaccaccgccgccggcggcgcgcggtgggggcgtcgccgtggagcctgtgcgtcgcctggggcgttgtcagcgtcaacggcgccacgtactgggtgcccgagggcaagtagatcatgtcg

SEQ ID NO: 4594 - DNA, 2303 bp, Oryza sativa
cgtgaaattttttagggtgattttgatttactgtatgcaagattaatgtcatgccatcgattattctccacaataaaagaatgagattgtggtctctttttccctttgcataatatgcgatagtgggtagttctgtagttctatcgtataaattgtttatacatatacgttagtttggactattattttttgtcataattatatgtttattgaatcatgtttgatatttacattatataatgagagaggggcattgtataatttaacaactaattatagagtgtatgtaattcaatgtgtgagatatggccttatagtatttaattaacttcttataaaatgctgcatataagagataaggtattgttttatagccccaccgtgcgccccgtgttcaaacgaacgtggggcccagcagaaaagggtatctatccctctcgagtgtcctgtgactcctgtccagctaaccagccactcatctgctgctgatctgcttgctattcgagggggaagaaaaaactcagctgctgctgctgctagcctacggatgattggatgaagtatcctctcagtagtagtagtagtagtaatagattacggcattcgcatgtccaaattggtagttttaaatattgtctcatctaattttaggttggttctttctagaatggaatgattcgttatactgggtaggatcccatctatttttagatttgttttttcgaaacggaggggtatgtcgtaggtcacttatacgtgggtcagtaaaaatatgatttttatataccagttatctctctactattataaaaattaaagatatttttaccgttactttggtagatcattcgtatttgagtcggttgttaagttcgttcgtttttggaaatatagatccgtgtttgagtccgcttttaagtctgatcacttttgaaaatacaaaaggagtcatataagaaatctctttaaaaaaaactcgcacactaacttgggatgcttttggaaatacagaaggagtcgtataagaaatactttaaaaaaaaactcgcatgctaacttgagatgagagatagactcctaattgtagctcatagttttctaaaagaaatatccaagcaaattcccacaataattttcactctaactgaaccgtataataataataataataataataataataataataataataataataataataataataataataataataataagactaaaatagccttcatctgttgcaacacatgggcattttttctagtaaaataaaaaaaagtatcatctagttgttgttaccgctggtttttcagtaaattttaagttttagtagtaggttaataggattaaaagtatacttttcacttttctttacttagaaaaatggcaactaattgactcttcaagtttgtctaggccaaatattactagcaagtaggagtataggatatattcttggaagatgacgctacctaaagagaagcaaactagctaggcgctaaataattatctcacggaatcaggaatttcataccgaacatgcttatcatgaaccactaaggttttagtattttgacttcttgtaatatttatgtgacgctcgtgtagagaaaaatattgacgattaaggttttagtattaagttatgtactccctccgtttcaaaatgtttgacaccgttgactttttaattcgtgtttgaccattcgccttattcaaaaattttaagtaattatttattcttttcatatcatttgatttatcgttaaatatactttcatgtacacatatagttttacatatttcataatttttttttgaataagacgaatggtcaaacatgtgctaaaaagttaacggtgtcaaatattttgaaacggagggagtatgacataggacctagaacctaaaggagatatggaggcttccgaagatagtgaatactagtatttagtatttgtcgctctcatgtaactgtactagaaaacacgtgtttgagatttttttttccttggaacagcccagtcaaagcttctcgaggcattttgttctggttaatattatcccacagtacattactagcggaattttcccatctatttttacaccgagatattctttttttttgaatttgatacatgcaattttgcactggacacaattatcctagattatgtttctatacatatatacatttgtattggcgctgttctacttaatttcactcttgtgcagtcaacacacagtgtgttgtgtctgccaggggcggatccaatatgggtgcagggggg

SEQ ID NO: 4595 - DNA, 4340 bp, Oryza sativa
aaaaacattattaatgaacatacatgagagggtataaatgccattttgtcaattacttaacactattaacttcaccatccaaagtaggggcaaaacaagcattcagttcaaaaaagtgagggtaaaaatgaaaatcctaaaaagtaggggtaaaatcaatattagacatcaaatagggttagaaacaaaattgcccctttaaaaaaggtcccgaggcagtatacccgctgccgctcccccaaaaaacgaaacagaagagaaaaagggagaaaaaggagattgctgattaggattgtcgaccccatatttttttcacttacgtgtgggtcccacatatttatttatttttatttttttgttaactaggatgccacgtcagtaaaaccgggcaaaaattgagtcgatactgccatgggacctcctttgaacgatttgaataagtttaggggtaaacatttctggttttacaggtaaggaacctcaaaaaatctcgctgttaagttgagagatatccggtgaacttattccttcttagagcgagagaggtcagctatgttaccccgatatgaggatacggatacggatacggatacgcgatacggggataccgggatacggctattttcgaaaaacatggatacgtggatacgtctatatatacataataaattaaaaagaaacaatgcactcctcaaagaaaatgggagaattgattgccaataattgaaagataactaatagagcaatacatagatacattaaagcttagaattgtatagctttgaccagacctcatgcagtagtactggatcttcaaaaagtcacttatggctttgtagtcttactttacggtgtccaatatcacaaactgatgttctccttccccggccccaacaaatcgagatccaggatgccctgaaccgtcaatacacgatacttacctcacttgaatgaagcaatccctaaccgcgagcagaggtgtgtgctgcgtgcgctaagctaggggggtgcggcatgcggcggcggcggcggctccgcggggcatggcgacgatgcggcgcctcggcggcgtgcggcagcagtagtaggcccgcattgcaaagtggtggctctacctttgcctcgctccagaacgacgacgccgttgggtaggaaaagatggacgcggcgaggattggtatcccgtgagaagttaggattagatcgtaccttgtatccatgcgtatcagagaagtatccctaattatttcatttttctgaaaatcagaaaaatagaggatacgtacgggcgtatcggagcgtatccgaatacgtatccgtattcctttacgtatccgatacggatacgctcccagccgtatcagggtatcctaggaggtcagtattgcagcttttgctcaacatatgcttgaggaattggagtagttagttcaacccaaatctgcgtgacgtctcgttccttccttaaaagaataatcttgtttagaagtaaagcgttttagtattagaaaggggccaaaatgttcgcttaacgagaggggcttattttgctattgtagtgttgtgcacagcaaggtttcgtaagtacaatgtacatatattaacaacctgtaatgttgttccccatcacgcaataccatactccgtattagattagtgctgaaccgggaagccaatgaagcctagttttacacggtaatcaaccaatatcctaaatggtttgctgatatgtccattgctcatatgcacgcttagcttatatcctagcaatatttctggtctagactaacatcataacgtgatttgtgtgcgcagccaaaaaaaaaaagagattgaaaagaaatcaccgtcctgtattgtgtggttaacaacaaaagcattcacctgtcaccccctcccgcactcgccgtcgccatcgttcgtggacgcactcccccactgaatttttttgagaattaatattatttttatggaaaatcgcaaaagtagtggccaaccggggaaaatcgcgaaagtaggtccctgtcgaacgggtgcaattcgatagggcacctatcgaacgacgggcagttgacagagccctgtcgaacggctggcgttcgacacgctcgcctgtcgaacggagggagttcgacagggcccaccaccccgcgccgccaggcctgtcgaaccgggggcgttcgacaggtccctccaccgaccctgtcgaacaatgggcattcgacaggccggtttaaaaccccgtctccccagcccgcgatgcttgttcgatttgtttgaggaccacatcgccagccgccgtcgagagtcgccacatcgtcgccgtgagcgccggagggagcgaggggaggggatagcaggccggagacgaggccgaggaggcgtcggccgggaggaaagggttggcgatgccctccagcagtgaagttaaggtatacattagtaatccctaagtacaatgcatatgaaagtttaataaaaaattggtttaagagttgttaattgtttcgcattgttcgatgttagtatgtatggttagcacatatttgttattgctaaatgttggtagaggtatttaagtaattgtacggttaaattagttcttagttagtacatattattgatatgttgtgtgttaaaatatgtacaaaggtgttatattttatttggattattaaactagttgtttgttactaatagttgtaaattagtacacggcaatgtagtataagttgtaatagggtaattatcgaatgattaaatgattaaacgtgagactatttgtcatgttttatcaggatgtcaggtgatatgcccattcgtctgtattatggcgatgctcctatacaaatatgtgatagcggggtggatttgactgtatatgccttccatgatactagtctgaatgcaccggagcatatgggtttgaacgacgtgttagggtggttgtataatatgtttggggtagatccagtgcacgataaatttgtcataaatgccgtgtggccagtgaggggtcaacatggatggcagtggagagtagtggaggttgcgtcaactgggagttggaggaagtttgttagtaaagtaagggagaaaggctatagcctggcaatagtggtgcagaagacaacatgtgttgatcgatcgggggagtcaagtcatgcaggtattccaaactccgccttatgttcacccctcgcagggagcatctgggtcggcacacttcccttacatgccaacgggggacaacgtgttgaacacaccagcatggggacttcatatcactccgcgtgcgccagagcagggccacacacagcacacatgtaagtcattttaaacaataacacgctttagtttctaattatatgtatcgttactaactacgccatattttttggtttctccctcttgtacaaacagacgatgagtacggttcggcgtcgacgcatcacggagtgcctgcttactcccctcgcacagcattcattgaggacttcttttccactgatcctccccaggaggaagtagggatggattactggcacgcagcacctcaggtcacacagccgacgcaggagacggaggccggtcaggggccagacgtgacaccacagcagacagctagagataggcacccccctgataatttgacatatcccactgagcagattaggcgtaggaagaagggaggacctagcaagcgtgcgaagggcactgatcgtccttgacttatctatttgtattaagcttttagttatttctgttctgtccgtactatttgagaaacactttacgattaacttagtactatcagtactatttcataaacttcttcggataattactcagtagcatacccttcgaatgaatcatgacaaattatcattcaaatatacaaataatgaaactaaataattcaaatattttaaccaacaaataaatactacaatttctgaccaaacattatcaaaaccctaaatcacatacatataacattacaaaaatattttcctttcttacacactaaaataaattacatattattaaaaaaaataacttattacaaataaatggagaacgcgaccctgtcgaactgcggcagttcgacagcccagcctatcgaacgggggctgttcgacagccctgcctgtcgaacgggggctgttcgagtcctgtcgaacggcagccttccgatctcctcgccagtcgcgctatggccgttcgataggtgccctatcgaactgcacccgttcgacagagacctattttcgcgattttccccggttgaccactacttttgcgattttccataaaaataatattaattctcaaaaaaa

SEQ ID NO: 4596 - DNA, 3261 bp, Oryza sativa
taaagaaatccaagaaataaactagtagccaaaaactagaaaaacgagtttctccggattgtcaccatcttctaagaatctctagctcccaaaacatgtagttgaggaacataaatacagagcacgtcaagactggaacaaacatgaacatccagattaagcaccaagtataactgggtatatatcgatctgttatctgtatgacttaaggcacggtacaacgacaaggtaacatcatagcgaactagctatgccataagtttctccttttggagtgacgaacagctacatatatcaaccatgttcctgaaggtaaccgagactatatatataagcggccactacagttctcagaagtatccagcattttgggctgtcctgatgatctgaaagagagctgcacaaagaaaagagtagaaaacacaatgacttggtaagatgttcataaagttatgatgaaaaagatggaaactactgccaaggctgtaatgaagactgaaatagttgcaggatttttcatgcaaggagttctattttaccaacattagactgtctgttccatttgaatccttaactagggtaacatcaaaccttcctcttctattttccaaagtcttaaggagaagcatatatttttttgagaagtttataagcatataaggatttattgcctggcaacagattagtagctgatgtccatgggtgtggtagctgcagcagttaacaaccatatctggagtaaaccatgagactatttttggaattaatcagagcaggaatctagcttcttattctttgaaaaggatttgactaatctaagatcaaaacaggaaacacatagatactttcccacaaagtgataacatcctaaagcaaaactaatgatgtgtactacagctacccccatacacgactactgataatagtactagattagcactttcgcaatttagcacagtttagtcctggagagagcacagaagcaatacccataaaaacaagaactaagggtgaaaatagttaaaatctatttaggttggtaaaggcattctgagttatgaagagtatgagtgaagataaatagctcaaccattcaccacaaatatataaaaaaagaatgtaacttacatgaaccaacaaccacaaagacgaaaaatccaagcacaatgggtccaacaggataatcatttcctttcttgactgtctcaggaacagaacccctcttggtgacgttcttctcaaaccgtgccactttcctatctgagagacgccttgaggtagtctgtttcatcatcagcaaataatatcagaagatatcataaaagaacttgtttgaagaaaggaaagaaatatgcagtgtatttggacagaatcccaaggaaatgacattcatgatgccagtaaattcatacagaaactttcatctattcaggaaaaaaaatgttactcaagatgcaaagcacaatggtgccatcaccagctaactgatgcctgctaccaaatatttctgacaacatgttgatctgtccgacttgcatgttaagggagtaatttttacattaccccctagaaccagtaagcagggtttgaaagttgatcataactaaatccatcgaaattataaaatcaagcgtattgggtgagttatatgtttttgtgcctttattatatgtattagatgatactcaatggcacgtgataatgctgacaagaaaattagaaatgctttactatatcataaaaatagtaatatcctctgctcgatttggtggaccctgattccaaactactctctctgtcccataaaaaaaccaacctagtactggatgtcatcctagtactacgaatctggacatacctctatccagattcatcgtactagaatatgtcacatccagtcctagattcgtttttttcgggacagagccacagagggagtaatccctaatcttcacatcttatcctggaacacattttcgaatcaaagcataggagtcgaaaacaataaaaccatacattaaaatatatgctaaattgaagttacgcaggatcggaagcgttgtagtgtgctagacgacaaatgcaaaattgcatgggtcaattaatactcttcgtcgacatttcaaatgcgttataaagtaatctatatactaccaaatatgatggctagcccacgtaaatgcataaccaggttttctaggtctttgataggccaatccagaatatgcggttacatgaagtgatgtaatgcaagacaactagtgaatgttcgctctcggatcaggaaaatcaatctctgcgtcactgttattctaaacctgacattagttagtcagcaacaaaacttgataaacttgttaccagatcctctaaatcttgccaaaggataatattgaagcatagcctaaaaataaacatatcttttgttacgaaatgaacggtttaaactacaggtaggcacgatcatcatagaagtacactacactatctacatacaggagaaatatgaattcaaaagcaaacagatgtgcacagccacggatcttcctgcgaagattcagaagaagaggaacagaaacaagtaaaccagaaatcaacatttcgtcggttctatttcacaaaatcatcgccaggacaggggcggatccaacttgggacacccaaacttttcggggaacaaacaaactgttacttgtattaaggttaaggcactgaaattaagggaagagcttcttccagatctagaagagaagctagggttaacgaacgaacacaagcaaattccagaaccgatgggagagagagatgaatcagaaaaaggatgtgatgctcaccatgatcctctcccctgctctgctcgccagatggagatcgccgccactcccctgttcagccgcgactcgtcttggcggcgcaaggaggaggagacgagaggttttctttctgttacgccacaaagggaaggggaagacactcggagaaaaggggaaatttaactatttgccacttttaggtttaccaattatccaaatacccctcttatatttgcccttattttcttgcccctcttagcttgtagcttcttaattacttatttgccacttttgcccatgtggcatgccaacgtggcagcgcggtgcaaaattctccgtgggacccactagtcagtagcacaactgtccccttaccctctgtctttgatcagccccgccgttcccttcattgccggtgaccctctatttcctggcaggtggcagcgaa

SEQ ID NO: 4597 - DNA, 9980 bp, Oryza sativa
tgcgtcgcctggggcgttgtcagcgtcaacggcgccacgtactgggtgaccgagggcaagtagatcatgtcgttcgacctcgagcatgagcgcatcgaggccgtcgcattgctgccgacgatgagcaagtgctgcttgccggtgtccatggagaaggaggacgcctgctgccagctgaccacccccgccacaccggcccccgctgcggcacccaccaccccgcgcctaccaccaccacacccgccggcgcgcctaccaccccggctccggccaccggggcacctcctctcccccggttgaggcttccgtcgccggcgctgttgtccaccgtcttggtccagctgccgcgtgaaggccatcgccgaagagggaaggcggcagcaagggcgccgcctcgctgaggtcgccggctgctgctccgcccgccactcgcccgtccgctccggcgctcccgggaagaagagagagagtgagggcctgtttggcacagctccagctccagcttcaccccttctggagctggagctcagccaaacagtttcggctctaccaaaactgggagtggagctgggtggagctctctcacaaaatgaactagagttgtggagctgggtttaggcagctccacaactccactccagactcaactcctggagttaaatttaggagttggagctgtaccaaacaggccctgagagggaaagggaagaagagagagaagggagagggatgtggggcccacttgggccccaacatttctaattttctttttgtgtaactaacatgtgggcccacgatttttattattttttctgtgatagaattgccacgaaagcgccacatcaatgccacgcgtaacgaagaccgagtcaaattaaccacgtggacgccacgtcagccaaaactgctctctaaaccgccgagggaccttatctttaccagttttgatagatgagggacctactgtatctggttttctggctgaatgacgaaaatcggattcgttgacgagttaagggacctcagatgaacttattcctttccagacttcagatccagatccaagttccaacccaacagctggcctattttcccaaggccgtcaaagctcgtaagcccaaaaggccacaagtctacgaaactaggccttttaccccgatctgacattccatcccatttggcccatgttgtcccagcccacagctccacacgtatgcaggcatgaaccaaacatttctccgggtacgcctcggtctcccgctgacaaattgcactattgcagggcatatctcctcacttgttcatctccagctctcctggcacactccaagcacaaccttctttcccgttctgcatccttccatcctcgccacctgcgatgatgggctcgggccgttccttgatggcgcctcgcctccccgcctcctcctattcctcgctgctggcgccgacgtcgtggtcgacgccggccgcgcgttctccgccgggggccgcgtctacgagaggagtgcagcgagctggaggagctgagcgccagcgtgcactggacgcatgtaccaccgaggcgaacggcggccgacgtcgcgttccgcgtgtccgcgctggcgatgatgaccagaacggcaccaacgtttttttctgcacttctggtcaggttgcaggatgccgaattgccgatgcccattgacgatgctcagagcaagtttaataatataacccactactagctaattcatacaatagttgcttattatactattaatacatggtctcacttgtcatacacacattacattttagagttcgtgctgcagctgggctacagatatgtagtctgctgctcttctctctctttctttattattttaaaatatgtttatagctggtttatagccttctattttacctattttacctgctctcagaatggtgaccgtgtagccgacggaccaccagtacaagttccagtcgaagcgaaccttaacggtcgtctttggtggcatcagcagggcagaaacccgagacagagagacagaaacaccacgttttagcacgtaaacgcaataacgaagttgctgaattttgtgctctcagttctcacaggtagcatcactggactgtctcattcaccgagtagctatctcaaaagcatcgatattgtggagtactgaagagttgctagggggaaatgtcaatacgcgcgattcagagcacgactgtttccgaaggtcaggccgacccccccatccggcggctccgattagtggtgaaaacggtacgaaaatttttaagattttcggctgccgtttccaatgaccatttcagtcagtattggttaccgtccgtgttagaaatggcaacggtaatatcttccggaaataggatgaaggtttttctgaccgttttatcgataaccgtatttgtatggtaattttcgtcaaaattctaaaagttccatagcgactcaaccaatcaaacatatcggaagcctatgaatgaaggaagcctagcaggtttgtagcacattagaaaggggaagtgaccaaaggaaaacgctgttaacgctagggcatggcatgtggacgttgctgaactttggtctactcaacttatcggtgttgagatattgttaaattttgtttatattgttgatcaaacttattattatatcattaattatcatataacggtgttatgtgaagtgtgatgatgcaagaatgaagttataaagtcatcttcgtacataattaaatgtgtattaggccacacttttctgattctgacatgaattttcgacttccgaccaatgtcggttgattccgtttcgacggtcccatttccgatatactgatatcgttactgtttttgaatcttcgaatctactgttccgattctgttttcgagaaaaaaatgaaaatgaaaatagtatatggtttttctgaccgctctcatccctgctccgattatgtaaccacagcattggcattttggcaggcgccatggagatagaaccaagcgatggaaacaccatcgtttacctcgccagtcgccagtatgacgcattgacgccgacggaacagagcgccccaagcccccccaacccacagcattcagaactccatggatgggtttgtccttgagattttcaccttgaccgtttgcttcaagaagagtggaaaaggctccaaccaaggtggctccatggatggcacgtcaccttctacttttcaatgtacgccgtgtttagcttcaaagtttttcttcaaacttccaacttttctatcacatccttctaattttaaccaaacttccaattttaatgtgaactaaacacagccgtattctaacaatcctgattattttttaaagtataataatctgcatctgttattatgtgtatgtgcaatttcagtccagtttctcgtatgtttggtctattgtgatcaaacggatatggcttcctatgtagacaaggaacagtacctcaaagcaatcgaggcttgtttggatcaatgccaatacctatcctcacaaaaaacttacgcaggggcaatgtttggaagttaccaaaattttgataattgtctggactaagatccatacaaatcattggttgaaatagactggtagctgcgcttggcacaagagcaagtcttatggaaaaggtagatttcacccctaattttattcatgtagactattcatcaattaaaagatagcatatacaataaatcacacatatattaattgtagtgcactaaccctaatagttttattttatttgtttgatcaatcttctcttccttttttttcccttttttattataatttatgtgaaggttaccccttataggaggggtgactatttctctcttctcttctctccagctcatcatacgagtgtatgtggcatcttggagtaaatgtttagatgcccatagcacttgctctaggcccattcatagcgcctcctactcataagaggagccccggaaagccatgtaggctagggctacgggtctaaattttgagttctttacgatgcaagtggctctaggagtggctataattctatatttcagctccccaacatcttttgttttagttctcattttttttcaatttgtatggaggtccaaaatttacactaaacaccctaaaatctaaaaaaaattatattaaaacccctctctcccttatcctcacccccctccccggcatgcccacctccttcggttaccacgagcccatggcgccctcctctcctctcctcatgtcgcggcggtagtcaaggagattgggggcacgatggcggtcgaggaggctgaggcggcgacgaagccaccaagcggacgatgacaacaagctcaggggtgcgtgacccctcccgaccgacgatgaggagatggagcccctcagaaggcgacgacctcaacaacgacggcatgggagcttggccaccaccgtcatcacctcccctcttaggcatcaaggaggagcgggatccgacctagatagtgccacctggatctagcccagcgctaggtggcagcgtggcatgtgaggcagcgcagctcggtggacagtgtgtccggtgagcttcagccagcaacgcggattgaagtggagaggacggtggggaagaagaagaagagaaaggggtcgacgtggacaagctcaaactctctcctcgccgacggtgtcaagctcgaagtgaggccataggcagggcgatgccttccatagtggttgtagcttcgccctccgaacgacctcgctctgactcttctgacaaggttcatgcgttcttagcaagaacgatgagccttgcaggggcatcgtggagccacatcaaggatggggcgtggtaaggaaattgccacatccttacattgtgaatggcttaatcatatggagaggaaagtcacttgttttccgcactcacgttttccgaactactaaacggtatgtttttttataaaaaaaaactatataaaaggtgcttaaaataatattaattaaaatttcaaatttaaaataattaatactcaattaatcgtgtgctaatggtttagcgtgttttatgtattttcttaatcttatacaatcattctctctccaacacttcctatttagtccttttgggatatgctaacagaatctgtgttttttttcaagtacaattcctcttgtattcgtactaagggagcattcgttttggaagaattttaacacataggaatagggaaggtggaggaataggaatgtatgcacacttcgatccatagaaattttcttagaggtttgagtagatggaaaatttccacgaaaaattttcgttggttttcctatacatacatttctataaacctaatgacactaataggaatccaaatactttgattttcctcaaaaaacgaataggccctaaaacaagtaattcaaaacgtgggtaaaagaattatcaacagttcaaaatatacgaaaaatagttaggtggagcgccttgcacgtataggtagcagaaagtcataatgtaacctaaaagttatggtgacgtttccgtgatgaagaagccaggaagcagatttatagaagcagaaatcatgaactaatttctagagcaagtacatatatgccatgtccttaaggattaactacctaaaaagggtactccgtccacatgaggcccaaagctactttccaaaagacaacgaacagaaaggcacgaaccacatgccatgctatgaaaggctacattaaactaaaccaacaggcaacagcagaacagctatatataagctttacagcaaatatacaatgcacaaattggaataatcaaacccaaagttctattttaaaacgaacagaagcatatacatatggcaaatcaaggtagaacaaataagtatgcacttttggtggctttatttctgggagccaactgcaaagataggatcggcgtccccgaatagtttcactagtaagtcaagcagatctctagtatacaaatggaattggttaaaaagggaatgaaaacaagcgagctaatgtagccataaatgggcaagataataaagcattcctttggtatacaagtttgtccatatgacaggattccagcttatgttggaacactctaagtatgtgccgcaatcaccactgcacatctcattcaaaaaccaagacctaatacatgtaggaattaaactaaaatctgaaaccttcacaaaacgtttgtattcgctcctctagcatggtggtgtccataaaccacacctctggttagctagaaacaattaactaacccgtatattaacctgatatcaccaattcatagtcatgcacctgaatacctgatataatgcttctttcatctatcccaagtcatatatgaatataatagtactctcgctaggaagtgatacctgcaaaaagattcaataaaaccattgtgagaaagaaatgttgtagatatcttcaacagggggtttcactgattgaagatataaagcagccttatttacttcaccaatcgcagatcatgtgttaaattactggtaaatataaaacattatactgaaatcaagtactgtatttgatttattccaaaacatattcataccgctctaagcttaacaaatgcatgccattccagaaattgagacgattcctaacacaatttgtacaactaatttctgccgacaactgcactatatttatattacttacaaatgatttcatgcatcccatctgataatcaaagtttcaaaagtttgattgcacttatgtataaacatgtatttgtgactggaatgagcagtagatactcaatttgatgataataacatacatgaggcaagggggccatacaccacactgaaatttagacttggaccaactgaatgatttagtgatgacgatgaattgggctaccagtaagcataattgtccaaattaacaaccaaaacattacagctccataaaagtatctgcgcaggataggtagatgactcgcgtccgagttaattaaactataggaccaaagttcttttcaattttctataaaaggaccatgtagaaccacgtgtattacaaaagggcagcttatcacactagcgtacaatcaaatgcttcatccactgctcatttttaaaaagtgcacaactgactaactacagaggcgctaccgctttcctagtgatgtaggtcgtattgcccccattctgttcatttccatacaaataattcagatgcataaattaacaaatgcaacaccttattaggtttgatgtgaagtggaatgaggtcaatatgagccaactggcacccacatgcatccataaaatttaccaaaccatctaagacatgattattttattttaacaaatggttaacctattgccacgtttttaacacacgcagaggcaagacaagagtatcacagttcaaattgacaaattagctgtggcaagagattactacgagattaggtcctcagctaatacaaatgtttcaaaattctgtggtgacatgtaaatagagatcagcaatagcatatgttgatttgtccaagtgtagtgctcaactctcattaagtattaagttcgggcaacgaatgaaggaatcttgtattgaacaaaggcatctagaatctagataaacaccaaagtgtggattgagaaatcaaattacattttaggcatagatttaagaaaatatagaaagcataataatagatatagaatgtggattgcttttgtgctcatgcaaaatttagccattatcaggtcctaactcctaaggctaaattttgctggattggaaactcccaagaaaggtctttttttatatatggtatcaccagtctacttgagtatactccctccggttccaaatataggtcgcattatagttctttactcttcattaaatataagtcactatagccacttgtcccgtggatttttcctcttatgtccttgctaattgaatgccactactctcgtgaacaaatgaggtattttttccaatgtttaataacaatagggcaacgaggtcactttaacactttctaattcctgtgcacaactctaaaacaacctacattcagaaccggaggggagtatatgatttatttgcttcattaatggctaagtaagtgagaaagcattgatttggttataaagaaatagggaatatgtgtttagctcagcaaaatgttgaagtgattactgacctctgcttgtctgattattattaacagtatagttgcccatgtaacttgctggtatgtttgatttgatatctggatcaacatttccaaggtcattaccaaaaggaggcatatcaatctcagatgacgtgaacctccaagttgagtctccataaatggagctgctgccatatgtatctgcattgttcacttcatatgcattgggtggtgcagagaagggttcaccaatggtaccagttgcattgctccttccatagctgccagaaggcaagccaaaactgtctccagctccacggccaaggttagccagcccaaggcttgaaatgttgcccattccatggccaggagtaggccctccccaattaataccgtcactggtaatacccatttgacctccagttccagatggtgcaaaagaactcatgtttgtggggttgtttgggtagttcagattttcattaccccaaacattccttgacattgaactcaatagtgatcctgaatcatcattaagaccaacataaccaataggactacctaatctgtttgaactaccattgtagaatgaacctatctgccgcccattggagttattgacaaaactagaattggcgccaaaattcgcattcatcccagattcagaattcatgcccattccataaccagggccaaatgaagagaatccattccgtgcgcctgtaagcagaccataccttccatcaaccctcatgccataacctccaatagggtttgggttataaccctggttgaaaccattcaagaagctatggaccctgctcatagcatagttctgccctcccgcaggtgaacgtgcagcaggtccaggtgattgctcctttggaacagctctcttgacctcaaccatcttaccattcagctcatggaagttcttgtgcagtgccttgtccaccgcatcttctgagtcataggtgatgaatccaaagcccctaggcctctgcgtgttgtggtcgtacatgacaaccacatccgtaatcacaccaaattgctcaaaataccttctaaattcaacctcagtaacattagaggccaagcctccaacaaagatctttctagtacggcctggtccaggtgaccctatgctgctgccattgttcttgctggtgatgctctggtcgtccctgggaacagctttcttcgcttccacctgaatcggtatgcacaattgagctcagacaatgaacagccgcactaggacagaattgccaccgaaatgcacaatacttcactagcagaggaaagagcaggggggggggggggggggtcaggtcaccacatgatttaccatgcgcccgtcgatcatgtgcttatccatggtgacccgctcggcgacgcctgcgtcggtgaagaccacgaagccgaacccacgggcgcggccggtgttgcggtcccgcatgatgacggcctcggtgacctccccgaaccggctgaagtactcgcggaggcggtcctcgtccgtctcccacgagatgccgccgacgaagagcttcccggagtccgcctccatcgcgtcctcccctcccctcctccccctgcaatccacaaacgcaagcccaattgataccagccagccatagcaaatgcggacaaaaccccgacttatccacaacgccaccacaaaaacgcatgcgcccgcgcgcgcaggacgcacatcagctagatccgagctgaaagcaacgccgcgatcgggggccgcacccaccct

SEQ ID NO: 4598 - DNA, 27974 bp, Oryza sativa
cgcgggtgcgacatgcgaggctgctctgctctgtggaagttcctcgcatggctcaaatccagcactttgctttgcttctttcggtagcttggcgattcttctaggcatatcgttgttcatctacgcattcgtgagcgtgtttagcgacgcatgcagcggcttagtccccgttgaatcgtggtttggttgaagccgtgaagttaatcaccgagagagacggaccgcgtcatagcagcgcacgagtggtagctgagcaaggtagatcttgaagcttttgaccgctgacttggagtgaatttttttaaggtgggtgttcgtaataatcttgtgccgggacccgggggtagttgcgctaaacgggtcaaagtgtcaaactttgccctctgttttggtgtcggaaaattatgggagagggggatactttacgacttgatctacagccctctgttttgttggcacacggattggtcgaaccttcttgtacgatgggtgtacggtacccatccattcatgacgttgttctacggtcagcgttacggcatgctgcttgattttgttcacttgtcggtaggactaggatgccaaaatagttggtggtattgcacaacctaatttcttagttgtttcttttttgtttcgtcttttattagcggaattaacatgttttcacatcataatgatgcttgtttagaagagctaaggtttctgctcgtcttagttttatttggcagaaaagaatgcatgtatgacatttgatcccaagttaagttgccacagtccaacatgtactttggcatgcccgctttcttcagttctgatcagatactcagtattgttgtaggatagattctatgtagttttctggcgatcttctttcgttagatacagtagattatctcaggtatctgagatttgagatattgtggttttctcaacattaaatgtttgagaattcatagtgggtggtttcttcaatgaaacaacgtcagaaaatccatttcaattaccgatattgccttgtttggttctgatactacttaaaataattgcttccagtagttcagtgccagatttacttgagttggtagctcagtttgtttatgttctgacttctgatatctactggttcattgcagattttgttcctgctggatttctgaaattttactggaggactagagatatcaagacaccaacaacaaactagtacaaagttttccttccagttaatctgttcctggatctccttgccatacgcgaagcagtggatactatgcagtaattggttaggaggtctttactgaaccataatggctgatactccaacttcccgaatgattcatcccttcagcaatataccgagccaaaacctgaagcagttccagtattctgataatccacagcacccttgccacccttatagggcaccttcagacacccacgttgtgccacatcattatggcctaaagtcacattcaccggatgctggttatgaaagccaggctactcctaacaagtacacattggactcctctgaaggtgctggttgtatgagacatgattctccttccagtcaaagtttcacaaccagaagtggtagccctctatctcaggaagacagccactctgactcgactgatggatctcctgtaggcgcctcctgtgtcactgaggatcctaatgatctgaagcaaaaactgaaggatctcgaggccgttatgcttgggccagactcggaaatagtcaacagccttgagaattcggtggcaaaccaactttccttggagccggagaagtgggtgcgcatgatgggcattcctagaggcaacttgaaagagctactgattgcctgtgctagagctgtggaagagaagaatagctttgctattgatatgatgattccagagctgagaaaaatagtttcggtatctggtgagccacttgagaggttgggagcctacatggtagaagggcttgttgccaggcttgcctcctctggcatttcaatctacaaagctttgaaatgcaaggaaccaaagagctctgaccttctgtcttacatgcacttcctgtatgaggcctgtccctacttcaagtttgggtatatgtcggcaaatggtgctattgcagaggctgtcaagggagaagacaggattcatatcatcgacttccatatctctcaaggggctcagtggatctctctccttcaggcccttgcagccaggcctggtggaccaccaactgtaaggatcactggtattgatgactcagtgtcagcttacgcacgaggcggcgggctagagctggtcggaaggaggctgtcgcacatcgccagcctgtgcaaggtgccctttgaattccacccacttgctatctccggcagcaaggtggaggcagcacatctcggagtcatccccggggaagccctcgccgtgaacttcaccctggagctgcaccacattccagacgagtcggtgagcacggcgaaccaccgtgaccgcctcctaaggatggtgaagagcctgtcgccgaaggtactcaccctggtggagatggagtccaacacgaacacggcgccattcccgcagaggttcgcggagacgctggactactacaccgccatcttcgagtccatcgacctgacgctgccgagggacgacagggagaggatcaacatggagcagcactgcctcgcgagggagatcgtcaacctcatcgcgtgcgagggggaggagagggcggaacggtacgagcccttcggcaagtggaaggcgcgcctcaccatggccgggttcaggccgtcgccgctcagctcgctggtgaacgccaccatcaggacgctgctgcagagctactcggacaactacaagctcgccgagagggatggggcgctctacctcgggtggaagagcaggcccctggtggtctcgtcggcgtggcactagcgttgtgactttgtgaggtgatctgacgacgaacttcccttgtaaccatcttggctgggggctttagaaagctatagtgatcatggactggtaagggtagctgtaacaatggtgttgtaatggtaaggtagcggctagggtcaaactcgaaaatgggcaaaatgctgatgaggtgtagaagtgtagtacatgtttgagagtatatgtttcagtttttcttttaaatgtcttgtagtaatgttgtggcacactaatgtctatgatcagaattatcatccactataagctaaaatatccattggaatgctggcaagtagagctgaaaatgtagcatcatgtttcaaccgggacgaatccaacggtccgagcattcgtacgtgttacaggtatcacatttgcatatctttactgccaacggcattgtacatatgcagtgagatacaaagctttgtcacaaaagagaattagacaagctcacaaaaccaaatcaaccataatccatgttctatccacattccactgaaggcgaagatagttaaagaaaaccaaattctgatgatctaattaatcttaacgggttcactgtacaacgaatatagggccagtgccacatacaagtatacaacaaggcctttgccgctccagaagacccatgtggtgtattttgctgcagcccacaggtacagctctcgcctccggttcaactgatgtgtcaatgataggagcatctttctgaagagaatgtcaatacgaagcattggtaatatatgattctcgagctataagcattagtatagactctcacggacccatgactaaattgccggcggtactgtagcataagttagccgaatggtccatcggtgtggctttgaaagtaaaaccttcactaggtttttcttctctcgaaccatatatattgctagctgcattgccagccatagtcggcattgccattgctggaagtcccatattactgtatactgaacccatgggctgcatttgatactgcatctgatcagaaactgaggactgcaattggtttgtggcatcgctgtggttcgggctgattccaacaccaagatcaaggctgatggtgtcactttcagctgcttgagaatattggtttggaaatgtcctaggttcacatgctctcatcatgccaccaaggccctgcatattgctgttaattggatggacaacaggcttcatggggggagtggacatctcatggctcgcattcctcgacgcagggacttcatggttatgttttccttcatatgttgttatgactgattttggatcatgtgatgctctctcaacatgcttcctgactgggcatcctgtatttgtgcacttgtagtaactcctgcaatcatgaaataaaatgaatatacaagttgcatcctgtatatatatgggttatggacacatacacctattcaataagtgatggaaaatatctgattatattgaaccattagagccttaagagaaggcctaatttccaattaagtgatgcccggcatcccagtcttagcattaagcccctacagccttactccccagcagtatcaccggacaatccgacacacatgttttacaaatatgtataaggcaaaaaaatcttatctttctgatttaaaataacatgaccagaagattattgaacattttgttgttactgttaaaaatctgttgacatgtcagagaaaaaaagaggagaatttactaggagcaatagatgaagaaaataacaactaaccgtggattggggtttcctttaactactttctggccatacttgcgccagcggtacccatcatccaagatgtcaacctcactaaccgtttgtactacaacacgaggctcacggttaggcttgcccatcaaagcagcatcaatagcagcagattccattttcctgtttgaacagttgtaaacaacacattcagtagtataaatgggtgattctcgccctagtgtgtaacaagttcaaatgaactgcaccttcgttttgactctaaatcatcatcctcaacagcatcatctccagggtaaggtctccctcctccggcatcattgtcatcatcactagctgagcctggaacaggctcaatcataccagctgtatgtactgcattaccaagaatgctaagaacatttgaagatttgtctgcatataaaaacataacatttaaaaatcgcataaaagaacacaacaaaaacattcatccatatcacacgacttttccttcggtgtatggactggcaaaaatataccagcagtgatgtactggagtgcaaatacagctcagaaaactcttatcaaattttgttttgtatgttacaaaaaaaaatgattggcaggttaaaatggcccgtggaattcaactaagttgagaaaaaaaaccacccaaacgcagtgcacagccaggctgcactcaacctcatgcaggggagttttttggtgcaaaacctgggttcgagcttaggtcggtgactcggcgtccccactattggaggctctaccaccacgctatacgttcattcgctgttttatatgtcaaatcattcatttttttaagaatctaaaggaatatgaatcataattctgcaagaaattcttgagaagcaataagaagttcagagatgacataaatagcaagagaattcacaaaaaaaagggggggaatcagatccaagaagcaggaggtcaagctgccaaaccagagggatccagcatcagtttttaaaacaaaggataaaaccctcaccatcagtagttgccacaccatcatatctttcttcaccctggattggaggaactgcaccggcagacagcctcctattgggttggggcttagggtgattgtgacgccctttataaaccacttcagtaatctgaccatcaagcgaacgctccaatagcttttttacatcacagttaggatgtgtgcacttgtaatagcttctcgggttctcacttcccttaacatgcttttgcccatatttgcgccagttataaccatcctctgcagacttttcagccacactttcaggctgtgactcctgcatagcatttccagagctattcatctgatgcaactcagatgtaccaacttcagcaggtgagctgtcagttaaaccaaccattccaaccagttggctcggggcacttgaaatattgactgcgagagttgactcacgagaacatagaggtatattgtcgatcatcatatcgtcagatgacagggcagtattcaggctttcatttttcatagaagtttcatgctttttgggatcattgatagcagaagcctacagtacaagacacgagtacagcaaaaggttatacaatgcaaaactaagtacaagagaaaacaaggtgtagggaaaaaaaggtaacaagggcacaaggcatagatggatcacacaaaatatgtaatgaagtttgttttccaaaaaagaatccaccattacaagatacttgtctgtacttgtgagaactaaagaagaatgtggaattcggttaacaacaaaatgcagaaggacctgatttcatgaacatatttttatgttaacattaattattctaaagctacagaactcattagattggtccattcaattacttgtattctgacctcaaattttcacatacttctataaatttgcagccagactagcaccactcaagtctcacctagcaaggaaatattgtgtctgttataccctattctcatgatctcaccaaagatctcatttctcctttcacaattaatagcttgtatttatgttgcaagaccctgctataatcaaatcacacaataaagtcggtgtgatcatttattagacttgaagatgtaaccagatccatcccaattttggcactgaaatttcaagacaccgaaccatggactagaaataacacagcctacaataataataaaacgaatttattgtactcctggtgaggtttgcgattcacgtgagaatattttgaattaaacataggaaaacttaaatatcaaaagctggaacctcagatagatttaccaagtaaaatgcaatatagatccaataaatagcataccgtaaggtaacaactttagatcatggaaaggaagttagcataagcacattagaactttacactccttttatgtacatccccaatataaattccactgttttggcgggaccatttgtaaacaacaaatgttattattttctatggaaattttttcaaactctcaaatacagtatacacaaatgaagaattacacgataccaggtaatcactcaaagaaaggatccataccgtcgattgagaggatgaattcagatgaggcttgaattcaaaatctcgagagccaccatcttcatgggtgctaccagatgttttatccctaggcgaaggaagtatgtctggatttgcactcttgttcataattgcagccatgctcagagtaccagttgtcggagagggttcaacctaaacagggaaattttgataattagtttgcaagcaaggtaagcataatctctataattttttgaacattcaacaatgcgcaacagtattacagtgtacatgttgaacagtaacttgcagaaagtatttatgtcatgcttagtacaatacttatgcctctagtatgaaaaattatccagaaacacttgtcaactaaatgttaccttcataaattcttcatttaattaaaacctgtttgccaagcatccctatgttttggaaaaggaaacatcaagaaggtcggcaaagtaacgaaggaaccaagagaaagcaagtgatatgaagctgcaaacaagcactctatgctcagcaagtaaattccaatttgtgggttttcaccgagaagaatcagaaccgccaatacaacacctaaggccagacccagcactcgatatcagtgaagcaatcatttctaaaccaagcctataaactaactctcttgcagtgcttggtgcttcccttacgaaacagcagcattccttagcatgcacaccaccagcacaatagcagccaaagccaagggggcgtttccttatgtaaggccctttgaggccgcaacaagaaaaatgccacatgatgatttgttcccccgagccaccaagtgtgtgcagcacagaataattcccccgaaacgcacaaacaacagctcccacctcactccacagaaaattgacggcgcaggggcgccccaaaaggagaaacagagcaaaaacaactatatccgcgcgaaccccgccaaaagtcagttccagaaaccgcaaggcaccaccagaaatgcgaaagcgcgcagcaaaagcgcattattccgacgccacgagccaattccgcggtgcaaatgtctcataaactagaagcataaagctaatgcgcgcatcggaatccctcctttcccccccgacacagattaatcccccggcacgatgcgggcgccgaagaaattcgtagatcccgcagtaactaggcgcgaggagatgggtgggtgatagctacgctacacgcgcggccgaggtacacagctcaccttgaagttggtgaggaggacgggggactcgaggagagccgaggggctgaagcccgcggggatggtgaggcagggctcccgcgagatcggcagccgcgcgggggacatcgccttgtacctcgcccccgcgcccgccgcgcccgcggcgagcgccgcgacgcgccgatccaccgggggctgcttctccggcgacccgccgacgcccgcggggtggtcaccggagctagggtttggcgaatcggccattgctgcggttgcgctgcgctgcgtgggaagctgtctcgtgagagtgaagaggaaggagggtgaggtggtggtggttttggaggcgatggtgcggggtggggaggggaggggcagtttggggaaagtggggtcgtcctgtagccaaggtagcgtgggctgggaggctgcggttcgtgttgacttaattaattgcggcccctgaaattactcttccacccctgcaatgtgagcgtaattacgggggtgggaggggtagtacgcgagttggaacaaggggaagcgaagcaagcgtggtgtgatgtgagcaaccggggcacgaaaccggtggtgggatccgggggcagggagtgacgacagcgacccgggctggctgcggtgcctggcggtttcggggcaccgagtggtttggcttcatgcgtcactggagtgtgggcccccacgtggtggtggtcccagctgtcagtgaggtgtttgcgttgtttgtgtagggggtggtgggtgtggctgggaaatatggtgaaacaagataaatgtggtgggtttttaattcggcgtgggatgcctgtcagagtaccccatgatctccttgaaattgaatgagaacctgaggagtggtgaatctaaattgaatgcaagaggccatattgcgaatgttttttactttctacatgcggttaaatttgtttcgtcatatagaagggaaatatttgaatgctggtgcctaatactccctgtcatagatattttgtcatttatgataagattttattcatattttaaaattacgaccatagtttagtgtaagaataaaagaaatagtatatatggcttccattttttagaggggcgtgatttatatctatagtgggatatgtgtatgtgccttccatgcaattgaacaattttagacgtctctcatttgtaaagatgtcgtgtcatttgaagagatttaggtcctgtttgattcagtttatgattattataatctggattgttagaagtaaattgaaacaaacaaatagcttattatgatagattattataatctataagcacgatttctataatctgataatccactctaaaggtgcttttttagattattgggtggctaacaactaacaaacaactaataattcagagaaacaaacagttaacaacttattctatatcggtttattataatctagcttatagtaatctagctcaataatatagattacaataattttaagcggaaacagacatggccttatttggcagcaatgtaaattaaatctgactatgtccattttcagtgggagtttcatcttgtggtttcctatagtgctacataatctaaaaatatgaaacaaatgtctcaaatgcataatttcattttcgtgattttatattcatataatttaattattgaatggtgttatgaaactatttggtcacagtggggtttcatttccatcttttaaggcataggataaaataattcagtcccaattgggttttattcggtcttcaagcataggtaactgtataaaccaagttttgtttatatgttcattctttatctcttttaataaaattcatggcatgtcatcagtttagtctatatggcatctcatttaccgagattaaaactcaaatgaaacttgcacagtgaatgagctaagaacacgcctgagagagagagagagagagagagagagagagagaatgatctggcagggaaaaatcgaagaaaaacttcgaggaatctacaaaagtcttgggccatcagccacttatcgtattggaccatacaacctcaaggttcactcgtgtacttgcattgggccatacccgttgttgcctaacagcacatggcccacatccctcccgaccgtgcccagcccattcaattgttccgtaggaattgatctgcaggctggtctacaagcagacgagccgttggaagatggtacagagctgacgggttcctattttctactaacatgttgtttcggaggcgagaaatactgtagtacctcctccatttatttccgtatgtgatcagtgatcggttggttaagcagacaaataggctacttacattatgtgtgttaatatgcatatgtaacagtgtagcaagtcttcttttaagcatttttattaagtacttcctctgtcgtatattaagattatttttagctcatcccatttatctcaaaataaattgatttttagtaataattatatcaaagtttataatagtaaagaataattgcattggaagtagataaagtgataaatagttatattaagatgagataaagtaatgatattttagtcttttgatgtttgtattggtatgtgtaggatgagtgaacaatgaacttattttggaacatctgtattactaatatgtatttgtactaatttttttaccaggtatgcatatgtaaaaattactccctttattttaaaatgtattgagatacatatagatataattatcttctcaaacaatcttttcaatattatactttaactactactgttttcttttgtttattatcaatacctacagaatcgatgccatataaaaatagctaaataaaaatctaacaatactactttattatataatgatataaaaatcaaataaaaagtcataacattaatcacatatccaatcctgtacttttaatccattcattagacaagtttttatgttttgatttttctcaaaataaaaatgccttatatattttagaatagatggagaaacaagttagtattcctttatcatacaataatactctattgtcataatatatgacgtttgttttttcttgagcaaactttcaaaatttttcccatcaagaagatctcaacggcagggcaccgttggcctgacctatatatacacatcttttaaacgggtcttaagagccacgcaacacgtggcttatgtggctagtttaaaataaagctacctataccgcttatgttttgtttcacaagtaaagatatttatccatccactctctcatctcaacctattataactattcttattttaatctccatttattttttttcacatactttttctttttaatcaaccgtaactaatacatgtatctaactttaaaaagataattgttacgagtacaataaaactggaacgattttagtactatactaaatagtatggttatcgattgggtggaaacatcttggatcgcatatttaccgcatgcatttgagactactaagtatcgtcctctaatagtttatagcatgcttttttttaaaagaaaatgtttatgttttaggatggatgaaatactatttgaaaacacgggaggaataaaatcaagtcttgtaccgaatcttttgtgcactaattaaccatgccacagaaaatttgacgagttattacacccagaaacgatgtagatccgcctgcaagttgttgcttggtcattagatacagtccaacgaattgtgcagtgtgtactggtgcggaggctatttaaaccgagcccccatgtgttcaagtacttgttggctttgttgcctcctccatgaatggtgaaactctcttgtcacgagacattttgctccaaaaagtcctagtttatgagtatcgggttgagaaaatccacctcgatcatccaagcttgcgaaagcggaattctttttggttgctcaaacctacaagtccatgctttttttaatgttattcaccgaattatttgctcaatggttttatttagaaaatacagcttctaaaaaattccattatattacatttcctatacaacttggttcatttcttaaaatatttaatctacccatataaccagtagataatccgtaacaataaatgttcaataatctaaatcaaataggcattagattattcactgtattaattgctccatagttcaaaaattgcatttttctaaaaaaaattgtattattcaaactgcttattttaagctattttataaagttgatttaccaaaacatctacacatttaagttatgtttataattaagttgataatccacggtcaacgagatgagattgaaaaaaaaaaaaaggccgacgctagcgctcacgatttgtccaaattgtcgtttggaaattgttactccccttgttgcttggccatacatatcgtcttccgtagcaaccaatggccaaggggctgatgacttgatgggtctgtgtgtttggctgttgttcttccgggtgtgtctaatgtgttctttttagttaaggactaatttgatcgtgccattataaattgattatttattttcaaaataccattataatttgtaattttaatcgtgtcattggaacactttcaaaaatgaattataacacgtagtacgtgtggtacgcatgttgaagcgttttttaacttccgcatattcgaagtaccaaaacactctacctcacttccttatactccctatgttccaaaatataaggcacaaccaaccttaacccaaagactaagaaacaattattatcatctactagtttgaatcatcataataaatataatgcatgcatccaatagaattagagatcttgagggtggaggatttaaaaaagtaataatttaatagagaagaggttctaattaattgtatgcatgcatatatgtcttatattatgaaacatcaaaaaaagtagttgtgctttatattatgcaaccctaaccctattaaagcagcgatggcagcacataccattgcctgcatgtggtggcggggacgacgatgaggcacaagtctaacgatggtgcaagcagatttagacgtggtgaggtgggggacggtaattgggcgcggtctggtggtggcagcgacacggtgaagtcggggacgctaagactgggtacaatagcagactataagtcagctataaacacattttaaagagataaaaaaaagagagaagagcaacgggctacatatctgtagccagctgcagcatgaactccaagacacaatgtgtgtatgacaggtgggaccatgcattaataatgtagtaagcaactattgtatgaattggctattacattggctatagatgatttggagctagtagttgtgagagcgctacgcgtcggacgtacggcgcgagacgaaaaatcggacgcctcgcgcgaccgtccgatgcagcacgcgcgcgccagccgtccgattggagaaacaactcgcgcccgacgcccccgccgttgcaacacctggacacattaactgtttcattcaatgtgtctgcccgttgaccgctagctcgaggggagatttcggtggcgcgactggcgctgtgctgccaccggcgattctctccggcgccggcgaccctatcccccacgcccctatcctcctcgcgacgccgacgaagcctacaacaacgccgacatgccgccacaccacatgccgccaccgccgccatggctcatctgatacaccaagttgagagggattttccgccgagctcatctagtgcaaatggaggaacaaccccaattcataatgcaatgaatttggtgagtaaaaaatttctagggttttgcttgttttacttttttttttgacaaagtttcaataaaaaattgaagcatagatctgtgaaacaatgtcttccctcatgcaacatttatattcatgtcttatttttaattttaacttttgtataaatttggactggaatttgacttgaacaataatccttaacttgctgaaacataactgtacaaactaatgaaacaaaacaaaatgttacagatcgatgtccaagcaccaagctcatctggtggcttccttgatgtgctattatccgaatccactgggcatgaaactgacttggtgagttgtccttggatttgaaacattgcaaatgtaggggggaaatattttgttttgaaaacacagtatgtaacttagtgaaacttttttgtgtactaggttgtagatgtggaaagtgttgacaacacagatgtggctgctgtgactgttgaaattgatgaacaattggatgaagatgcatctgaaaatgatgaagaagaaaaggatgttgtttattccccaccaattgttccatacattggaatggagtttgatacagtggaagaggcaagaaatgtttacaacgcttatgcttataagctaggatttggaacaagaattgcatcatctagaaacagccaggcatcatcggggggaaaaagcatcgaagaaatgtaaagtatctgaaaatggagacaacaagtggagagtcattgctttccaaccagaacacacgcatccgatggtgaagcgccttggaagaaggagatattacagatctcacaggcatatctcaaatgaagactatgaattttctaaagactttgcatgatcgaaacattgcaacatcgcagattttggcgttgttaggagatttgcacggtggtgtgaggaatctaactttcactgctaaagatgtctcaaatttgaggacaaaattgagacaacaagtttcactcaaagatgttgcaatgactattgattatttccaaaaaaaaaaaactcaagcagataacccctccttcttctatgctgcaagatatgatgaggacaacgtgttgaaggcgctgttttgggtggatggcagaacacggaaactgtatcaaagctataaagactgtgtcttctttgacacaaccttaatgactaaccgttacaacatgccatttgcacccattgttggaactaataaccacctgcaaacaatattgcttggatgtgctttgatttgtgatgaaacaactgaaacattcatatgggtctataaaacatggatgcgagcaatgaatggacagaagccaggttcagtgatgacagaccgagataaagcaatgagagcagcgattaaaaaggtgttccccggtacaattcatagatgttgcttatggcacgtgacaacagaagcagatcagcagctcctgcccgtgtatacttcaaagaaaggcttccatgaagctttgtatagatacatatatgactctaaaacaatagcctgatcccttcattcaatgaagcagaatcttgagcaacaccatcttgggcaactgttaacaaccaaatttggtaatatcagcatcgggaaagaaaattagatcgaagcaaagtcggaggcggagatcgagttcagaaacagggcaggaatcggctggagtccagatcggctacgattaggatcggctgggtctgagtcgggctaggtaagccgatgcagccgattccgacaatgcaacttggtgtatgacatcgggttgagttgaggtgtttcaaggtgattgccgcacatggatagagtcctgagaaggcaattgtatatattaattaggatgttttaggtaatttccttagagatatgcttgggcaaaagtctgccgcaaagacttatggtatcttagagtttgttagagatagtagtcgtgtccgttatggacatatcttgtaattttcgggtataaataggcccgagccctatgtaacttttaacacacatgttcaatacaatctcggcgcatcgccacccttttttgctttagttttatttcgacgagttcttgctttcggattgagctgcatcggtttcgatcttcaacaagaggtaaaacttgttatggcggcttgcgttctcgggattagtgcttccatttttatgacactctaatcttgtttatgtaattcgtcgagttatcatatatcctacataatccttggcaatatcgatatccaacctacaatcggctaacatccgtcaatagaaggcagccgattaggttaaataccgatgttgacttagataatataggatatctaccactctatgacatatccaacggcttgattgtctagatattgtccttcttttcatatttatagctgcatcagttaagtttgatcttatgagtcgtgattagaatctcaatctctagcccgcttcttggttgctgattagggtagtatcggagtttcagccgatcttacctgatttaactactttttatcctatatgcttgattgacatgttaaatctgccctttacgttaagatcttgctgcatttaagtatattaggcttttgtttagtatattctactcgctttaatatcttaatatagagtggtatcggagtattagccgatacatgctagatctatctgatcggctatgctatgaacgtatatagtctcattattaatatatatttcgatctaagtgatttatactgtctcggcatggcgaccgatctatctcaatcacttgatttaagtatatatcgatataaagattatatattggtaatatctgcagccgatcgagtagattcagtccttccttatttattaatgactgccgatcgatgcatatataacatcggctcaaagataaatgatatgtcattggcacctagccgatcggctatcatttatagatttaactgtgatttctttgcttctatttcttgttcattacatgatcaaatcaactggcacgctcatacattcgaaggcgagctttggacctgcactagagttaaacagatctcccaggcctcgtgttttctgtcaacaacaacaccagccccaatgcctacaccatcttgaccagcaccaattggaacatcttcagcccttgcaaccctagcattctcagcctcagacccaccagcaacaacatgaacttgggctagatatgggatctcattctgtggacggaactgaagaaataaaaagatgaaacatagtcttagtaagtggtgaaacacaaaatgtatatatactaaaacattcatagttgtgaaacataccgggcgagacccatatgtgacatagccaaggttcatcctacaacggtctacaacaacaatatactcaaagtcctcatcagtgacatgacaaaatcttggtgtgctgtagtcaatgatgcggagatgcagtccagttgttggcatttgcaaatgatccatgtaagcaatctaaaaaaaaggcatttgatataggtagttagcaggagcatattggccaaaaaatatgaactagaacatatggcagcggtgcatgaaacatatcatatgtgtaatatgaaacaattgatatattttgctgaaacatatacataggtaattagcatgctagactgattatttactgaaacatatgacaacagttgtgtgaaacaaaacatatacgttaaatgagacaaatggatgtattttgctgaaatattggatcaagcacatgacagtgaaacaataaaaaaatatatatagcaaggtgaaacaataaaaaacttacaacaagcaaggggaggcactctccaatctgaaaaatggaatctcgttgcttagtagagaatccatgatatttcttgatttcccgcatcaaacagctcgccacatatgtgcaccaatcatactgactccacatctggacatcaaccaaagaatgcacatagtcgagattcacataattgccagtggcaggacacaagatggtggcaagcaggtacaaaatgaaagtcctcaagaacttctcttcatcatgcagagaaagcaacaatttctcgcacatgcctgtaccaagtctattgctgacaaaatatggatggtacagggtcctgatctctttcacaacttcactgttggcaccactaagcttaacaggtagatcgccatcatttagcccagtaatcttctgtactaacaacttatcaaacatgataaccttgccacggaacctaaactcacaaatctctgggttcatcttttgcataatccattctgcaagtcgactatggaccttgaaattgcttagcgatagaaaagattcaaagtcattatctatgatgaattgcttttgatcgggttccaactgaagcatagtgcgcttaaacctcacaccaccccatctatgcttgaagttggaaccactacaccaatcaggcatccttgaaaaaaaacacacagaaacaaagtctgagacaaaaatacaacatgtgctctgcaacaaaaaaaaatgtgtgtactactatgtaaaacaaaccagggaatactatgaaacataatattaatgtgtactgcaacattgtatatgcatggatgggaacacaaaaaaacaacataaacacaaataaaaatgaaaaaataaaaaaaatgcataatagattatcacagtgcaaaaatggtaaaacaaaaaaaccaccatatgaaacaatcacagtgcaaactcatattatagattatcaattatatctcataatagatcatcatagattatccttctgtgacaaattaatgtaactaatagagcacaatcacatctaggagaccacatgcaacacagacaataataaaaaaaaaatccattcacatctagggggaatctcataaatgcatcctcatagattatacctaaaaacattctgaaaaaaaattaatgtcattactagaacacattcacatctagtagaccaatgcaaaacacaaaaaaaaaagtcaaaaatcatttcggatttgagggagaaagcatggggtagcaaggtgtgagaggggtggtaaggggtgggggtggaatggggaacgggggtaaacgaagccctcacctcaacgctgggaatggagacagccgccgccgccgctggtcggaaccgcagcaacacacagccgcggggtgagtgtgtggtgggggtagagccgtagaggggaatgcgacgattggagaagccgctgcgacagcttctagcttctccagcgccgcctcgaacatcgccgctgccggtcggaaccgcctcagccgccgccatcacctacccgctagacctaactccaccgccacctctccgcgcgctctatccgattgtgttggagcggttacggtggaaaaaagggaaacccagctgtttccctttggatgttgcaacgggctaaacgcacggagcaaatctcagccgtgcgttctgtcctaacggatcgaacggctcgcgcgtgcgtctgacgatgcgcctcacatcggacggccgattataagcgttttcgtagtagttggctatactattaaacttgctctaacagagcgcaggttcaactgtggaagcaacgtggcgagatcaggcggtattcatcgacgacgatctctccatgagggaaaggggaccctcccctttataccgtgttaattatttttacctagatttaactatttgtaatttgatttggcgcatactgcataaaaacaatatcctctttttaaatggaagcaaattaatttgcaatatccgtctagatctttttggccgaatacaaatggagactatttttcttccattatcttccatatattactttttgcccatatggatctgaaacatatgcaggggtgttttggtttatagaaagaaaatagcaattaatggactatgtattactctctctgtcctaaatataaatataaagagattttggatggatatgatacatctaatacgaatctggataagaggatgtaactcatgaaactcaaaatttcttatattttaggacggatggagtagaatttgggaacatgttatttctatctttatagacaccacttatatggtttatatgttccttatctcctgtgctgtgaacaggaaaaaaatgtgcattgcacggtgtgatcaggacgcgaatgtgaaaaagaaaagaaaagaaatctctagaggtggacccatcagtgttttggtgtacctgagttatgctaagagcaaagccggccccttattattattaaactcgtattcgtatgatgatgtggaggagaaaagaaaagagagaaagaggagaagccaggtaattttcacacatacttcaataaatgagagagaaagagagtactccctccgtaaaaaaaaaagacaaaccctggtttccatgcccaacatttaaccgttcatcttatttgaaaaaattataaaaaaaataaaaaagacaagtcacgcataaaatattaatcatgtgttatcatctaacaacaatgaaaatacgaattataaaaaaatttcatataagatggacagttaaagttggacacagaaacctagggtttgcctttttttaggacggagggagcagtggattgacatactccaagtgtattgggagtagtgtaaacaagtacaatctattgtaaattaatgttactctctccattaaaaatacttaggattgaatgtatcatatcctaatacaacgaatttggactagatatatgtcacatccaattttatgtttgttttttatgggctgtagatagtactctctccggtttcattttaattgacgctttggacaatgacacgctttacaagatatacctttgatcttatttttctattataatatatacaataaataaatgcatgtttacttttattatagtgttttgaaagacatatctatatatgtttttctaatttctttaaactaaatatttttaaagttattgatggttaaagttataaaagtttaacatcaatctttttctaaatgtcaattaatatagaaacagagggagtacatgattacctactctgtccagtaaaaaaacctcaacctagatctggacatcccatactaactaggttggattttttttttgacttaggaaaaaatatcagaaaacctgctctaaaccggcaatataccaggaaaatccgcagcgtcttgccgaatggaattaaattgttcattcattttttttctcaggaatattcgggatacaaaattttctacagaaatataccgtcggtctcgcatacgcgttacgcgaaaataacgtggaataacgtcgcaggcggtatcgcgccatgaaagtgcgaagagaccgttcggtatcgctgaagcaaggagcgatactggtgccatgatgatttaattagccattaattaacgaattaattaaatcactgatcaagataatttatcattaattattattagttaattgttaattgagtgattaattactggagatattggtcagtgtatctgtttgatttcgtgagagcgttcagtctcacattccgcgagacattttcaccgcgcgatatcgtccacgacgtcacgccttcacagaacggttatgggatatcgatgttatatttttaagaaaaattgtatcacgaatatttttgagaaaaaaattaaataaacagtatattttcaaatttgactatcgccgaacggcgatggtatcgatcgattcaattcccaatctttggtttgatttccgcatgtggctttgcccactgatcctccagacctccaccaaccaaccccaaaacaaccggcgacgacgaaatgacaaaataaagaaaaaagaaaagtgccgtcgcgtacgaaggcaagctatctacggtcaccccctataaattcggaaagaggcgagcgaaagacgaaaaaaacagcccgaaaacagaagcaatcgcgacagagaagaagagggccattcccttcgtcctcctcgtcgcctccgctttcccaatccaccatctccccccacctaaatccatcgaatcatccgcccccgaattccgccgccgacgcggtcgatccctccccggccggcgcatggggatcgggcccaatcgccgcctctcccgcccctcatttggggttcccgggatttgacggctttttgcttgcttgagcgcttgcttgctgattcgatcgggtgggaagatttccgtgcctgcctccggtggtggttcgatcgggcttgggggggattgatgggtttgctgttcgtggagtcgctcccggggccgaaggtgttcaagtgcaagttctgcggggtggactcggcgtcgccggacgccatcgtgtccaaggagttccgcggccgccatggccgggcctatctcttcgacagcgtgtaagctgggctatccatccactatttccatttccccctctcttttgattattgcgtttctatgcatgacagtgacgcgatcgtggcaatgtcgctgtcctggaaaggattagcgtgtccatggacggggaattgtggaattgtcttgtaacagtgctgtttaatgatggatttctcgcgtattgttgttttgggatgggagggaaaacggcggtatcttatattggtgcaattaagctagattgcaagcgttcggaagtagattcatgatgtggttgtgttggatttgatcagtactgcgtggctagggcataagaggctaataagagctatgcaaattatgttccacatgataaattgtcttgttcttaatttttttggtctgtcaatctagacacagatggaactgataggaaatgccgaaatgttgatggctagtgttaagctacagagctatagtttggagattaattagccacaatctcttgttagatattacatgatggaaaacaacatcatgcttggtaaagaatgaagatgaacagagcaaggtgtgagttgagaacttaattcattgtagctatgtcaatctgatatgttgcaaaggtggctcttatcttaaacctagtaggacaagggttcatgtactaatcctaataggattttggttcctgcttctatttggactatgtatgccacaatacccaatccagtccagtattgctgctcacaaaatagggtatcagagtataacatgctattatatagtttttcttagtctatttttcatatctttgtaactgacctactactggatgttaaaggcatgcgaaggttatgttttgtgaaatcagttgaacatgtaaaccatatgttgttttctgaaataggcaagcaatataccatgtacttcgtttgtttaaatgaagtatccttgtctggcgtttatttttgtccgatccaacaaacaaacatgataattagggcaatgttgttaatgttgcatcaatttacatcacagtattagttaaggcataattggtcattcaaattgataatttgaacaaccactctcaaccaattcttgtttacatgttgatccggagtgaacatgacatccagggtgaacgtgagccttggtcccagggaggatcgccttctcatgactggattgcacacagtgaatgatatctattgtagctgctgccaacgactccttggttggagatacgtaagttgccagtttccatgttgtttagtgagaattcatttgaacactacaaatgtaggacggtctatgccttcatgatggtcaacctgttaaatattcgatactttatctatatctggataagttaatgtcctaacagaagactgtgagagatttgactaacttttcttattgagcatgatcatatagcattcatgtcttttgaaacaataggagggtagagtttgctacataatgtatgggaatctccaaggcataacctctgcatttctggggagcacataactaagaattatgttggctatagattgcatttttgctaagagccaatgcattaccttatgattcatgggcatcgactggttgtcagactttctatttcctggatctctttcgtgttatcatttctttgatgtgtaaaactctattaatactatatgccttaattgtgaggcaaaatgggcagcaggatgtggctatgctttctgacacaagacaaacatgatctggtttttttgtttcctcattttcgaaatttgatgttgtcagttgagaagatgcatgatgaatccatgctccatggtgcattaccggtagaagtctaacaagctatcactccctctacaaactcatctatgctcgtaggcttttctgttagatcatgtttcatgagcttccatgcggcactttatcgtttgaatgcattcttctgcaacactcaaagtaggtagtaatgcttagtgttcaagtcgtagcttaaacctgggactgtccagatcttaataatatataccgagactagtcgatcactaccctatagttctgagctttataaattaagtacacctcattttctaccactgtgtagtttatagttattttttcctggtgaatttttttttggggaaaaaacaatatgttgcctatgttatgtggttgggaacatctagtccatagtgggtcttttcagctaaggagcatatgatcaatttgttcctccatttctcccttagttccatggtcaggctgccctttccacaggaatcttgcaaattgttaacttaatatgagatttttattgtttggttgcatttgtagtgatgatttcctccaggagcattggctggatgttccttcatgcatgactaattatacctctaaacacttgctactgccagatggactataagaccaatcctgggtcatacacacttgggcatttgatccaaatgtcagcaagtatgagtccataagcgtgaacgaacgaatatgctctttaatgttcatgccatttctctcatgaatgttggttattttttctggatcagtcatcatcatgtaactgtgctcattgaacaatatgcaggagaaagcttatagtgaggaccagaagtacaaagaaggcaagtatatattagagaagcacatgatgctgaaagaaggatagtgattggaaaaccgctgaactattaagtctgcaaatgcaggcatatgaaaccatgtaaaatatcgctgaatattgggtttcaattctccccaaaattgattatctggcgaggaccatcgtcattaaattgcatttatgaaatataatgtcatgtgaaatccactgttctttcagctgaacctctgaaaacttcttgacagtttgcttggttaaccccattcatgaaagtttgcgaatggggagacggttcaatcccattcttgacatttgtatattttgatctcaatcgtcttaaatggccaaggatgggattgagttgcaacctttgactctttgaggcctgtttggtcggacggattttttttttcgcgaacgctctcataggcttgctgcctaaaattgaattcctacatttctaacaagctgcgagcttggtcagattagctcgaaaactagagataaagttaatgtgttccctagcatttctattctgggaatgaccgcatgagcagaacacttggcacaaatgaaggaacagagcggagaatcggcacgcgccgcctgctacgttgatgcatccaaatggctgcattctccgagacgaatcacgccgaaacagcgatcagatcgcgacctgcgtaagtcaaacagcgctaccaacggataagattgtaggattaccgtctgataaacgcggactgcacgttgtgcatatgtcactgcttagctagctagtaggctactccctccatccccatatgtagcaagcacatattaggactacgaatttggatatatcctatgtgactatgttcagattcgtagttttaagacgagtctaattcatatgttcagatttatagtcctagaatctatcctagattgttatatatcgggacatatgagggtgtagtactttggtagtgtttgaatatcctgaagatgaagatgaagattaagtgttttatacaaaacgaggttataataatgtgtaattaattgagttttaattattctaaacttaaaaaatagactaatatgatattttagaacaattttcatatagaaagttttcgtacgaaacgtaccgtttagcagtttaaaaagcgtggcacgagtatccaaaatttaatccaatttttgttggagaaaagaacatggcctttactccattacttgaattttcatctaatatcagtatggcgtaaagtattcgaaaatccctggagaatggatgagcatttggtatctgtacaatcgcctctgagtctcctctgacctgcaccatacccggcctacctcaccttcgccttcctagagagcactggccgtcggcttaactaactccagatcgagtcccatactcccatgggccatggcccatccgtgccacgtgtcgcatgctcctaccggcgaggcgggcccaccaagcttggtcaaccctccagtccgccgtagaccgtagcgctatacggacgtagtacgagtacaaatacgtcacaggcttgtactcctataccggctctgcctggtgcaggcgcttacctgcgggtggcccaaccgcgacgcaccacgcgttcacacggccacgtcagcctactacgcctgtctccgcgtataaatagccgccgcccccgatttcgccgctgctgctaacctcgccccactttccccgcctcgggtcgcgccgccgcgtccccgccgcgccgcgacgcgacgcaacgcatgccccccaacccgactccgccgcggcgcgcgacgacgacgacgacgagggcgaccagcggcgtccgccggggggaggaggagcaggggggcatggcggtgtcggcgtcggcgggggaggaggaggaggcgttcgaggaggtggacccgacggggcggttcgggcggtacgccgacgtgctcggcctcggctccgtgaagaaggtgtaccgcgggttcgaccaggaggaagggatcgaggtggcgtggaaccgcgtgcggctgcgcgcgctcgccgaccgcgacccggccatggtggagcgcctccacgccgaggtgcgcctcctccgctccctccaccacgagcacatcatcggcttccacaaggtctggctcgaccgcgacgccggcgtgctcaacttcatcaccgaggtctgcacctccggcagcctccgcgagtaccgcgaccgccaccgccacgtctccgtcaaggcgctcaagaagtgggcgcgccagatcctcctcggactcgaccacctccacacccacgacccctgcatcatccaccgcgacctcaactgcagcaacgtcttcatcaacggcaacaccggccaggttcccccccacccctcattactgcatccagtttcttcccagattagcagatttgacaagctcacctatcccaaaaatttagggctagaattaattacaatcaaaatcatgataacgttcgatctgctagactatattaggagcaaagcaatagcttaattaggcctttgaactgccatttttctttttcaaaatgaaatgtttgaaaactgaaatggtattcaaattttgaattggtagacggtggttggaggga

SEQ ID NO: 4599 - DNA, 26366 bp, Oryza sativa
ggggcccgggcacgcagcgggatcggatcacttaccgatcggctgctgcggcggtcgtcgtcgtcgtcggctgctgctgctccggctccgccggcggcggcggcggcgagaagagggatcgggggcgcccgcgtcgccgctcctccctctcgatctccggcgcggctaagatctcgatgcgggcatgggaggagggggaggaggaggaggcggaggttggggggatgttacttgggcttcgacgcttcgtctcctcctctccttttatcgaacttttgctctccacctccctccctccgctcgctcgctcgcggtgccgcgatgcgctggtggatggttgttttgggttttttacttttttgcggggagaggccaaacttttttattcggcctccggaaccctgcaattgcggtgctcgcctcgattgggaaagcgggggaggagggtggggggacgcggaaatggtataaataatggacagcgggggcggggcaggtcggcctactggcccctttgccgcgctggacgcgacgcgactctacgtggctggaggaagaagacgacctcacctactgctgcttccgccgccgccgtcgccgatgctgccgtgaagcaatctcgctcgctcgctcgctagcggcgcctttaaagcaggggaggaggaggtgacgccgcggcgcgcgcacggctgtggtggggtgttgggtttgcggcgagcctgcggcgggagtggggccagtagcagtgtgggggcccaccaggcagtgaataggagtaggagtatactgtatactcctccaggagtttagtacgctacagaagggggttggttttgttttcctggaatagggagagaggtgaggacgtggagggatgtccgcttgaacaagctccccgcggacaggacgacggcctgcacgtttaaattgcgtgggacaacgaaaaagtggggatttttttgaggatttgaacggtaaatacaaatgtttagctccatttggaactttcaaaataagtttgcagatggatatgagattactcagtcggagatactccgtagatgagaaaattatgtatataccataaactgtaactagctgggtggtcggcgcaattgcgtggctagcacccaaacaaaatcatatatttttttagtatgattttacttaaaatttattaaatagctatctcactgtcttaagactttgaaagaccaaaccttatcaccctcgtgtttctaattataaagtttttaaaagtcacaccagttgctaccccttatgtcatctccttctttatttgcttgctcaatctactattatttctatttattcttcttggaacctttaaaaattagattttatagtttttagagtttattgtcacgttgagtttcgtatttataatttctagatgttccgtcaaacgttgccattatactcctctacggcccatccattgtttcttctctttattgtcattgagattttaaaaatcgaacataattatcgtttgggttcattttttactttctagaagtcccgccaaactgtcagcggctttgccattgtactcctctacggctcgtccgctgcctcccttctttattgtcattgagattttaaatcgaatataattatcattgggttttttttactttttggaagttccgaacctttaaaaattagacttgtagttttattttttataatttttagaagtcccatcaaacgatgccattatgcccctctatagcccgtccgccgcctactctttattgtcattgtgattctaaaaatcgaacataactatcgttggaattcattttttattttctagaagtctcattaaccgtcggcggctctgcaactatactcttatacaccccgcccgctgcttctcctttttattgccattgagattttaaaaatcgaatatgattatcaatggggtttatttttttttactttctagaaatcccagcaaccgccttacttgtttgctttacggcctgcctgacatccctcctttttttttagaaacacagtacaaatataggcgctcacaacgtgcgcacactcacccctatgaatgcacacacgcacaccctacccctatgagcacctccgaaagactgggccggcatatcttgacatccctccttttaatcgtcattaggattctattggtgttttattaacaatttttatacgtcgtctcaaccgccaccactctactcctttgtaggcctgttacttaatttatctcgtcatgtattttagatggtcttattttttaatagtctttatttttatcacaaattttagttatttataaattatattcctaattgaaatcttatttttctttttctaatttcataatttattttttaaaaaaattagttaataccgcattgtgtactttttaatgtttttattttttatttccaattttagttgttttaaaattgtattcctacatgaactctgttttaatttttctaattttggatattattttattttttatttgaaattttaattaatctcgtattgggttcttatatggattcttctttcaatattgcttatttttaattccaaatttcagctaattttaaattgtatgtctacttaaactcttcttttgttttcttttgctaatttcggatttatttttatttttattccgaattttaattaatctcgtattgggttcttatatggactcttcttttaatattccttatttttaattccgaatttcaactatttttaaattttattcctacttggactctcctttccttttctaatttattttttttatttttattttgaattttgactaatctcgtattgggttcttaaatggaaacttcttttaatattgcttatttttaattccgaatttcagctattcttaaattgtattcctacttggactctccttttctttctaattttggattttattttatttttatttcgaattttgattaatctcgtattgggttcttagatgaaaaattctttcaatatttcttatttttaattctgaatttcagttatttttagattgtatttctacctggactctcctttccttttctaattttggattttattttatttttattttgaattttgattaaactcgtattgggtttttatatggaaacttttttcaatattgcttatttttaattccgaatttcagctatttttaaattggacttctacttggactcttctttttctttttttctttttcttcgattaatgtaagaatttctagccccacagcgaacgtggtgcctcttttcaaagctgttttagtaatataatagatagatgccatcatcaggtttgctaaaattccactatcaattcatgggtgttcgatacaatgttattttcatccttttaagtatttgcatatcgttttgactctatttctcactacccatggctccatgttttctctcttctcgaaaactggtcatctcgtcattgttttcccaacgagctgaggtaggagtgtgtggcccactagtgcaccgcatcccgctattccgtagccgcatcggcaccccgcctcagcatccatcgaagtccgccgtgtcgtggaggcggctcatgctcccctgtcgtcaagctgggacgcatcctcctacgggggtgcatcctccagagcggggttgagcagtgactagcgggcggcacaggggtgagcggccaggcatgccggggcggcaagttgtcctgggtggtcgagtctggcgcttgggcggcggggacgtcaaggaatccttgcatcactctctgctgagccgcttgccacctctgcctcctagttcgccactcgcattcatcgtcgtctcatcgtttcctcaatcaatttaatgttgctcctttttgtttcttgcctcgatgacggtggttgattcctctccactgttgcctcgacgtggtaggacttctttttttcttttgggtcttcggaggaggtgtgtggatctttcgacccaacgatcccttccatccatgggcttgttgcggcagcggtgaggtggggcggtgttggcgtgtacgtggctcgctgcctcagccaagagaggaagaaaaacgtgagaataacaagtttggttcgatggagaaaagaaaaaggaacaacctgtccaggtccaagggcaactccagtagaatacaactaaaaagagtgcaaaatcatttctatttatataataggatgaaaacaacattatacggaacgccctccgattgactatggcattttagcgaaatccactaagtgatggcattccagcgaatccactcttttacgatggtgcatatgcaaattttcgtggatagactgcatcaattagttcccctcccggcagggagactcttgcctataatcgcaaagtaatatgctattatttccaaataagtgttaattcaactttatcaccaacaactcttattaaaatggttaaattaagaggatgggagttttaagtttttcatagcttgaaacaaagtgcgggattatccactattaaaaaaatgaaagttttatgtttatgattatgaattagtataatgctacacactttggtattattgtatcctttgaagtatttatttttctaaaaaaacaagtgaatggtcaaattttgaggattagtgttgttaggtgacaattactttaaaacaaattaagtatttgtactccttgttcccattctcttcaaattaaaaacagagccactaccattttttgtctttaaggtatataatgtaggaaaaaaagaacatttagtttaatttgaaatattttaacaaatgagagagctaatgatccgcatataaaaatggtcatgtttaaaggagcttctagcaactacgattttatagagtcttagactccaccaaactatccgcattattatccaagattctaataatatatagtagtaatagagtacacaaaaaattaacaaaagaacagaagttgagaaatccagctcttctacattttcaccatatgcttctcaaaaagtcaaaatttgagctccccgaagctcgcgaattggtcactcatgacatcacgtgattccacccatcctcctggatgcgcaattctctgcctcccagctcgctactcgcacattagtacaacacaccgagcatcaccttcctcactgcttctagcttgtcgaagaagtgcgcctcctagctcgcccacctctattgagcttcactgcctcggcttcgcagctctgttatgctcagttgcgtctccttctctcaacaggccggcctaccactgtctcacactccctaactcgttgtcaacgagttccgaccttatttccctacatgtatgccccctctccttcacctgggtccccgaccgggttccgaggacccatcggggttagggatggggcctggttttccttgatgtgccccgttgtcaccactaaatgagatgcttagtagagaatttaagttatttaaaatttaaaatttgactactacagagactaaaaagaatattttctctctatcttagtttttttttctaaatacttatatgataaaatgaaggggagtacaggcatatgtatgcagtgttcttgtttgtgccatgacgatgttaccaataatgctggtggtgagagaacgcatagtatatccagcttgagaccgttgtaacttacctgtcccacaaatcgacttaacaacaataactgagtaagcatgtgatgcgctaacttcgtaatgtatcataattagattatagtacaagaaggggtgtaagggcctatttgattcagcagtttttgtacgctttccgaattacgaaataatgtttttcgtaaaaaatttatataccaaagtttcttttagaatcaatttttttaaaaaaattataatactttattcttaattaatcatatgtgttactgattcgcttatttttcttgcttacgaagccgacatctcaatttaatgcggctaatgtaaatgatactatatgttaattaatgcgttcattttggtgccaagagttattcacggtgaacaaaagtgtggaatttgttgttggagggcctcttattatgaagagagaacctattccatgtcatggagtttcccctagttcaacaatttgccagtgtttctcctttctataatataccattaggctgtgttcggctcttctagttcccatcatctcctccctagttttccatgcgcacgcttcccaaactactaagcgttgtattttttgcaaaaaatttttgtggaaagttactttaaaaaatcatactaacccattttaaaattttttagctaatacttaactaatcgtgcactaatccatcgctccattttccgtgctggagagaacccttacctaagaacaccgcctaagtccatgaacaatattctagctattcaaccacgtacctttttaaaatttcccaaaatgcccttacatatgttaatatgtattatgaataattgattgaccggctaaaagttccaaaagattatggacatttttgtgtagtctctttgcatgacatataagtggttgatttacattaaaaacaaggaaaaaaatccaaataaccccataaactttggatagaaatccgtctagcaccctgaactttgaaaccggatattcaacccctaaactttgcaatgccgtttatacccctaaggtagttttgaaaatttgtatgtaagttagatgggtttgaccacatgacccacacgttagacatatatattaaaatttcgacttaaatctatcttttactctattagctttcacttacaaataagtaccaatataataatagtataatctcactatataaggataaattgataagttataactgattacaaataagtaccaacataataatagtataatctcactatataaggataaattgataacttataactgatgatttgcaaatatgttttattagttattcaaagttgttcgtttaagcttccaaaaaatatgcaaaaccaccatataaagccactttaggaatatgcaaaaccaccatctaggggtgaaaacgggtcgtgttcggtcagaccttacccttcccatatcctaacccatattttataatcggaatcgggtcggacacagatagtgctgaatacggatacaaactcagataatgtcgggcaaaaatacggaacgaatacgtaccaaaatggatacgtacactatctcggttacaaatatttattcggatatcaagtcgaagcaataatcttatatatcacatagacaataactattcaacaattccatatatccataatacgattatattaggctattaggacctttgaaaataaatagggtacaatacatcatagtagaatcaatatattgtaccaaaaagtgcctcacaaaaacataataggggtaagagatccgtataactatccgggtaatacccggattttttaccggataatctaaatccgttgaatactacgttcccgaacatgatcttgtatccgtcaaaaaatacctattcggacccgatatccgtgaaaagtcccgggtacccgaatttgtcctgaaataatgtgatcacggacgggcgggcgggaaatacccgccccgttttcacccctaccaccatctaaaaccactttaagagggtaatatggacagtacagtgaagttttgggggttgaatatccggttttaaagtgtagagtgtagacaaacttctatccaaagtttagcggggtatttgtactttcctaaaaacaacaacaaagaatattctatatagcatatgacatacacacacatatataatattttataaaaataaggtagtgatcgaaaaaccttccaacttactccctcagtcccaaaaaaagacaaaccttgggtttccgtgtccaacgtttgaccgtccgtcttatttaaaaaaattatgaaaaaaataaaaaaagacaagtcacacaaagtattaatcatgttttatcatctaacaataataaaaatactaattataaaaaaatttcatataagacggagagtcaaaagttggacacggaaacctagggtttgtcttttttttggacggagggagtagggacgtatactcaaacttctatgttgtataaggaggctacacaaaaatatttctaattttctaaatattctagtaggataaataaattgtcaaccttatatgtttataagggcatttctaaaaaaacatgttccaataatatattgtagaaacattgataaactaagactaggttgactgtaaatgacgtgtcagattttagagctactagtagttggctatattattaaacttgctcttagctatttcatttctcataagagttaaatttagaagaggactataagtgggtcccatcaaataataaaaacaatatattagatattccctccgtttcataatgtaagtcattttagcatttcccacatttgtattgatgctaatgaatatagacatatatatatctatctagattcattagcatcaatatgaatattggaaatgctacaatgacttacattgtgaaacggaggaagtatctcatatgcatagagagagagcgtaaggagagaagtgagagattattattttatcccttatggctaccgatatgcatatggagagagaacttactatttatcatcctctcaaatatatttttcatttccgtttgtcagctgggcccacgtgttagcccccttctcattcgttgagtttgtggacccgtgtggacccagaaaggaggctaacatatagctatggactaccaataaactatatgcggtttatgctatctactattattacattgtggatgtcctaagaggtgatttgtgtattaacagtgtagtaggctattagatttgttgtaaatgatatattaaattttacataataattaattatactattaaatatctactctatagttcaacaaatactttcactcattcttccgttctttcattcatcgctcaaggttcagatcatccgcctaaaatccgaacggtccagatcgatcctgcctccacccccctcaatcagcgcaccgctcccgcacctccgccctccgccagaacaccgctcccgcacctccgccatcaccgctccgctccgtatcagccgccgcgccgtcctctgcatcgcctgtcctccgccaccccgccgcacgaggtgctcccgtcgccaggtagccgccgcgccgtcatctgcatcgcctgtctccaccgatcccctccgcacgaggtgctcccgtcgccaggtcgccgccgacgccttccgcggtgatccgatctgccatcgaatccccgccgccggctcgtcctccaagatccccatcggcctgtcctccgcctcctcgccgcacgaattcctcacgtcgccaggtcgccgccaccgatctgctccaccgatccccgccgcacgaggtgctcccgtcgccaggtcgccgccgacgccttccgcggtgatccgatccccgtcgcctgtccgcggtgatcagaaatttcatcgcagcgcctccgccagggcagagcagttgagaaggtatgggcgtctgatccaaaatcccagacatataccatgtgatgttgcaacccactgaaatcccagatagaccttgaacactcaagattgacatcaccacctcttgaatgttacaccatttacttttatgcaatattatacaagcagttgcaaacgacggccattccgttaatcttgtgatcataattgttatgacacccacacagtcttttgtttctatataagaagatcaatgacatattcatctgtcatggcaggtagaatctccaattcaaggggctctgcgccttgttcctcaacaagagaaggtgaattttccaactgcaactgcaaatctttcatcaggctgtcaagtaaacatttgtactggattgaagctgcacctacattatcctgttgcctggcatattcgtgtgtttacatggggttgaggtagccagtgttgatatagatatatgcaaactagactcgaggatgctgaacatgtttttttttttacagttagttcagaaatatttaggtttcagcattgaacgaggttgggtttttcttcccattgaacaaaaggcatctgattacaatttttctaaaaaaaattatttaggaagttctttgctttttttttcctcaacaagaaaagatggttagcattgagtcataaacttagaggtacaagttgctcaactgctaaggtctgttttatacaggtataatggcaggagaaatgtcaccaaaagaaaattctttctgttgattcacattattttccagttaaatgcgttcatcatttacccatttatttggatcacgtgcattgtcatttgctgtaatttactcatgtcccctaggtaactatattaaacctaccatctttccgaattgaacctgtttcatgtgtagttttcagtggtcacctgttggttgcttccattatatcacacagatttccaatctgactggtaatattgtgagatcatttttttttgtgtgtcatgttctttttatcagatgtgtcattgctgtacagaattaatatataattctcatgtgaacccgttggttgttgttcttttattagttgtgaatttactaaagaaaacatccaaactgaatgacgttggttactgccaaactgagatcaagaaatacatctactccagtagatgataagtccacctattggttcaatttaaaaaatctgaatttggcaaatttaagaaattggttcaatgtacgagcagcatcatatttcaattactgacatactcgactgcaaaactatttcagggctaaactgaattggagaaagatgttccgaagtactgtgataagaattcaaatagtgtgaagtgcaggaaaccaaggaggtatcgcttactactaattcgctcttcaacataacctggtgcttatatattggcatggttttgtacaatatatagtaatcaagattcaataatccgagtatagaagaaaccttgctgcacaaccatattgtggtgtattataacatttaaattataatattgtttggcgacatgatagttaattgtacccatcattcacgtggtcgaatctgctcttgagttattcttttagtcctgagtttaaacatggtgaggggaatgtaaatgcagtggaggaaatcgtgtatttaacattgccaaattcaggtgccattggcgattaacatcctatgttttatttggtgcgacattaattttgtctagccacttacgatgtgaaaaaagagttaacaatgtaattcagctgtcaaggttatttcggtcgtcctaacgtgtcttgtgatcctaattgttagaggataggtcctttttttattacttggttttaaatgactccgtaccgttaggcagtttggattcatcattttgcatatcagccataataagctttaggctcctatttcagaacatttcaccttgattggatagatgttttgagttttatatgaaatgccactgttcttcgagaatttgcctcaaattaactgctaagtttgggttgtacatgtaccgctccaaatataactattttcctattagtaattataaaattattctcttgattctctgatgcctcgaaatattaattagtattttgcaccccgcaatttccaacagggatccagtccctgttcgctgccgcccctcatctccgcatccacgccgccagatcgccgtcgctcggattctggtacataacgtcgccaatctgctctccgctgcacaactccattgcatctctcgccagtctgctccgccaacacgctgttccacctcctccgcctcaagcgccaccacgaccaacacaaatcccctacgccagttaatttttaaaaaacattgaggtacatatcaaattaatttttattatgtagtcatgtgctcatactacatactcatcaaaaatacataaaatgtaaattaggtgcgcatggacgcaaatcgggaggacggtggagctcgcaaatccctcggagatataacaaaccaccgtcaaggtgtacatataatggatagttcgttgtgtacaacgcaggtcttgtccttttcagtatgactatagtgttaataaaaaaatgcaggtcatgtggatcaatttgggctatccaatgagtctcagcgtaaaaaggaaagaaacttcaaacaacgtatatatcgtgcaaatctggaggctaagaagaaatgtagtacaagtcctatgcaaacaacgcatgtgtcagagtatgaagaatgtgatagtgccgaggtcaatgttgctgaaattgccacctcaacaaagagggaaaaaaataacagctatctacgtgagtggcgtgcaagaaatagagcaaagtcgagtgttgttaatagcactgtaacatccgtcaatccaactcaagcaacaactacatctgaaataaaccagagtgaagggggtgtggtagggacaagtgaactttctgcaaagaaaaagagagaggatacaaacaagtatcttcgtgaatggcgtgcaagaaagaaggccaaatcaacagatggatgcaatactgtatcttctggcacgccaatgcagtcaactattatgacccccgaagaacacaatgaagatggtgctgttcagcgatcttcaatctaccctatagttaaacaaatactttcactcattctttcattcatcactcaacgtccagattatccccaagagatctaacgtccgggatagcatccgccttccctcacccctacgcccccgaaatcgtcgcactttccttccaatcgcgaaatccatctcctccgccagttctctcgcccatcgcgcctatgcacgtcgccgcccccgtcgtctcccggcgctcgcgcccccacccgccgtccagaccgcatcgcccactccgccgtcgcacgccgcacaccacacccgccctcccaccccgccagttgtcccctccactcaccactccgccgttcatcgcccttctcgctggtctcctccgcaccgcccccgatcttcaccaggaactccgcctcgtcggtctcctccgtgccgcccccaatctccggctcgtcgactgtctccgtgcaaccaccaatctctgctttcagaacagtgtcgccccatcctcgatctgattcgccgaaattaaggtacagaaatcatcctccctccttttttttaatccacaatccagtactatatatatttcctctccccccatcagtcgccgctgatttgatcatacgattcttaatataatccagaatcaatcaaaagaaaaaaaaaccgaaagcatcgttttggtatctaaagaattcatgtttttagataatgataactaaagtatctatgtctatgaacaacgcataactgtctgcacatgtctaaacatctccaaagaacaatagtatctggttatttaagattttacacatttcagaagtcaaaccttaaaattcgattttcactggcaatgacagaatatttaagatgatgcaccatctatgtcaattatcagtatagtagagattcattccttgattaatgaaatcaccatcaccatgcatatgttaggacaatccaattgtttctggattcttgacagatttggtcaagatgaacttatgacttcagtaagcttttgactaattctgtaccaagatggttcatttttaagcaaagtgcaataagcttcatgaaacattgcaccaccgtaatcttcctcatgattttcttattttgctgtataggattagggattattgatacaacatccggcaacctccacctcggggggccacaccggcgccgccgaagcccaccctcgacatctccgtgccgccaccgaccgtcgaggacaacaccagtgacaccacgccgatctcctccgtggccactacccaccggcgctgccacacgcaccgccaccaccacattgctgcggcgtctcccaacccatgttcgtctcatctccaccgtctatccccaaactgtatgaaagcattggtaaaaagaaaagaatataagataaaattttacaattttaaagcatgaatacaaatggaagggtggtttttctttagtttgaatccttcttacaactggaagtgtaggactacttagggaaaacatttttttctctataaatgcggtgctgcttcatttactttggtattatcggatgattcatttcaggagactgcataatgtttgcataacattcattattccaatgcaaaacaattatgttaatattaaaactcatggtaggttcctggtccaggttagaataccaatttgcaaaccggaaaaaaaacatgaacatgtttataagccatagcccttatccgtacatagaaacttttcttgaggtcttctgtgtcacatatatcattacatgcaaacaacaaaaggtaacctccagtcttccagtattattttgctccatagcgaattagccatctactcatatttgccttgtacttatggataaccgtgagatgttcaggtggatcaaaccagaaccgtggtttcaaggtcagtttctaaacctcaagtagcagaaaagttggtttcttatattacaatgtaaattattttatttattgtaggatcagtttccatatgctataaccatgggagctctctcagttcgcctaagttgtttgtctagaagtatgtcactgctttggttcatcaattcttttgtcagttcattggcagtagtactttggatgacaatgagattggcttggaaaaattctgcctttgagtaggcagcccagaacagatttcccctgcaatgtattagggatcacaaataatcacgcacgcgggatcaccgctcggtttcctttcccctccgtcaaatcgccaaccactgcagcctctctcccgcacctcctccagatcgcaaataatgctttattttgttcccgcaacaaataataaaataacttacttttttaacataatagcgtattatatactgaagtgattatataaacttaattcttgtaaagatttattgtgcccatgcaatatcatattattttattttacgttaaataagtatatttaatgtacgacatgaattgaattaaagttcaaatacacatatcatataaaaaaatttccgctaacatgaaattttaataattattaaagacaaatagaattgcaccgtaacgtttagcacggacatattactagtaatctattaaaatacaaatctaacctgccaactattatagctcgccggcataatagtaggtttgctgaattccacgtctgcgcctatccatctttttcttcggattgagaccacgtattcagcatcagcaatgctaggaaaattcaacgctgggcttttcttgagagggacagcatccgttgcaaatttttgttgtaaactacaccctctcaaatatgtgcaaaattctgaaagcaacttctaaccatctaaccattgtgaaatgaaaaaaaaacaaaaccaaaatattttaaccacgcaatgtaattttacttccagtacatatttttaacatatcaaacattcttattattgtttaggacaacagtacctttgggataaggagagagaaactccaataccataatgtgtgataaatctctgttttatgggttcgatatacaagtggtacatctctatcgtttgaaagggacatatacaagaagatttttgtattttcctagtcttttgcctaatgagttcttagcaggccacccttttgggcccaatattgtaagaggtccattacaaagaattagggcaatcttacatggctaacttctatggtcttcgccacttctgatggtatcatcggagacggcgtttctcgtcacttccacgtaggatcacgggcgggcttgttcactttgctactatttacaatcttattttttttcttggtaaagttacctaaaataatagctacatttaatttgttgctaaattttaataagtacatatgaaatcttgctaaaatttgacaaccttaccaaaatttggcaatgccaaaacttgataaggttgaaaatggtagcaaaatgaacaagccccatattcatgtttttctaaataatcatttgggcggacatctccttcttttttcaatgtttcagtcaactttttttacacttgcattcctttgtttttttttcgaattagttccctcccatcagaaacaacttttttgaaggaaaataaacctttttaataccgatgaactatacagatattcagaattttcgacctaagaaaaagtgctgaccaggccacctgacagtaactacaaactactcttcaattcttcagcattgccagcaacagcaatatgtacagactacatagtaccctgctcacatactactaccacactactactcgtagccaaggttcacagttcatcaaacctttggtatgggttaccgtcacccgcagtttgacggttaccatggtaaccacgtggttatcgtgaaaaccacatggtcacgtgataacccagtaaccgtacggttttgtaaacatagcagggtttacagtatgatctgcaatttcttttccacgtgtgtagtaaaaatgtctcgtcatttttttacctctcgctcagtccctcgctgcgtgcttcgttctacaggccactgagctgagctgctctgcacttgccctgcacttgctctgcttccccctcgacgtcgacgacgacgacgacgacctgctccctctcccgaacacggccagcctcgcgaagatgcgcaggatcctactcgcgcaccgccgctgcgatccccaccgcatggagccaatgcagctgctggaggacaccggcgctcgccgcctgaccgccgccgccgccgccggcgtggccgccgtgtccatcctgaagctcgcctccttccgggacgagctcttcttcacggtgttgtgccgctgcagcgtctgcttcaggggggatctcctgctccagcgcctggatcctaaagctcgccgtctcgtagcccgacgccgcgtcgtcgtcgtcgtcgccggcgcgggcgcggaccagcttcctgccgtcccgcgtggcgtgggcggtgtccgtgtacgggctgctggtgctgagcggctggctggtggggacggcggtggtgcacccggggctcggggtgtacgcggtggcggcggcggcgccgccggagacggggacgaggagctcccccgagtgcatgcaccggaacgagtcggagcactcggtgaaggcgcggtgcgtgtgcagctgctgcacgaacagcgcctgcacgatcagccggagcggcatccggtcgttctgcaccgcctggatgcacgcctcgtgcgacagcttccggcattcgaggtggccgcacagcgacgccttctcgtcgccggacaagccgggatgctcctgcaatggcagaatcaaacagcttcacaacgttagcgcgacagcttaacggactaaataatctcgtgcacgcacgagtgctctgctcgatcgtctttaccacgatgtatgtgtcgattgcttcgtagagatggtcgtgggatttccggtcgccggccggaacgacgccgatgagctcggccagccggtccggccggagcttcgggtcaccgacgatctgggcgatgtaccgatcccagagctccgcgacggcctccgcgcctcttctttgcattgagacatggctcgcgacgatgctctccatcgccctcacctccgggctgccggcgatggattggccgccggcgtcttgctctggctccggcagcgggaggtcgtccacgcgggcgaattgcaggttggacgcgaccagttcgcgcagcctcgtctggctctcgtcgctgagctcgagggtgatcgaccgcgccagcagcgcgaagtagaacgacaccgggatggcgccgccggtcgccgccgacgactcgagtgggaggaggtcgatcacgccctgcaggatcgcggtggccctcctgttggcgtcggtctcgccgtcgccggtgtccgtgctcgccatgaacttgtgcgtcttcttggagagcacccacttgttggcgtagaagagcacgacggggctgacgtacttctccttcatgccctgacgccgcagcgccagcacgatccgcctgaagaactcgaaggggagggcgacgaggtccttgatccaaaggtcgcgcgcggcgagctccttgactagctcggcgtcccaccggcgcccggcgaggccgcgcgccgcggcggcggcgaggaggcccggctggtcgcgctcgcgccgctgctcgtcgccgtcggggtcgaggatctccatgcacgccatgaacgccagcgactcgacgcagcggctgacgacaaggagctcctcggcgacggggagcagcggctggcatcgctgcaggacgatgagggcgtcgtcccagctctgcagcaccacctggttgatgtacaggtcgcagcgcgcgccgaggccggacacgtcgaggaactccgccgcgcaccgcaccgccgccacgttgaacgggtcgagcgccaccgcgtcgccgtagcagtacagcccgatcacctcgaacgcctcgctgccgccggggaagctcgccggcagctcgacgacctcgccgtcgccgtcgccgcaccggagaatcgcctgcctcaagtacccgcacctggacaccagaggatcctgcaacgacaagatcacacacactcatcaccatcttcttcctcctcatcccaaccaagaatccctaattaatcttcacacaatctctcctaaccttgtgcaggttgaagctcctgtcgccgacgtggacgctcaccgtcgccggcgaaccggtctccttggccctgcaatccaatccaatccagatcaacaaccaacccaaccatcagaacccccaagggctccaaaattccaagctctaacactctgtaccatgaaacgaccctcctctgcaggagcaacgccgtgctcgggctcgagtaagggctaaacacggcggccttcgccgccgccggcgacatctccacctccacctccacctccatctccggctccatccctcgcagattaccagtactagtagcagtagagactagagactagagagataggaggagtataaaaccggagtggtggagtgagggaggaaggaacatcgggaggagtggaaaaggggtacaatggctgagggcgcacgaatgggggacgttggagttgaaccccagttttaaggctgggaaatcggatcgccctccaccccctcgtgcaagtttccttattccctgggcgcgcgtgcgttctcctctgcactgcactgctctctcctcgccaccacagggcacagggaggcagccttgtaaagatccgagggagccagcactagtttaagcaaattaagctcgagctaacctgcctctaatggccggaatggcttatggcctcttcaggcaccatctggcctttggtatatgcacgtgttctggaaaaaaatacagtattttcatatgaatcagttcgattatcggagaaatcgagaaaaatttcatgtgtcacaaatggaggccacactttccatttggtgtgaatgtctaatgtgtgaaaagatgtgtgtatatattctcggttttgtaagtaattagtgtggtgtttccagtgtacagttgacgtctgattggggtgtccaaatttctcaccaaatggcagaaaactggatccttttgcgcctggggtcataccaagctttcagagctctgaacaggcagaacagccggtcattgttgtgtgctactcctaggcgtaaaacgtccaaggttagcaatctagcatcgccaaagcgaaggactgaaagagttgcttggaggtaacaatctccatataataactgccacgagactaagcatctcctatgattagactatctgtcctctgctaatctctctagatgggcttctttttcagagaaacttataatgaccaaatcgtacactatccggtagcataagttgggcagatagatgctcttccacacaacttttagattaaaagaaaacaagcgtgcacattgacgaacggacggagctctgaatatcatagtaggaagtatagtattatcaaactattaatcaaggtcactgtcagttcatttcaacgggcgtttcatcattcaccaggcatgcacgccagagactcccattcggactcggaactgtgaaatggtttctttaagcttcggtagcaagcaatggcagtgtggtcgccagaaaaccttgtttctcctgagtcctgacaattgcgttgccatgacaaattgacacctttgtattctcctgacgttcagaagtagctatcagattaaaaaaaaaggaacctaaaaaataagagaatatagcattcgtgtgattgcttagctgattagtgctgtaatttatgtgcgatcacactaccggcatggtcagcgcatttctgaatctaagttctgcaatggcaagattgccattgataaaggagaatgtcggtaataatcaaatcgttgacgtgcatcggacgctgcagaaggtggggaatttaagggcgtcaaatgccagtaatattttgctctggaatttggggggtatcgggaagccaatcccccacaattcttattctcattgatgcgttgaaaacttgaaatctcccgaattcttttcgtggctcgtgactgcatcgagatcggtggtgagaaatttttactggcgactcgatcgtgcttgggtttcagctcaacggagaaggagacgccgggtctgcaaggcttctcacgcccgtgactcacattttgatttttgatcgcattaaagcacccaagggcgtcgttgaaacggagagaaacaatgcaagagaggaatggacgaactctctccaattggcaaacgttacgtatcgaactgtcaatctcagagggtcagaggttaaagttaaaaaaaagaaagggttactctagattgatctggcgaaaggtttcgcccactgttttcgtcgtttcattgtatatgtttatagtgatagaattctatgtttataccattcccaggctctcatcggatggcccaataagccaaagaataagctaaattttgaattttcaaacttaattttaagattgattttaagatattttcaacgtattttttttcagcattggcttttaaattacaaagaacacatatataaaagttttacctacaaatttatttttattccctaataaaccgttttggcttattagaaaaaaagccaaccgatggggccgccaggtgcttggatgaaaataaagtttcacagtaggacatgtatgcttataattgaactactttttcatttttctctctctgttgttccataaattcatagtaaaattcgtaaaaaaaatcaaaatttataatggcaaaagagcaaaacgcttggacaaacaacaatcgatatttattacttgttcagttaacatttcacctcacttgagagttcatagcattaaatagcatgccaagtactataaaatttgcactacaattagtacaaagagatgcaagaacaagtaatggtacgaaatacaaccacaaagactccaacaaaactattttttcgctgggctgacaaagaatgccgaccgaacttgtattaaggagggagggggtaaaaatttatagactttgtaaatgctcagccaaaacacagaggatgaagcatatcgggcgtgagactgagatgcgaagcgagccctgtcataaaaccaaggcaaagtgcctgatgacctgggctcgtcggcacaatgctacacttcaggttaccaatctgttgtgctatgctaggcacctagtccagccatcttccatgtcctccgctcatcaattgtgcaatctgcgacctacagtaactagtgggtgaaggcttcaaagactcttgtgctcctttctttccagatcatccagcagaagaggcatatgaccgtgtcgaacacctggagactccaacaaaaatttatagtattgagacatgtttccaatgtgtctagacattaggtgattaattgggattgggtaataaaattgattagataggttcaactatgcactaggcgaacaacttctttaatggtgtcttagattacatggattagatacaacctattttgtgttgtatgtattgggacggctcttatagcccttcagaaaaaggaatgttttattttattcttcagtaatacaatatatagtcaattaccttatgtatttctcgcactgattgaatgagctctctcataactagaaatcttcgcaaaacatgcacttctcatgtaatttatcttttttcacaattatatggaagacgcacatgcacacatacaacacaaaatgcaacttattttataaggaaaaagtccaacttacccagtcaactattgtgatagtttggattacccgcgaactgcgaagccatacatttcacacccttcaacttttgacactagacaaattggtcggtcgacccgagataaaacacgcgacaatccaataagaaaaaaaaatcaaggaacccacatgtcatctatctcctttgtgtgtgtggaagcagttgcctctgcaacgtaggtaggtgccgcctggtgcagatcccatgctcttctcgaagcacacactaacccgtgcaaaagcttaccaccgacattgtagaatgtaaagctgcgtccgaatgtgaagccacctccaccactgcaaaagcttgtggaggtgacgatataggaactcaagctagctcggggaggcagatcttgccttcgctaagcacgtgctagaggtcgagaagtgggtggtggtctggttgaggcggatatcgtcagggcggagcttggtatgtggtgagcaggagacaacgatggtgagctctcctgttgaggtcgatgccgtcattgggcgagctattgaaaattggtgacaaggttggagaaggaggaagacgaagagagaaggtcagtggcgtggcgctgaaggtatcgatattgacacaagttgcaatggtggtggtcacctaggggatctggccacaacagagggagaggaggcatatctcgtcaccgtaggcctctacgttctaggtcaccggtgtcatggtgaggcttccttcgagtttcaagtacactgtcaatgcaacaagcccctacctccaagtctacttccataggctttttgtgagagagaaagagaaggttagagagagagaaagggaaagagaagaaatagacattgactgacatgtgggccactagatcttttttaatctagttgctgactggaataccacatcaggcaaattattgtcatatgtgtgtcatgtagggatcaaaatgctctgggttgtgttagggggtaatttgaccagattaaagagtttagggttcataatttatggttctttggtttgattggtggggaaggggaaggcgggataattcaaactgttgcaatagtttatggggtttgaacttttttttcctttttgtaaaacctttgaggacatctacccaagtcaattatcaatccagtcaaggattttatgtcattagtttccttgccattaaaatgcacttgtatgagtacacctagcgtcaataatactgtcttggttagtccaactacccaagtaaggtaaaggactttagttcccttaagattatgcccctccttagtctatatcaaccaaatttccttatagatacaactcataaaaaaagttgtgtataatcttgaaatgttccatgtatccatgacaacccaaggcaccctaccctaagatgtaggaggcctatttgggaagcccagaacccccgtgttcatccctgtggttggactgggagtctgggagcttgaacccttgtggatggatcggattaggattttaggcctcccaatcgagcccgtaaaaatcatttatatctgcctttagaatgcctacaattgaccaaagatactggaaaacacatactcctaggtgcgaacaagctgacatccagaaaattgaggataaacaaagatacagcaggataagtccttcagaatccataggtgcgaacaggctgagttcgaatgattcttcagcagatgcgatgccccacacacaacaccccatcacctaacgaacttgaccaagagcaccaaaatttgtggaatgtgcatggatacggcaatggcattgccactgtatccgatgtccaacggcaacatgataaccgcaagctctaccactactccacacaagcagaactgcagaagacatgtatgcgctttttggtggaaaatgctttccttcaactgaattgagctatccgtttgccagccgtctcctctctgtacaggttgtcggacagcctgtttgcaacggacgctacgtaccccgtcgtgtttcctgaggcttgaagcaaaaaaagagcagcgcaaaagaggaaaagggcccgagatatctcagatattgattgggtctcacgtctacatccatctgattttagtattgaactataaactccagcatccagctcatggaaatctcacacctttaatttacaaccatcctttgaaaggattgtgacacatttgacacgcaaagccaaagccaaatacagctcctcatcttccatttctttgaagctcatgaatcaaatcagtacaaaccaaagaacaaacagtacaataaatactacagtactagccactaattaaccacatccaaagctacaggctacagctcgagcgccggtgagacatgaacctataaacatttgctactcgctggagcttaattcgtttagaacgtttatttgtttccaatcgaattcacatacaataatttctagtactacccagctggttaacaggctagccgagcgtgccggtgctatcgtcgtcgtcgatgccggcgaagaaggggtcgcggaggagctcggcggcggagggccggttccggggctggccgatgcagcgctcgatgaaggcgcggagctcggggtccctgatgcgcttgagcgcggcgggggggacgccccgggtgacgctgtggtagatctgcacgacgctgtcgcactcggcgtagggcatctcccgcgtcaccatctccagcacgcacatcccgtacgagtagatgtccaccgactccgtgtacgtctccgtgtacagctccggcgccatgaactccggcgtgcccaggatcgtgtgcgccacgtgggtcttgtccacgatcgccgccagcccgaggtccccgatcttgacctgcatccatccatcgaccgatccaggccgatcgagccgtcgtcgtcgtcagccacacgaccaatccaaactcgattcgcgagacagcgacaagcgaaagcaagcatggcgtgcgaaaattgcgcgacgcccacgcgatttgatcgatttgaaggggtgggaaaactagtgtgaaattaaagagcgcatcagcgtgcatctcacttgtgttcccttcctttattcgaaaggtgcagctcatgcacacaccgagagctactactactacaggtcatcacggaaaagaggcggaaagggcaaagccacccgctaatcccccgaatgccgtgatgccccggtcggtgtacatttcaacagccaataaattatactccctccaaccaccgtctaccaattcaaaatttgaataccatttcagttttcaaacatttcattttgaaaaagaaaaatggcagttcaaaggcctaattaagctattgctttgctcctaatatagtctagcagatcgaacgttatcatgattttgattgtaattaattctagccctaaatttttgggataggtgagcttgtcaaatctgctaatctgggaagaaactggatgcagtaatgaggggtgggggggaacctggccggtgttgccgttgatgaagacgttgctgcagttgaggtcgcagtggatgatgcaggggtcgagggtgtggaagtggtcgagttcgaagaggatctggcgcgcccacttcttgagcgccttgacagagacgtagcggtggcggtcgctgtactctcggaggctgccagaagtgcataccttcgtgatgaagttgagcacgcccgccgtccggtcgagcatacctttgtgtagcccgatgatgtgctcgttgtggagggagccg

SEQ ID NO: 4600 - DNA, 43593 bp, Oryza sativa
tccctcgacagggagccatggcagaaggagagggaggcaccggaggagaagccgagcgccgtcgcgagttcaacttccgccttgccgcactccgccgcaaccacgacctccagtcgggaatgaaggagaggacgatggggctgaccggagagaggggaaagggagagttgtgtgactgacgagtgggtcccacggcgatttttgcactacgctgccatgttggcataccacataggcaaaagtggcaaatagttaaaagggcacaaccttagaagggcaagaaaataagggcaaatataagaagggaatttggatatttggcaaacctaaaagtggcaaatagttaaatttcccacagatatggcatatcttcacgtatgcggattgttctcgtgtacgccgaaggaatttatttcgaattatggaaaatatctctacgagtcaagtgatttccaaagtcctgcttggtggggataaagtttatgttatatcgtacaagatccgatgtctctgagttttacttggagatcaagatgatccacggtattaaggggcccaaggaggggtgcaaggcatcaaaattcatcaccaacacacccaccatagtttacgaagccagagtactcggagctaggtcaccgggagatctcgtcgggaacatcgactacgatctcgtcagtatcgtcagtttcgactactttctttgtaatctgtggttttccatcatcaatcccatataaactggagtagggctattacctgataaggggcctgaaccagtataatccttgtcttctatttgcttgatgtcatattacgtaaatccttgttccaacgtatcccaatacccaaatcatccggtctacgagtaccactcattgacagtggcacgccaggtaggggaacttggtgctcaaggttctacaaatatgacttcaagccatcccgacaacagtaccaacaccggcgtcaatcaaggagcctctacctcgacatcgctggtttggactcaagtcgggactattgtctttccggtctacaccgtcatgccgatctcgacaagcccaatcactattgggaacgagaacggcacggctatgacttcgagaaatgacgcttcgctgacaattcctcccacgcaagtggagaatggaacatcgacggccttagtacctggaaggaatcctcaagcggccgagttctgtcctctgaacaagagaccagagccgacaaggatacccatccagaaaccgaggtcttggtgtcccgtccataagacatccaagcatactctggaagattgcctcgtgatacttcacgcaaaggctgaactctacgcctgctggaaacgtgggattcaacgcacttcaccaacgggcaccacttattgcccgattcatagatcgagatcccacgatctcacaagttgcataatcttccttaggacattcaagtcgtcgcatcctcacatcccacaaccacgagatcaatctcagtgcgttgtcgaggaacgagacgcagcgactttagatcggttcgtaggctttatcggtgtcaaccctagcgagccatccatgctgcacctactgaaagattacgagtcttcttcagactcaccacgagacgtgaacgtgatcaatggtgtcgagacaagtgcttccgcggccgcgagaacacctccacaacaactgcggaacctcgacgcaatattaagagagagcccctttgaccctgtcctaaaccccgatgtcgatcagtgggcggcacgactacgagagactgtgaccaacctcaacagcgcattcgtggatgcagcagtcgagcctccaccccaagatccaccgggagggaacggtgaaccagctaacgggaacgcggaagcgcaaaaccctactagggaaccaccggctcgagacccgactccatcgcgtcgtgaaaatcgtgaccttcatgaacatctagatgaccggcggagggacaggcgagattggaatgacaatgatcgtcatcagcatcgctctccctccagacgaggagagaacatcgctcacgtcaacaccgtcaccgttccctttcacgccgaggtgggaacgcggatcgaggaggccatcccaacggtgaccgagatcggcaggcccgtagcgaccaccaagacaatggagataacaattgagaacggaggcgaggcagcaacaacggacgagaacgtagctcccggtctcccgcctctaggcgagatcgaagacgtgaccaccgttcgagaagctgggctcctaaccctagtggaccaccgttcgagaagctgggctcctaaccctagtgatccctcgtcttcgtcttggtcatcttcttcatcggacaagcctcctcgacgacatcacaaccgcgggccacctttcgcccaaggaggcgtgtgcagagcgtttgcgcgcacattgcgagatgtgcgatggcccgaaaagttccggacaggggcgatcgagaagtatgacggaagcacagacatagaagaatttctgcaagtctactccacaattctctacgctgctagtgcatacgacaatgcgctggcaaactatttaccagacgcgttgaaagattccgctcgttcatgactggttcacctcccaccctactcaatctcttcatgggaagacttgtggtaacagtttgttgtcaacttccagggaacatacaagtgtcacgcgattgaggacgaccttcatgccctaactcaaaacccagatgaatcatagagggactatattcggcacttcaatgagtgcaggaatacgatccccgagatcactgacgcttctgtcatccgcacattcaagtcaggcgtccgagattgatacaccaaccaggaactggcaactcgaagaatcacatctgcttgcaaactatttgagatcattgacagatgcgctcatgcagatgacgccttgagatgaaaggaaggaaagagcagtgtaggtgaggagaagaagtcagccaacaaagacgcgccggaatcaagcaagaaaagaagtcgtaaaagtgggaagcgcaaaccctcgggagaggtcctcgccgctaagcaaacggacccacccaagcgctcgaacccccaaaacgacgactcgaagaagtaatggtgccctatacacaagactaacaatcactccatggaggattgttatgtcttcaaaaaggagctcgcgcgacaactagcactctagagagggaagcgagtacgtgttgtcgaaacggccgaagaggcggccactcccgactccaactccgcgttcccagagtacgacctccatgtcttgcacatattcggcggttctacatcgtacacctcaaaaagggagtacaaaaagatagaacacgaagtctgctccacgtcgcaggggcctaccgctaagatgagatggtcccaacacaagatcgagttctcggagacggaccacccgaagatcgcgaccacacctggtagatatctgatcgtgatcgaacccactattcggaatgtcaaggtagcacgggctctcatcgatggcagaagttccattaatctactcttcgccagcaccttagatgccatggggataccgcgaagcgagctgacgcccacagatcagcccttccatgaaatcactccagaatcatcatctaagccgctgggtaagattacattgcccgtcaccttcggacaagccgacaacttccgaacagagcagatcacctttaatgtcgcagagttcgataccacttacaataccatcattggaagaactgcactcgcgaagttcatggcagcatcccactacacttaccaagttctcaaaatgccaggaccaaaagggacaattactatccagggaaacgccaagttagcggtgcagtgcaacaagcggagcctcgacatggtcgagcatactcccaacccgcccgccacaattgagcaccccaagaaagtgagcaagcccaacaagaaaccgaagttagacggcgccatcaagattattccgttgtccaactccaaccccgacaagaccatcaagatcggggcaaagctggatgacaaataggaactcgcgttcatcaccttcctccgcaacaatgcaaacgtgttcgcttggcaactgtaacgccccgattttcgttcgggaataaaaatcaattaataatacattttctagaaattaaataaaatttaaatcaacttaatcaagtgaattattgagggaattaaaaatttcctttaaaaatcattggccgagaatattttgtaatattctttgtgccctaaaatactctccggatttttccgcaaattttcgaagctcaagaaataattttaaagtcacaaagatcatttaaccaattaaataaaaagaaaacaaataaaaatctccttccttcccttttgggcttggcccaagccttcccctcctctcccgcgggccgcgcgcctcctctctctctcggccggcccgcgccttgcgaaagtctgctttacgtcccccggtttccctcctctctctccatccggccgacaggtgggaccgtgggccccacctgtcagctcctacctctcgccggccaaccccaaccgccattgccgcccacgtcgccgcaaaatccggcgccctcccgcacccgagctcgcatccaacgacgtgggcacgatcccctccacgtcctccaccattttccccgctcgtcccacaaaaaccggcgccggccgagccaccaccaccccccgtcggcgccccactttcccgccggttgccgcccctctcggccccgtttccgccgctccgaccctataaaaacgaacccggagcatcctctctcttttcccctcctcacccgagccagccgtgctctctctccccctccccacgccgctcccgcgcaccgccgctttccggcgagctccggccgcccgccaccgctgctccacccaccgccgcgccaatccgccaccaccgtcggcttcgcggcaccgtgccgcagcccggcctctactccatttcccctctccgcctccagaacaccgccgcctcgtgcaccaccacctaccgcctccggccgcctctagccgccatcctcaaccacctcaagccgcgccactgcctcggttagatccaccaccgcaagggcaagcccggccgtccatccctttttcccctccaccaccagaaccacctccctaccacgccaccctaccggccattttttttccgtctccggtcgccgttcgccatcaccccggctgccgccgcgacgcgccggccgcatcgcctccttcgccgcgtcccgctcttccccgtccgccgcccggtcaccgccttccgccgccgggagcccctcctcattgtcgacctatggagcgccgccgcctccctccgccggctgctctcgccgtcgccgtgcccctcggtgagctccgccacatccctctccctcactgcccccgtttcctctcgccgcttcctgcgctgcgcgccgccgctccctgcgacgcccggcccgtgtgccgccgtcgctttggtcccggccgccgccgccgccagccttgtgtgcgcgctggccaggccgcgccgcccggccgtccccagccgtccgatcggccttggccgatctagaccgtcgggtgcgcggccgcgtggccgatcgccaccgtggactcggtccacggtgggccgtgccgctgacgtgtggggcctgccccctttgtggacgtggtccgcgcctcaccccttgctgacgtcagcgaggaccatttcctttgtaaaaataaataataattgcgcaataaatcgagtttaattctagaaattcatttaaatggcttaaaacttctaaaattcatacctaattcattcgaactccgaattgagccattcaacttgcaaaattcatctaaaattgagctctacatgtttgtttagtttttatgtactgttttcttggtttttattagagtttttcctcgttttgcgtgccagcgtgtagttcccgtcgtttcggaagatcgcgttcgcaaggataagagttcagaagatccaagtgaagaagcaaggcaagtcacacattccccttgagcatgttgatcccaatttacaaatgttttactgtttgcaaataaatatgcatgttttgctaattacatggggtcagggttttacctatctgctcgcttgtgccatgtttacttgatatctgtcctttgtcaaccatgggtaataaatcgcctagctggtgttactttgatgacctagctagaactatatgcttagccatgcttaattaccactagctcagtcgatgggataattgcagtattagacattctagtatcttgttgagctgcgtgctcgagacatctggccattcttcagggtcgtaattatccaactaaaatgcgactgaatggtgggctgtgggtgcatggttttgctggtcgcacccatggcagttaaggaccggttcgcgggatgccctggaagaacttatcgtacttaccacaagccagcgtgggcaacggctgggcttgtagtgtagctttcctctagtcgacgcatccaggcaagggtgggcgtgatggagcggggcgggccctgcgacggtctctgtcgcttccggattcacctaggcacgagaggggactgcccgttgcccgctggggacgggggtgaaacctgaggtgtggtgtgcttggctagagggggttatgcgaagggtcctgtcacggcctctttccggtatgtcgtggtggcatgtcggcgcacggaaacgtgtcgtggggctgtgtcttgtgggtacagttgtacacctctgatcagagtaaaactattcgaatagccgtgcccgcggttatgggcggtcgaccagattcaccgtgattagtctcacacttaataaatcgacccaatacactgtagtttaggtgggttggttgggcctgttcaacgtggtgtagcgttgatcagtggagatttaaggttactttaattactcaacagttttactgtgttgctcaataaaatgttttacaaccgcctttatgcaaatagccacaaaccatccttgtatccccttgcacgtctgcatcgttggtgtggcttgctgagtacggtggttgtactcagccttgctattattcccccttttcagaagtgtagtgcttctgagctgaagatggagttagaggaccaaggctcagaccccagttgagttttgcctgtggagtggagctgaagccccgctaggatcatttttttttcgctgctgctgcttttgtttcggtgtgaggactaagtgcctcttctgtaagtattttacgcttattttacgtttggaactgtatattacttgtcgttttgtgtaccctggctggtcctggacagggatttaatacgcaaaatagtctggaaatttgggtgaaatttctgggcgtgacagcagccgtcagacatgtcgggagttcccagggaggcgattgagcacaaactgatggtgcaacccgacgccaagccagttaagcaaaaactatggagatttgcacctgatcgaacacaagtcatacgaattcgacaaacttctcaaaattggcttcatcaaagaagccctccatccagagtggctcgctaatccagtaatgatacatgaagccaacgggaagtggaggatgtgtgtcgacttcaccgacctcaataaggcatgccccaaggaccatttccctctccctcgaatagatcaactggtggattcaacagccggctgctagttcttaagctttctcgatgcttactccggctaccaccagatcaacatggcaaaagaggatgtggagaagacagcgttcgtcacgtccttcggtgtattctgctacaccaagatgccgtttggattaataagcgcaggcaacacatatcagtgcgggatccagggagcactaggtgatcagctcggacgaaacgccgaagcttacgtggacgacatcgtcgtcaaaaccaagacgggcgactcattgatcgacgacctaaggaaaacgttcgacaacctccgacgatatcaaacgaagctcaacccggagaagtgtacgttcagagtaccgttagggaaactactcggcttcctggtctccgggcggggaatcgaggccaaccctgagaagttcaaggcaatcgagaacatgaagtcgcccacaagactcaaggaggtccaacgattgacaggatgcatggcttcgttaagtcgtttcatcgcaaggatgggagaacgaggacaagctttcttcgccctgctcaagaagcaggacaaattcgagtggacccaagaagctgagagcgcgttcattgcgctcaaacgctacttgtcaaaccccccggactagttgccccacaaaataatgaagaattattcatttatattactgccacaccttattctatgagtacgtttatcgttgtagagagggaaagagtacaatacccagtgtctatgtcagcaaggccctccacgatgcaaaaactaaatatccacagatccaaaaactattctacgctgtgatcatgacatccagaaagctacaccacaacttccaagcccataaggtcatagtgatctcctcctcccctttgggagaagtcatcaggaataaagatgtcgtcggccgtattgctaaatgggtagtcaagctaagccattgaaatagggtggtccaaattgaaatgtaaagttagttgttctgtaaatgaaaagaatggttaaaggatgacataatatgaaaacttttaagaatacatagtacgaactgtaatttacttttttggtttagcacaattaaagatgagttgtctattacctggtactcttgtgatatactaagtcattagtacaattaaagatgagttgtccattactcaatagtcttgtgatatattaagtattgttgggtcagtgtacttggctattactaatagtctcatgatatgttgatgcatgaagatgcatacttctactaacacgagataattaattatggttatatagattcagctaaaaaaagataaaattaatgccatcaatttttctcaacaataaagcattcgactgtggtctccttttctcactgcatgatatacgattgtaggtattaccgtaattctttcatattatttttttctacatatacgttaatttggactaatattttttctcataattaaatatttaataaatcatttttcatatttctactataaaatgtgaagagggcattgtataatttgaaaattatattataagtgtatgtaatttaatgtgtaagatatgaacttatagtataagatttaactttttataaaaatgctgcatgatagtagataggtaatgaactaaacaaccataaaatatatagtgaatccattgtgtgttattgattttgtccttattctacaatatgtcactaggtttgtcaagttctaatatgccatcgcattttgcttaacttctataacataccatcgtcgtctagttagcttctgttagtattgtataattttatcataatgaccgaaatagccatgggacgaaaaatttcaaatatctcattgtaaacttccaaagtttgagatggatatcttctctgccttgtttataatattatattttggaatattctgtcaaattttggaatttctgtcccggggatatttcggtcattagaacaaaattatacagtactaacgaagtctaaatggacggcgacggtatattacagaggataagcaaaatacgatagcatattgtataacttaacaaactcagtgccatattatagaacagggacaaagtcagcggcacacagtggattctcttaaaaaataatctagtcaaaaaagtttctttattttattcaaaacaaaacattttttctaccaaacacgttaggagaacttcgaaagaagataagaaaaaaaaggaggtttagtcattagctcaaacacacgtggggaaaagctactcacatccatggtatggtatatactcacattaatcgataatatactaatattattaaaattattcttcgtcttaatacggtgtaaaactaaaactttaaccttatattcttctgttattccatcttcttctcgctttctcattcttatttatttttgataataatattgctacaatcaacactagtacttgcacatgaatactagcagctaactcatatgtgtgtgctccgtaatatatattatctatgtttttacatgagtaaacaacaattattatatttcttaatgatattgtaattatataaggtacctaactagttttctaagaactggaaagatatttttgttaaacataatctagaatgctataaagattaataatattgaacgatatataaccatataatttttttataaatgaattagagatcgactcttgttaagaatccaatgatcataatgcactatatatattgtttaagtgagttatgatattctatttaggatgtgtttgacaaatgggttatgagaggtgggattgagaaagggaaatggatgaatgattaggattaaatgaggtgtgatgaatggatagttaggatacaatactaccctttggagggtggaatattatttccctatcctatttgcaaacaaagccttactagttacatgtgtatgcattaaagtgggatctagagataaaaatcagacactgctcgccaaagaagcacgaatgcacgatataaataaaccctctaatcaccggatcaactaacacgaaaaatgatatatataaatcctctaatcaccagatcaactaacacgaaaaaacacggccctcactggcgtcgccgcgaattggggagatgacgaaatggtgtgaatgcgaagtggggtggtcgaaaccggtccgcctttatttgggttcatggagagagacccaagcaagcggcgagctcctctcgtgcttcccgtgtgctatctggctggctgcacagtggttcgtccgagcggtgagccggtgacgcgcttcggtgcttgcttctgagcttttgtgaatcgtgactttgtggctgatagataatgccataatggcacgccatggtagctttattgccattgctaacttcttgctttggctgctatgtaggcaaggcgtaaacaatttctgtaatgaagaatagtcaaaataatcaattgtgataaaatatcccgatgtaatttattatatgaaacattgtgaaaccctaacgattaaattgctattattatttacattcattttcgtggtgatttttggtgagggagattgaatgtgactatgttgaccatagggagagacgtaagcaagcttaaagcaaccagggcttttgcctacataatcacaattaggtccttttaaatcactattgaaagtttttttttgaaaaaaaagaacttaaaatctagtagttgagccctatgtgagttctaggttttggtaatttctgactccctctctgagcagcaataggttcttagtccgataacatgttttttagggtttgcatgggttagttaaaaatatatgtagactgatggatatactgccaagaaaggggagacaataaatgtaccttttttttattgttttcacaaatggcattagctttgttggatacttttattctctcgccggctcccgcgtcatgtaattgagtggtagaatccatcgttgtagtggtaagtagtcaggcataatctacttttggcatgaaatgtggttgtgagtattttacttactccatttcaaaatgactaaagttttaatattaggagaaaaagggaaataatctaaatacccctcattaaatgagaggtggttgggggtaaagcatgaagaaatttaaacgagggtggttggagaggaagatattactttcaaattacacttatttaagacaatttcaatgataaatttctaggccagaataatataatagccattaggttttgtgaggtgctatgtgtttctttttctaagtgaaaatataatattgcataaaaaggtagatcaaaggggaaaaaaggccaacgaaccaaactagcatggcatcattataatcaacaaagacacccaaattgcatacaaaagtacccataatcatcagctgcttcttatgttgacatcacagaaaacaaaatggataggatgtgcagatgcaatgcaccacactggcctacaccaaaagtctctagacatgcaaacactgatcaatggagtagtatcaacttagagcaggtataatagtaggtggtaagactttaaatattatatctgtgctgacatggaagggagaaaaggttaggaaacgcaaaggcgagcgcttcagttagcgctagctctagcacagcctccaacgcaaagtggtggggcccataagtgggagggcatggccagccaattggatggagctaagccgagtgatacgtaaagttagttgaataaaatattaaaagtaactatgactagcttaagtagtatttcttctttttatttacttttgctgaggtggattattttgcagcggctgcgctattaaccttgctcttattagtatgtcataatgaatggccacatgggtacatggcaccagtcaccctcttgtcaacagtccaaatgtccaatctctcgagtcttgagaacgacctttcactcggttcgtcatttttttttcactaacaccttgctcgttgaaaaatatacccttattaattccattattattagggagtactggagaaatctaagagattgttcaaataagcataacattaaacgctattccttctcaaggatactattaaatccccactaataaaaagatatttggccccttactcaaatcccatctaaacaatcactgaggtggcattaattaatgtgtagggttagatcaatggcaagatgaagggtgaggatagagaagcagagcaggattttgggttcggatttacccaaccctcttatccggttcgatcatgtgtttcttataagttatatgtaacatgtgtccataaactaatatatatcactcgagtgatttttaaagtaaaaaagtccatgaatataattataacgcctatattttttttacatggtcttcaataacatagtttgactagtattttatttcattctataatctcaacaaatataaaattagcatcacatgaaagtaattcaaaatatgaatctagtaatataacatgcataatacttagtatagatatagttaggccctgtttaaatcccaccccaaaatttttcaccatgtcacatcgaacgtttgaacacctgcatgaagtattaaataactgtcgacgttggatgtcgcgattccggtatttgcatagtatggggatcgttggtactaggatatacgcgagacttaggtaaaagagacggaggagaggatttttatacaggttcgggcccctgaattgtcaggtaatagccctacatcctgttggccgaaaccggtcgttgctcttattcaccataatcacaccagtacaatatttggggtagcctatctatctgttgtcgacttggcggtctgaagtgctgactcgtagtcgacaacagggtagtcttcctcctcgaatctgtgcccgacgaggtcagagatagcgctagattcctctctttggttcccgtaggtaccatattgggttttcccaggcttatctctgatgtcgatatctggcagtttgtcttggcgtatgtaggcttgtattggcctgtggctttgtggcgtctatgttgtctgtgtccctctcctcctaggcggtcttgtatttatacccataggtgtccccttgtccaagtagaactaggaaaatcagtatggatacaatccgagtagtccttgtcgttttcatatagaactctagttatctttccttatccggaactccccctatatccgaaggttgtttccgtataagacatggtatgtggtgggtcctgccgagatttagtcaactactattaggtatgtggtatccataaccctgacaataactaattacacatataggctaaaaaaataactaattacacatattgcgactaatttgcgagacgaattttttaaacctaattgattcatgatttgacaatgtagtgctatagtaaacatttgctaatgacggattaattaggcgtaataaattcgtttcgcagtttacatacggattctgtaatttgtttcattattatactacgtttaatatttcaaatgtgtgtccgtatattcaatgtgacacaccaaaattttacagccctaaatctaaataccctttagtatgattattactcaaaagctaccaagtttattttttaaaaaaaaacagggcgccctataattttgggcggcgggagtagtaaaagctatttttttttacactcaaaccagtccgtgtatgtgcgcgtagctcgcctgtctcaacgtaattaagtgaacgataaatcaaataaggcaaaatcttccaaggtcaaaatggaggaacccactatccccagattaccacgggccaaaattcggcccaacctgtgatgaagcggcccagcccaagtcggctaaacccctctcctcttctcgtgccctgcctgattccgctgcctccaccgctccacgtatccccgaaagattctcctcctcgtcctcatccatcccccaccgccgccgcggataaaaatccaaggaatcgaaggccccaacgtgtagtactacgcctacgcgccccctcccatggcgccgcctccgccgctcgccgcgctccgccccgcgccattccctctccctcgcctcctcccctgccccgcctccgccgccgcccgccgcggcgccgtcgccttctcgctgcagaccaacgtgcggctcctcaagcccaaccgccgctcccggcgatcccggtacccctactacgaccacgacgaggacgaggacgacgatgaggcggagttcgagtttgaggaaggggaggaggaggaggaagacggctacgagaccgatgtaagttccctcgtttggcagtagccgcttctagctttgctactgtcgtgagaggttgcctgagtggctgggtccttagctaaaattgcttgcgtactcaagctcgtgccatgggataagtgcaaggctgtgctatcacatgatatcatcatccaattgctgctcattatgtaattagagctccggaaggaatatcattcaactgctgctcattatgtaactagagctccggtattccttttgttttggagtacattagagatgtgataccattttattgcgtcaggctagagagtttcagaaattgaactaaccaacatctcattaggttgtaggatgtaatgttgtatgcacattgagttaaagaggcataagtttgtcaaaggaatcaacaaacattgtaggatgtaatgttgtatgcacattgagttaaaagaggcataagtttgtgaagagcgcactagtggtaaatcatcgttcctgtatttaatggtataacaccttaaccgctcatatgataaactgttttaaaagttttctgcctggctgccacagttaaacaattcttatttatatggtttatttgttccatgcatatttatgtgcttaaatactcaatggtatgctcttaaacttaggctagctgggtaacagtaggtagaggtgggcattagggtgagagactaatttgatttctgccttgggtaaaccatatccaacatacggggaccaatagaaacagcgaaactcgcttttctgctgattagtgaagacttaaaagagagagggagagagaatcagttatgtttcttctgccaccctgactatatgatctgttctgcattgagttttcaatatatagtatactgcatcactgggtgtttagtccacatgccaaaccaggcagaattgcagattattggattcaaaaggataaagttttgtgatgctaactttcattcatttctcatagaatgaaatatgagaaacttaccattggcaatattctacatttccagcattctaatatattctcttactcttttcaggatgatctatcaggtttggagtatcctggtgtactttattcaaacaatcctcgtgctccaatcaagaaaccaggtatgaaaggctgtgaaaatccctgatatccagtggttactttgtattaatactttattctccaggccgggaaaaaccagcgctgaaacaaaactgggaaggaagacaacctaaaacacgagacagatgtgacacttcaaaaaaagtcgatgctctgcatgccaagagtaaagctagcagatcaactggtcttgtggacatagataatgaagtagaggtagactactaaggttgattcagtgtgtccatgttcttgtttatgttcaatatttaacgtatgcaggataaatgattgatttattttcgcagttgaaaaatgaaagtatctctagaagcttgtttcagaaacttcaagaagaatatgactttgatgataaatggttaccactaatcgattacttgtgcacatttggactgaaggaatctcattttacaaacatgtatgagagacacatggcctgctttcaaatcagtcaagcttctgcagaagaaaggttggagttcctgctaagtgttggtgttaaaagcaaggatatgaagaggatgcttgttagacaaccacaaattttggaatacactctcagcaacctgaagtctcatgttgcatttctggtgggcataggtgttcctagtgcacggataggtcaaattatttctgctgctccatcatttttctcttacagtgttgagcagtctctgaagccaaccataaggtatctgattgaggaagtgggcattgaggagagtgatgtgggcaaagtagtgcaactaagcccacagattctggtccagcgaatcgatagtgcatggaaatctcgatttctttttctatcaaaagaattaggggctccaaaagataacattgttaaaatggtcacaaaacacccacagctgcttcattacagtattgaggatggaatattgcctcgaatcaatttccttagaagcattggcatgagagatactgatgttctcaaggtattgacgagtctgactcaggtattaccacattcaagttccctatccttttcatttttgttttgtttttacaagtatcttcattgttcaatgtagacagatgccattataataccctctaatatttgtttcttttcaggtgttgtctttgtccttggaggaaaatctcaaaccaaagtatctttacttggtcaatgaccttaaaaacgatgttcaatccttgacaaagtatcctatgtacttgagcttgtcccttgaccagagaatccgtccccgtcaccgttttcttgtttcattgaagaaagctcctaagggtccattccctcttagctcctttgtgcctacagatgagcgattttgcaagaggtgggctgggactagcttagaaaagtatcatacatttcgtcagagcatgctgctcaaaggtttttcagagaagactggaaggaaaacattaacatcgaggcggtagatacttcatgattgagaagtaggttgtttttgaacctatgccacgctgtaagatgatcatttcacgcagtacctcaaatattttgagtttattttacagaagttgcttttcatagcaatgctgattgatttactgtttgcaggaaaaggcctgggttgctgtgctggtattcaatcatcagcattcggcacacatatatcaatatcacagatacatcactaactacagtttagacttccttttttttttactcctattacaacaaggtgtaaattcttcatctgattcctccagtcgaaaaacaaatggatgttccaggagtcaatctaaggatgaaaagggatgcaccagaatggttgatgtggcattttgttgtctactgccacggtgacatcaccttgaccattagctaatgttaaatatgtctagcacaacaaactaaccatctattagggatgtattaggcagcatcctacgttgccgtaagtctgtagcgtcgttaagcacgatattttattttccacggttgtaaatgatagaaattctatcaccagttcgatctgtactttgtgcgcttttctggtttgttatgttggaaaattattcctgttgctgtggcttctatctgtgttgtgtttggtttactagtcatatagaagaaatcatatttttcgtgtataacgttatgctgcaacacagcatttacgatataactgatctagataagtcactggtgattgaaaggtagaatttagcaaatactccctccgttttataatgtaagtcattctaacattttctatattcatattaatattaatgaatatagatatatatatctatctagattcattaacatcaatatgaatatgagaaatgttagaatgatttatattgtgaaacggaggaagtaacttctgattctggaaaaggaacgaacgttgggaaaagctatctaaagactgataaagatatactccctcattccttaaatatttgacgccgttgacttttttaaacatgtttaaccgttcattttattcaaaaatttttgtgaaatatgtaaaactatatgtataaataaaagtatatttaacaatgaatcaaatgatagaaaaagaaataataattacttttttttaacaagacgaacggtcaaacatgttttaaaaagtcaacggcgtcaaatatttaggtaaaaaaagtcaacggcgtcaaatatttagggtcaacggcgtcaaatatttaggtaaaaaaagtcaacggcgtcaaatatttagggatggagggagtatgatttttcgaaaacatagtggccaattgtttgcattttgagcaactggaactggtggtcaggtgctattccggggagaaatccccaaaagggaaaaatcgacgcatcacaagtaaagaaagcctcaaatgttgtcaacttatcaggaaaaagcacgtattacatgtctaggtagtaagcaacatgacaaaaaaatagactggatctcagggctatgcttatgtacgtcaagctgtttctgctttactgctaactgcaaaataaccctttctataacaacctacttgaccatgcttacttgtgaatcctaagttctgtattataagtataacccaaaaaccatcctactactactattaataataatctgtggaaacctacttgacctcactgcgtctgtgtacctatttataatctatggcaagtaaataattaataataataataataatttgtgtaccaatgtataatctcttgtcagtgtgtttgtagtattggtgaagaaataatagcgctcagtagagaccaaggctatctggaagaatgatctcatcactgcaaaacagttcagacgactcggatgttataactagaaatgccagatgaattatcttggaaaacaaaaaagaattaaagagaactgaaataacataagtaggaacagttacctatcttcatatgctgaagcttcatccaaatcatccgacctgtgtgatttttttttcatgttgttacctggaagatttacatgagacaaaatcagacatgacaaggaaaacgactgaatcgtaatcattccctcagaagtgacacagtacaaatctaagtgtaagaatttgctaacctatataatgctcattagtgacaccgaaacctgatgtcctgtgttcacgatagtcaaattgcttatttttccgataaatttttctgtatcagtaaatgggaatagaatgttggttattcctcaagttgaagatataaagagcaaaagaaaattacacaaggtataaccagcaaatatgaaatattagttcaccatttctctaaaaagaatagttataaagaaactacaccaataaagtcttcactgatagacaaaattcagtcaacaattataactgagcaagataggctaatgattttacaaacgatggtatgtgtagaacagtgataaaaatgcaaattgaacccctaatctgatgtagtgctgtaaatatgaagtataagcatggaatcaatctctgcaaaaatgatattctagatctgtcctgattgtgagatcaaattagccccactgattactgtaatgtaacatggggccttggtctttgctacactgttctttgacttctttcttttttttggatggtgcctttgctatagtgtggccaatggtaaccttcaaacaactatcaacttgacttccagaaacactcttcagccatgtcattcttcaaataaaataaatattattgcatttatggaattttcatgtgtgtatggatgaggggtattgttctgtatgttgtaaacccgcattacataatcagatccttaatagtaaaaactataggcttaaattgggtaaaccataaaggggaagcaaatatcatttttcatctttaacgtcttggtctgccacgcatgaaagcaaggaatcattttaatgaaatcgatagtggtttccaatgcgtggtagtaataatgtcagaaacagcaagcgacataaaacagccctattgaacagtagagtgttaccttagttcagacttttccatgtagcgcttgacaagaactcgcaatccacagatgaagtgagctgtcccctttgataagataagcctcactgtctcagtgtataggaagctcacaaaaccaaacatccgcttctcctgatagggaattcgcacaccggagacaggcccaaattgcctggcattatcaagacaatattgtcatcacagtaacataataacatgacaaattgacaattcacacctagtaacaataaagttaaggcaatacttgaagtaattctcgacatcatcatcagtgaatttgctgtgaacagggaaggtcatataaatctggttagacccagtgccagtatccatcaagttgcaactgtgagccaagcccaagcaatccatgtacttcttccgagcatcttccaccaggactacatgatactgtccatgttctctgaagttgaaaacggaaagagccatgatcaggatgtgaagaaaaaagaaaaataatcaatcatgatagagccatatcagaaattcatagaagaaaacctctcgaccactctgatggtgttaagccccatgagcagacttgtaagactgcaaccagtccttccatgctgctggctctcagtgagccatccatcaggccgcaggggcttaccgtacttctcaaagtacatcgacggcaaacgatcgactgcgactggtggtggtattccgatcaggagttctctgatctccatatccagcttgctcagcgacgcaaaggggtgaacttgcctgggattatgcagctcagggacggacccatggaagaactgacagttgacacctttcttgcagtaacccctgaagaaatggaaatggcaaggcttggaactcgacttcgagctactatgaggatgtccgacgagatttcgaccagcatttggagaattccttggcatgctcaaagactgcaactcttcctttaagcagatggattcaggaaatgagctctgcaatgctccagtttgatcaattaatgggcgacgttgagcttggattccacgataattgccgcttgattgacgctgagccctcaagtaagccagtgggagttcttgccccggtggaggaggcagcagtgagggtaaggaacgtagatgctcgtcaggactagctgcatactgtctgatctgcgggtatgaacttgttgagaggatgtaaccaccgtttgcacgcgatggctcgaattcccgagctctattcagcagcactgaacatttgttcatagccatttcttgattcctgcaacagaaacgaaatgatgggattttcattctataaaaaaaagttccacctagaaaaagtaggagattgttttctgataatttcactgcaatgcaaaacaagagtgagattgttttatgattaattaaaaggttaagatgcaaatactgtgacaatatagaactttagtccaagcaaaaacgaaaaattgcacattccactgtttccaccacaaacaacaccgagttcgtgttctcccagttgctgcttccaaaaatcaaacgacaaaaatgcagaaacaattctggataacaaattacaactctaccttaactaaaccaccaaacctcttcagaatacgagaagaacccatgattaacaaatgctgtaccaaaaaacccatccctataatataacaaaaccgaacgaatccaagatcaagaaatgccgtaccaaaaaacccatccctataatataaccaaaaccgaccgaagaccacgatccttcgcatgaacacgccaaaaagaaaaggcgaaatttcaataaatttaacatatatgcaaccaagaatcgttctgggcttctggccaagaacctgtcccccagaattcaaccaaaaccactcagattgcaccagataccccccacaaaccctcccaagaacccaccttgtctcgcagttctcctaatgcgcggatcccttcttggtccaggaagaaagaacgccaccatgtgaaacccccaagcgggcgcgattgcgcgaatgccgtacgtcgccgcgtgtgcaggccgcggggcttgccgcgtaggtgggatttagcagatgggaatcggtccagaggttggaaagattgtagctttcgccagttggtgttccctaaatcttgggactgagggtttatagtgccattttcgccggaagggagagcggtttgcggaaccgactgacgacgagagaggaggccctgcgccgacctgcggttgttcttcgtgtgccaagtgcgaacacaaacgtgtcccttttttttttttgaaattataaaaactacctggtgggccgtgtatttacgtggccatagctcccgtacaaaattatttaagcttttttcacgtgattttctcaaaatttgttaaatagtcatctcgttgtcttagcatattaaaagaaattgaatatttgtttttcagttttatagctcttcaaagttacaccagccatcacctgttacttttattctgcctctatttacttgtccgacatgtcacgacttatttcatccttaagacatttaaaaatcatatcttataatttttagagttcattgtctcgttaatttttctttttattgtttttagaagtcttgtcaaatgttgttactgtacttttttatagccagcccgctcttactctttattgttattggaatttaaaactgaacctagttatttttactttttataagtcccgtcaatcgccataaccttagtgcttcacggcctgtccgttgcctttctcttaatcgtcattggattctaaaaatcaaacctgctcatcattgaaggattttatttatagtttttagatttttcatcaaccgccacgacactaaccatgtatagcttatccgctaccccattcttttttggcatttgccactgttgtgttctagatgtattgttttttatattccttttttattatttctatattgtatttctacttgataactcatttttatctatttttagaatttatttttatttataactttaattaatatcgtgttgcgttctacgcggactattttttaatattccttatttccattctgaattttagttttttctaaattatattcctacttaaacactcaattttatcttatttttatttctgaatttattttattatatatttcgaattttaattaatcccatgtaatattctagatgatatatcctttcaatatttctttcatttcaaaatttagtatctctaaatgaggtagcttttgtaaatttttttcttttttttttccgttagtggcatgccactggcaaagagacggtatccgtaaatggtttaacttaggctgtgtttagttcacacggtgtgttagaagtttggttgatattggaacgatgtgacggaaaagttgaaagtttatgtgtgaaggaaagttttgatgtgatggaaaagttgaaagtttgaaaaaaaactttgtaactaaacacggccttattctcttcttccatattttctctcctatttggatcagaggtgaaggtggttcaattttctctcttgatttttttttattaaagcggttcaacattttctcctatccggtatttttctctcatttaaccttttttcatatgctattttagatcgcggatttttgagcggtttctctcttttttttaatggtttttcagaatatttttatatgtgggataaggtgggaaccagaaagatggctatggctagtaccggatatgacacatcttagcattacgaatctagattcgtagtactagaatatatcatatctgatgctagattcgttttttatgggacggagggagtagtagagactagatttgaattgctaaaactttctatttttaggatactaatttatactccctctatttcaaaatgtacttgtgccctttttaataagagattaaggctgggtgtgtggaaaatgactgtgatgggttcagatgagaaaatatatgagaaagattatgcttggttgagatgaggagataggtagagaagtagctgtattttttgaaaaatttaaataacacaagtagttgtgttttgagacaaattttaaatcctagatgtcgaagtgtgagctcctctatcggggtaccgcgaggccccctctttgttagttcgaccaggggcagcgagtgagattcgagattcctgtggtggatgagagaaagagaggggggcggggccctcgaagacagagacaaaagggatttatacaggttcgggccgctgagaagcgtaacaccctactcatgtgcttagctgactatatgtggaatacatatgcttaagcgcgtgagcccccaagcgccagttagacaaagagttgatcccccctccctaagtaggcttggaccttcttttatatctcaaggagttaccacatgggcccgccgagcctattcagggaggataatcacattaaatgtatttcttattgcttgtcttggaagtctgttgcacaccttgctgcgacgtagggcctgtcaaatccatccggctgacagtgtcaacacgcatgtcattcagcatttaaagagtgaggacttttgggtcctcatttgcaccgggaagtgggaaccctgccctaaccgggttaggcaaaccgtctccggcagacgtgagaggctgagctgcccctcacaattgcgacatgacgggggggggggggtgtcaggcggccgcctgacatgcaaccagagcgcaggcacactaccccagccatgtcaatcatcggtcacagatcggtcacggaccggtctgacgcaccacgccacaataaatgttgcacgtggagcgctcgctcagaccgccttaaacgcggttaggtgggcgctaggaacgcccgtctagcacggcacacgtggcgccacgtggagggggtcgaggtggcccgacccccaagcgaggagggggcagccgccactccaccccgggcctgaccctcttcggggaagtgtcatgtgggtctaggggcagtctcctcctttcaaactcggtaccctaagctgggagggggcagccgtcgctccagcccaggcccggcccccctcagggggggcgccacgtgggttcgggggcggcctcctccctctaaacatgataccccgggcccatatcaccaaccctagagcattgatttcaatatgtgggaataacattttcagcaaatcaggttctttataggaaaatctaagcaattcaaaaaattaattgctgagataattgaaagatattttttctcttaatcttaattttactaaagaacgtaaaaatatcttaaacttaatcttagtatttgcaaatgtttgcataatgtgtcacagttctttcagcccgtgggttaggaaggctgagagaagatgcaactatgcaagtacattaccggagtccggagacaggaaggccaataggctgcgccctgcgctgtgcggagatggagtcgagtagtcgaccgcacgacgctgaagatttagtaccatatgttgacgtaatatactcgtcccgttccaaattactcaaaatttatacaatataaatgtttatatagatatttcctatcaatcacaagttatccttaatttctactaaaactttataaaatgcctatattttgatgcgaatcgagaagaagaaaaaatccagggtcgatagatgcagctataaccagttatcgttgctttttctatcttttgccctatagctaaaatttaaattttaaattttacaactaaattttaaagttgatttagtatatattttctaccgtagatcttctgcaatggagtataacgttactcttcccaacaatgacattttcccctcaaatgaaaaaaagaatcagaatatgttccctctcgtttatcttccagcatacatttcagaacgacatcatcagctatggcatgctgcatctggactcattctagcatttcaagaacaaaactccaccgtgcaaattcagtcactcccctcctataaaatactcctgtaaatttagatgcttcactgaaacacaaaatacattctttttgtgaaggaactggtctaaacacttctttttttcgagggaacgggcagcctgccatttcattaatagaaggatagataggtctaaacacttctccaattataataacaattatatacaatgttaataagatgcaaccggtttaacccacatatctgagcaaatctacactcgataggcattcaaccaccttgtcaaaaaataggtaatcagccccccaaagaatgtacactcaagaatgaaactgtcacaagattaacacagtttcattcttgtcacagaaagattaacatgtattgtatggctacactcttaagtgcactaagctgtttcagcattaacatcaactgctacttaaccatgtttacgtgtagtagtatatcctaacgacttcagtgtgacgccaaaatcaatcaactaagaaacattcctccgggccactgtacacaaactttcccttttgtttgactggcttaggtggcttggaactagcaaagtcatacaagtgctgcttcaccttcactgttcctcactaaataggtcatctggaagacagcgctccctgcaaagcagttggcatatgtcggatgttacaaccagattaattagttgggggcgaaacacaatacagtatatgagtaagatatgaaatacaatggctgttgctattgtacattcaaaagcacaaagcatctgaagtgcgttgccaacatattttgacctctcgcgagaacaataagatgggagtgttcatttgcattgactaaaaaagtttgagtaaagttcacagccggtctttaaagttgtagcgaggtgtcacttaggtcaatgatctaggaaaatcgtcaatacggtccgcgatcttgtttaagtgaatcatttaggtccaaagcacctctgatcgggttgactggcttacgtggccgtccacggtggcagcatttttgcattttagccccccccccccccccccccggcatcttgcctcccccatgtccgatccaggcagtctcccccaaatcctcctccttctacacgcgatttctagggttagtgattgcagcggcaataggggcggcggccgtgaggacgagacccacgacgaggagggtggcgcgcacagaggcaacggcatgggaggcggcctcgggttcgtgaagtgcgctggtaggggaggccatgggtactcgaagtagtgggtcttcttcaagtgcccagaggagaaggtccgaccttcccctgataaagtgcccttgctgctgcgtgaagaacatcgtggagctcactgcaacgacagatgctaatcgcgggcgcatttttttcacatgtcctgaccacgaggtaatggtccgattgatttggttttgggttttttgagttcctttattttcatgaacatgacagtgcttgcaattgatgaatgtgtgtagaaggatggttctggatgcaatttctggtacaggaaagaagggtatgtgaagtatcttgagaggaaaggctacattgctgacaaggagctaagagatgtgaagcacatgtcagagaggaagaaggctgtgaacaatgaagatggtggggaagatgaagtgaagaagctaatgttatctctagtttccattgggttggagatagttcagatcttgaagggcatgctagttggttttattttacttgttgttgctttagtgtgtttggtgcttgctgtatggctgaaataagatgatgattatgggtggattatgtagtagttgtcagttgaggattatgcagttttaacatgtaatggcaatggccataattcactctagaatcaatggccataagtgtatgcagtttatatatgcaaactggattgactggttgtagtggtgttgtctgaatgtaggtggcaaaacaaatgcagttttaagatgtaatggcaatgggcttaatttactctggaatcaatgcaaattgggtactataatgttggcttgtatgattgcatttcaactcatgaattcagtagcaaataaaaattggcaatgatccatacaagaatgaataaaatcacaggtctgcaagttgaaaatcacaatttcagttggagaaaccatagatttgaacccattaagtttgcattggcataacttgtttgcatccaagcaagttcaagcaacaaaatacaatcccagttaaaaattttcaaatggttaccttttgtttgtctgtcataatggtccatggagaggtgttcactatcccaagttcagtcttcaaggtatcaagaaaccatgtccatgtgctgaaagactcaacttctaccacagccattgcaatggggtatatgcagtcattgggatcaattccaactgctgtcaacaattgacctccaaatttggtcttgatgtggcaaccatccagacaaatgattggcctgcaaccactgaggaatcctctcttgcatacatctagtgagaagtacaagctactaaatttgccctcatctaacctaagatagaaagaactcccaggattggacctccttagttcattgccataatcccacaacaagttgtattgggctatttcatcaccatatatctcttttagggccagcctcctagctcttgcaagcttgcttcttgaaggagtcaagttccactctttttgtactgtctttgcaaagctaggaatggtcatcttcccatcagccctaaatgactcagtgtacttttcagctaaccattttgcagtacacctttttagaatccactccttcttgcatttgtgatggggctcatatgtcttaacaatgaaggcctttgccctgctgtccattgaagcataaaagttccaggggcatccttctgcacaatgtgccttgatcctagttctatcattcctgggcatctttatgtccaccctgttcttcatgctatattcagagatagcctttctaactaattcaactgaagagaataccatgcctactttgaagattgggttgttaatgtcttcaggattaaaagacttaaacttcaagttgaactcatcatcatcatcatcacttggcaagtgcagttgttcatcatcacttgtgtcaccttctgacaaatctgccacaactttcttgcccttcaacacactacctgcagccttcttatggttgaatttcttcctatccccctcttccacatcaccatccacattttcctcaaagaggtcatcatcatcatcctcccactcataatcactatcaacaaaatcagaatcagactcactgtcatctgagtttatatgaaagctcaactatttcttcaccaacatccaattcttcatgcactacatgtccatcaggtgcattcctagggtttctatcctcgctttctgcctcctctgtctgctggcactgtctactagggttgaacacctctggcaactcagcttctgggctcagaacaatgtcatctatatttcttcctgagacatgattagtatgatcaaaatagatgacaaaattcttgattttatttgacactgatttcatgacattgatctcaacttcactgtctatgatcctcaatccatcagacatgttctttccaggcaataaccaataagttttcaactttccatcagagtcatatccaagcatggcaacaaagtctgctaaatgtagacatctaccccaatctcgagaatcaatattgtcaaaccagtctactttgccatccatatatgtgcggttcactcccataccacagaaaaaccccccatgatgaaactcaattgaaaagtactttgatccaggacctatatagtgcacacattcgggatgagacaacatactaaaccctacattacatcacaatagctaaaaaaacacacatttaccaacacaaaatcaactaattgcattctagatgaaaccctagaaaaaattgccaccgaccaaaagtcccaaatttcttgaagaaacaaacttccaaacctctcaatcacagattaaacttaccaaatgaaagggattaaaagatgacgacgacactcactataaacaggcgcaggtgcgccttcatctcgcaaggtcaggtccatctcgcgcctccgacgcctccgatgacggcgcccaatcggttggcggccaaacgcgccacccagaacgcgtctccggccaccctgaccccgatcgccgactccgccctaatcgccgcccctcctcggagtgctcctagctcggccagaacgagagaatgggggtcaattttggtcgcgtgtagaaggaggaggatttgggggagactgcctggatcggaaataggggaggcaagatgcggcggggctaaaatgcaaaaatgctgccaccgtggacggccacgtaagccagtcaacccggtcagaggcgctttggacctaaatgattcacttaaacaagatcgcggaccgtattgacaattttcctagatcatagacctaagtgacacctcgctacaactttaaggaccggctgtgaactttactcaaaaaagtttctatgctgcataaagaatgaaaaatgccacttcaacgttacagatgtacaactgtgcagcagcatcagaagtgctccaattttccaacatatcttgatctttctcatgaataaattatgaaaagtattaactcttaatttcattaatttgtttccgtgttgcttaaagaataatgttctcagaagcaataatgcatcgtacaggttgaaataagactgtttaatctgcaaatagaaacaggagtactcattactcacatagctgagaattctgaagattcatccacattagactcttttgtcgcatgatcatctaaaacatcacagaatcaagtaagggcctgtttggcacagctccaactcctaaatataactccagaagttgagtctggagtggagttgtggagctgcctaaacccagctccacaactctattacattttgtgagagagctccacccaactccactcctagttttggtggagctaaaactgtttggctgagctccagctccaggaggggtggagttggagctggagctgtgccaaacaggccctaagacttactaatataaaaactataacagtttaatgaaaaacaaggatgaatatggagtagggaaattccacatgaataccttctggagattctgttttcttctcagagaggttatgtgttagaggtgaatcaaaatctccaaattgatgtgtcagtgtctcctgggaaagttcaatgaaattcggcattttttgtcctatcagaaatgacaaaagaaatggcttaataagtcaaaatatagaatcacaaccataagtctagaactaaatcagaagtggcacagcacaaagccaaggaagggcatttacagatttactcaccagagtgaccctcaatggcattgtcacatgatgtcctgtgtgcaacattgtcaaaacggtcgtttctctgaggaagctgcctgtatcggtaaacatgttattatgtttgaacatgtaaatacagagagaataaacaattgcacaatgtataagcataaaatattagttcaacaaaagcaaactaatttccaaccattaaatcagtaaataactgtctcgtggaacttaaatgtgcagcaaaaacaaactatttccatgtattaaacggctaccttgcagggacttgtttaagatgtacgtataaattataattactgaaaaattcaatctgcaacttaagtacagacagaaaagctagttattattttttcacaaagacggtacatgtggaacagaatggacaaattgaccatacacttaaaataattaaccaaatgagtaatatgtcagtatgatttatgaagcacgcatgagtgcatgataacaaaaaagcgtgaaactgatgtcccatagaccaataattatttctaaaatcaaattagtccccactaaccactgccatgaaaaagaagtccctggtcaagatcatatttcaactaacaaccacatttcaagaactctcaaattgacttccagaattaatcttcagctaataactagttttaaaatcctcaagaaagcacttatggaagatttcgtgcaagtccttagatgagagagatttgatcttttgcaagctatatatatgaagatcagaaaagggagaggacactgtggcaagactgccatttggacctcagaacaaacaagaacacatcaaactctaatcctgtaattagcagaataccgtgacataacccctctgaaaaagaggtgcacccagctgcttgccaggacagagaaggattgatttgggaatggttaaaatgtacttactatagatttgagtctaacccctttatccaaacaggttcttaacagtatagtttgtaaatcacgaatcagatattgtttgaacaaaaacaacagcaggtttaaaatgctggttaattaaagacaatctgagaagcaatcaacaaaagaaacagtgaagttagataaagtacctttgctcttgtttggtcctatccaggtaaggctttgactctaacttctactccactgatggaatgcgatgtgctctttgataagagaagccccactgtgtcatcattttcgaatgtcacaaaaccgaaagtgtgcttctcattgtctggcttaaaggggatgtagacattgatcacaggtccgaacttcctagaagaaataccatcataatattattgaattgaacatagtggtataatttgaaacttcaaatcatattgcacctagtcttgtcctcaaaacaaagtaaacatagtactaagtttagaagaaaatacttgaagtagtcccgaatatttttccaagtcaatatgttcttagcgatggtaatataaatcgtaaactcggtactttgaccgaagaaatccctctgtgagccatgaggatgggattgcctctgattgtgaccaaagaaatccctctgtgagccacgaggatgagatagcctctgattgtgcaactcagggacaccagacccgagaacttgtgcatttaggtaatcccttggcatgccatcgaaggcattggcacatgatgtcctgtgtgcaacattgtcaaaatggtcgttttcttgaggaagcttcctgtatcagtaagcatgttaggtttgaatgtgtaaataagagagcaaaaacgattgaacaagctaaaaatattagttcaataaaagcaaactaatttccaaccattaaatcagtaaataaatgtctcgtggaacttaaatgtacagtgaaaacaaactatttccatgtgcccaaaaattaaacggataccttgcaggtacttgtttaagatgtacgtaattatataattactgaaaaattcaatctgcaacttaagtacagccagaaaagctagttattattttttcacaaagacggtacatgtggaacaaaatggacgatttgactacacatttaaaataagtaaccaaatgaataaactgtcaatatgatttatgaagcacacctgcacatgcatgagtgcatgataacataaaagcatgaactctgtcctatagactgaatgaatattaaaatcaaattagtccccaccaaccattgccatgcaaaaggaggccccgataatagatcatacttttattaacaaccatatttcaggaactctcaaattgacctccagaaagaatcttcaactaataactaattttagaatcctaaagaatgcacttatggaagattttgtgcaagtccttggatgagagggattgatcttttgccggccaaataaatgaagatcagaaaagggagagtacattgtggaaagactgccatttggacctcagaacaaacagaacacatcaaactcaaagcctgcaattagcagcaggatactgtgacgtaagttacataaccccactgaaaaagaggcacaccaagctgcttgccaggacatagggatcgatttgggaattgttaacatgtactcctcctaacaggcgctcaacagtatagtttgtaaaccataactcagatatcgtttggatgaaaacaacagtaggtttacattgtaggttaattaaaaaaactgcgagaagcaatcaacaaaagaaacagcaaagttagataacagacctttgctcttgtttggtccattccaggtaacgcttgactctaacttttactccaaagatgaaatgaggtgtgctctttgataagagaaggctcaccgtatcagcattttcaaatgtcacaaaaccgaaagtgtacttttcattccctggcttacagctaaggtagacattgatcacaggcccgaacttcctggaagaaataccatcgtaaaattattgaattgaatgtagtggtataatttgaaactttaaatcatattacacctagtattgtcctccaaactagtaaacataatacaaaggttagaagaaaatacttgaagtagtcccaaatattttccttagttaatctgccgccatcaaagttgatggtaatataaatcgtaaaatcggaaccttcaccaaagaaatccctatgtcggccacgaggatgagattgcctctgattgtgcatctcatggacatcagacccgagaacattaacttgtgcatttagataatcccttggcaagccatcacctggaatgttcaaagactgcaaatgcgcagaaaatgggatgtcaaaacctccactttgaccaacggggaggcatggaaacttaactccatgataacaactacctacctgaaactgaggctccaaatagagcgatggggattcataatcataccgcgttgaaggtgactgcagtaagggtagctgctggaggtgttgtattggggggaacctcatgtagtatgacttcgcctcattaatcaaggcttgtattgcctcatcccgggctgaaaatgcataccaactgatccaacttggctttgatatgttggcgtactgaacaatagcatttgcacatgatggctccaactgatccaacttggcttgtgccgcaaaaccagttgacattggagcatatgccccccgttcctgcaacacaagggacaaaatataaaaacccactgcaagccaatatttctgattggaaaaatcagcagttatttctaaaagattacaaggataacaattaaaccaaaatttggcagtagagaaaattagtgcaagcaaaaccggaaaccttgcatctatctctgtttgcacccacaaaagaggaaacatttgcaccaactcgtgtttttccacattgacccaaaattatgttttcctggttccaaatctgaagaacaaagtgcaaagttatctgttggatgcaaaacagaaactctatacccaccaacccagccaaaatatccatagtaagagaacgaacccaatgagcaagaactgttctttccaataacccttctcagaatccaaccaaaactagccgaacgctactcctcctgtaatccatagacctgcctccacaagaacacaccaaaagaagaaaagagaagttgtatatctacaaacaagaactattccagccaagaacataatctcggaattaaaccaataccactcagattgtactagatactccacgaacccctagaagagctcaccccgcaaagaatcacaagagtacaaaacatcgttctggccaagaatcagtatccagagtgcaactaaaaccgccaagattgtacctgataatccacgaacccctagaacagctgaacccgcaaagaatcacaagagtaaaaggcaccgtcccggccaagaatcagtatccagagttcaactagaaccaccaagattgtaccagataatccacgaaccgctacatgaattcacccgcgtaaagaaaagacaagaagcgaaggatcgttctagccaagaacccacccgtccccggaattcaaccaaaaccgctcttgattgtaccagatgctccacaaaacacctcaagaacgcacaaggatcaagcaaacgacagaaaagagcaaatgcaacgccgcgctagctccccaatttactagtacatacattgtcgtccaggaagcgcaccaccctgcgacaccgagcggcgaagggggggcaggggggagaagggagacgaagacgacgaagcggccgctgacgctaatgccgcgacgcctctcgcaccggcttgcttgcttggtaccgaaatggattccgccgcggatggcaattcgatcaaaaaggctgtggatttcgctacttggtgtccctctcctaattcttgggaggaggaggagggtttatatagcgccatgcgcgcgggggggagaaggcggttcgctaaaccgagctcagcaacggcgagtcgattcccgtttggatgtcgggaatcgaaatgccacccgggaatgccatacattgggaaagaactggattttgaacccagttggggagggattagcagaggagaaaattggataaatcgcagcgactgaaaccagtcggaggtgggattagagggggaatttgtataaaccccggcgattgaaacccaatggatgtgggattggagggggaagagtgtatttataagcagcgattgaaacccagtggaggtgtggttttaggaggggggaaatgggatcggagagaatgaggatgagaatacccgttgcgccggcggccggagccaggtgccaagcggcggcggtccccggccgtccgtcggagacccgccgccgctcattgagacctagccgatcgccgccgcccgcgcgcttcgccgacctcgaacaagaaagagatttgggagcatggtcgttcgtttggagaaggaagaggtcgtgttcaatattgggctgaaaatattgttcccctcggtttgcacggatttgggcctctagttcggcccatcagattgatttgctctatcttcacatttagaattacacaaaaacaaaatcatctgaaatagttctccgaagacttttgggaaaggtgtcaaaaaagaaaaaaatttgcgaaaacatcaaattttgctggtttatttggcaaagaaaaatgcagtacctggattttccctatatacggattaggcataaatccatcggcttcgatgggcctgagtatgcctacaggccgaggcgggtccaatcgaacgctctgcttgttgggctttggaagctttttgcccacccgtgtcctgacttgggcctctgctcgggccaccgtgtcatggatcgctagcctaccattggtagatcaagtcaaccgctgtaaataggtccagatcgacaatagttataaggcctgtttggttgggggagtttttaagagggattgggagtttagagggatgaggctattaagtgttttgtttggttaggagacatgataattttggtgggatggggatggggaattgagtaagaaactcccttcttttcaataccttggtaggggcaggtaattgggaagtaatttctcctttagtttttctaagcaaatctcagccatccatttttattaatgacctaatctccaactaaacttcctatcaatttccatcacctctaccaaacaagatattaggattaaaaatcaaattcccatcttaatctcatcatcaatttcctcgtgtaaactctcaatccccttccctcgagttaccaaacaagccgatagtttcgggggaaatttgcgacggtcctctcgttcttgtattatcgttcgtgtttttttttacaagtacctcgcagacgagtactccctccgtattttaatgtatgtcaccgttgacttttcgaccaacgtttgaccattcgttttattcaaaaattttgtgcaaatatgaaaatatttatatcatgcttaaagaatatttgatgatgaattaagtcacaataaaataaataataattacataaaaattttttaataagacgaatggtcaaacgttgggtaaaaaataaacggcatcctaccttaaaatatagatatggatgtagtacgtgacagcgtgagccaaactttgacggtccattgtattatctgtgacgccgtttccggcgcccctggacatgaacagaacgacgcgcaccaagcacgaccagtctccctacgacggcgacgatacacgactacacaaacctacaaaaagggacagacagcctctgcccgtgtgctcgtgcgcgtcgcgttaacctttttttccgatcaaagttgcagagcagcagagaagcatatagaacccagaacgcacactcgtccgcccgcggtcagcaagcgccgcgcggaagtcggaacacccgcctattccgccgttcgacgaggctgcgtctgcgtggaaggaaggagatcttggacgctgtttcgccacaagtcacgagatgccgatgcaaccgcacacagccacacacgcacacgcacacgcacacgcacaccccctccacaggaggcagcctatcggtttcgccgcgggcaactgggaaggggcacgccgcacgccaggatcttagaacctctcccaaaggcagcaacataaaaatctaaacccgtcccacacaacacgctcccactcgcacgtccccgtccgcagcggcgcccggcgtggtcggcatgcagcgcccggcgccggacacgtgtgaactgcgaaccaccctgggcgccgccgcccgcagcccgccgcggccgattgcccgaccggctgtggaatctctccaggggacaagccaacaacatgtactgcccaaggccccgcctcgcatcgcccgatcgaaagcgcgtcgacgcgatccgatccgatcacgcgaggaacaaacaaaatcatcgcttcgcttggtcttttagccgtccgcttcacgacctgcgggaagcagcagcagcagagctacagtagtggagcggcgtcgaatcgaatcatgctgattgctgcgtgactcgtatggcactcgcttttcgtcacggccacttcgatatattctgctgtttaagaagaggcttttgatatgatattgcatcaggccgggaaaggtcgtggtcctcgtggacacggagcctagtgaattatatacaatgcagggcatgcagccgggaggaataacgcaacacgcatgttgacacggagaatcgagatcgatcttagcttcaatttttattaggttaaagtcagtcagactcgaggaaaagcaaggagggtaagtggtattgctgcgactttgctctgaagctaatataagcgactgtatatatagtaacttatgttttgatggcgaggtctgcatttatttaaccaaagacttgcagtagcaactagcaactgctccacgacgtgttctatactaatctaccgaagctgttcatttgtacattcatgttgaccacaacattgaccaaagaaaggttgaccagtatcagctcaacaactcggcaacttttctctctgccacacggttttcagcccccgttttttgtctgctgcctgactgagctatgggcatatggccatgttatgttatttctttgagtttgagacgactactcctgtgcaggagtgggcaaatccactgtcatattatatccaaatgtttatgcgcttctacgctacgtaaacagatagacgcatgacgatttcgtgagcgaacctggatacactttataaaaggaagagggccatgtttttcttcgaattgcgcataaattatctcaggatcaaattatttattgaccaaattgcgaagttgacagttaccatcatgctccaacctactcgcgagttaacttgtccagggcttcttccaaccacgtgtactgttggtccactgtcaattagtttttagttatgatgtacatttaattcaatcatgataaataaaactgaatcatcactgagattaaaggtatatataaatggattgagttttgctgatcaggtttgcaatccgacgcatgagatcaaaattatgagtttaaatgataacttgataagtcacaaagaatcctattaatcagtgcgacacttaagttgtagtatgggatggctaagagctcaatcaacagctaattaggtagtgcatctagggtttacattttcgatggactgctggacctaactcctggtagtataccattttctcaacgaatttccataaattttgattacattttgcttgaatttactgtttcaaatttgaatttctcaaaaacattcaaaagttgcctcaaaatatattctttcccgtgcccaaacctcaaatttcgtggtttttcatcaatgtcgaaccctgtatgcatcccttcggctttcagccccaccctctaggtggcactcatgacattacagcagcatctttatccttaccgctgactcctccattcaccctaagaacgatactcttaagtcttaaccaacctaccaatgtgatggcttctcaatctgcactagtcccttttcccttaaatttcaccaaaaatgtcaattattatgtccaaattcaaaatccacttaaacattttgttcaaaacgtgttggcaactttttgtgacaagttgacaagcacgatcatagcaccttatgccttgcagtgatcctagagtcgccaaccacctcaatctagcaaagagctaaacttagatgggttttgacgaataaaccggctagcggagccgattttagataactacccgtctcgtgggcaaaacggaaggttttcaggacaaacctacaaagagatgtcgcactctcgcagcggcggcggacggtttacggcgcaaaccgacaaagatggacaaactaagagaaactaaaagcaatatgaaaaacgattcaattgattgattgtagattggttttttacaatagaaccggccatgtcccttatataggggttggtcttgccctttacaggccctcctccacgttcaactcgggataaaaaccaaaggaaactcgaaacataccttcccaagcaaggaaatcccgaaacccgatgaaacacagtcggactcggacactgccggtcagaccagccacacaccgccggtctgaccggccttcaacaggaggtctgaccgcccgacacacggcggtcagaccggcccactcggagaaaaccggtatacttccaaatcttggcgatctttcctatcttaattttaggtgccaaatttgggtgtaaacacaaaacattcgataaaaaccaacaaacctgaaattcccatgagcctccaagttttcttctagttagaaccagctggtaggatggtaccactatgagatcggccaaacataaatattatccacagccattgatgtttacactccccactccagtgaatagatcagatatatatgcaataaatcaacactcttttatgcatccgtccggctttttgctatgatgacggaacaagatacaaggctgcagtgtctcgtcaggttgtggtcacaaagatgcggaatagccatgtcgttctctgaacataagtgcaccggtgtcctattaccggggtcatcatcttagtcataaaccacactagcagcatttccgcgctcggtgggcccaccattcgacgcatgcatggtgtgttgtgagccaaaatattagccaaaaggcactggccggaatgtggatgacattccagggacagataagaaaatcaatagaccatgccactagagagaagaaatgagtaggagagaggagtaaagatgatcaggacatctcaccttttatcagtgtagacagaaaaatcttactgattatgtgctggaaaagttagatctaagaacaaatggagatgctcttacagctggatagaattatactatatgtactgatctcttcccggccctcaacctaaagtcatgtttttctttaagaaaaaaaccatgaattcgcagcatttttatggaacaagattagtttttctggaaaaaaataattaatcctctatatatcagtatattccaaaggacctctgaatggtttcgtggtaaataatattttacataagaagttcatataatgcttaatattgggctgttgcacatatggtatataagaacttttacggtaaaatatactaccagtatatactggtagtatatagaagggcatgttaagaatttgatagaaaataaaacaacactctagtaatttttgtttcagattaaatctaattggagtacccggtcctggatcttatcatgcgctaagagaggagcatcgtgagcgctatttgatgacgaatcacgtgacgataacacgatttgatgaaagaataacgaagaaaagacaaaattaccctttcaaactttatactgcaatctaattaataaaaaatcaaattaatctacactgttagatcatatatacttgcagtatatactagcagtatattgtaccgtaaaagtcctcatagcatataggctagtctattataactcgttaatctaatatattatgaaggtagcttgaaaaactaaccatgttcgctctgaacaagtactataaattctcacattaattataaaaaagaaaaaaggtttggaccattaaattatatatggtgggttcagattatgatggtttagatcaattgatatagttatataaatgagcatgttcggctaaccattacagccgctacagctaaacacaaccctagctgctatagatgcagacaccgggggcggatctaggaacaaaaaattgagaggctcaattatacagtttcttcaacctccagccatttagagacctttagtttattattcatggtgaaaaaattgaagggggtgct

SEQ ID NO: 4601 - DNA, 1833 bp, Oryza sativa
ggcagcgacagcacgtcggtgatgatgttgccgacggtgctgacgctcgtggcggtgttcttcgggaactcgctgcaggtgtcgttgaggcagcctgcggataccgcgtcgaggcaggtgatggcgcagccggcgttcttcagaaggcggcagggcttggcaccgcaccgcacgccggcgtacgacgaggacacgtacccggcgtcgcagtccacccagagcatggtgcccgcgaggtccagcacggccttcacgggcacctgcggcgtccgctgccggaacatcgtcacgtactgctgcgtcgcgtcgtccttgctcaccggcagcaccacggagctcggcccgccgcctgccgccgcgcggcacggcgagaccgagacgaacagcaggaggagagcgccggaagccacagcaagaggaggcaagcgtgccatgctgacaagagtcagaaaacgaagaactcgatggggatggagatgtgaacttgtgaagtaatgatgcggcaatcaacgacatttataggcgcaacacgagcgatttgggtctccccgtctcaagtctcaacctcttattacgagttacgataccgcggcgagggttgggcagtacgtagtggcgcgcaacctgcccaccgcggggcgagacaacgaagtggacagggaactctgctgttctggtactagctagctgtatttgacggtctggagatgtgcgatctttggacgcgtccatggcgggccacgcatgcatgcacgcacgcctagatcatctgtactacatgtacggagtacattttcttatggcctgtttagattaatttggtctgataattttttttaaaaaagttttggtggtaaaagatttggcattgaagttttgctagttggtgtttacatgcatggtaaagttttgccattttactagtaaaggcagagagagagagagcacggcttccaacacactttttaccaaaatttgttactctagacttccaaatgacaaatgccaaattacaaacttttgctactagtgttgagatctattttggcaaaaagtgccctaaaacagcaaaacttttgccattttggaggaaataagggttccttttaatcgcaggatcgagaaaacgtaggaatatgaaaaaacataggattttgataggaatatatgggccctttgattcaaaggaaatttacaggaattttagaggattttattcttataggaatttttcctatatggccctttgaatcaaaggaatggattctatggaatcctatgaaattcctatggaatgcctcttcccatgcaagtttttttaggaaattagggccctttgatttgtaggaaaaatatagaaattttggaggatttcaatccgatggaaaaaaaaatcctatgaaggtctttgaaacaaaggattgaatcctatccaatcctttaaaattcctatggaatgggtaatcctatgtatattttggaggaaagttagcaagaggtctaacctcttggaaaatttcctctgagtctatctctctcatgttcagaatcctatgtttttcctattcctttgttttttcgttcctatgattcaaaggtagaacctcatggaaagaatactttgagtctttatctctcctcaaatttatgtgattttcctgcggcccaatcaaacattcattcctatatttttcttgtattttgcaatcctctgttttacactagaattcctgtcagaatcctatgttttttctattcttccatttttttcattcctgtgattcaaatgggccctaagtgtaaaacagatgattgcaaaatacaggaaaaaat

SEQ ID NO: 4602 - DNA, 18975 bp, Oryza sativa
gtgagctcctctactcacggtcggcctttggccactgttgccttcgccaagcccgtcctctcccttttctaatctccccttcgtcctcctcaggctcttccggtcgtcatccgccactcctcgctcgcggactgccattgaaccgccgtagccgtgcctccccgaggaagcgtcgtcgcctctcctcgtcgtcggtcgctctccggcgccgcctccgtgccttgtgcgctcggtgagctccccatctccttcctctgcctccctccgctgcctcccgcgcgtgccgtcgcgccggtggtcgtcgccggcgacctttgggctgctcgccgtcgctccccggccggtcggccggcgagttttgccgctcccgctagctgtggccgcccgatcccctttggggtgatccgggccgtctacgtggctctggcgccgccccgcgccggtgtcccatgtggcgccacctcggcgccatgcctttgccacctcgccccgccgtgccgtcgtggccgccacgtggtcttccacgtggtgtgcccgcgcgcctgtgctgcggtggaccgagtccaccatgagccaccccctttgacccgctgacgtgtggggcccacctgtcggcgcccttcctcttgctgacgttagcgcttatcatttcctttggaaaaatatttaataattgtgcaataaattggtattaattatagaaattcatttaaatggctcaaaacttctaaaattcatatctaattcattcgaactccaaattgggccattcaacttacaaaattcatctaaaattgagatctacatgtttgtttactttttatgtactgtttccttggtttttattagattttttcctcgttttgtgtgccagcgtgtagaatccgtcgtttcggaagatcgcggtcacgaggaaaagagttcagaagatccaagtgaagaagcaaggcaagtcacacattccccttgaacattttgatcctaatttacaaatgttttattgtttgcaaataaaattgcatgtcttgctaattacatgggatccgggtattacctatctgtttgcttgtgccatatttacttgatatctgtcatttgtcaaccttgggtaataaatagactagctcatgttacttatgtgacctagctagaactatatacttagtcatgcttaattaccactagctcagttgatgggataattacagtattagatctttttagtatcagaatgagctgcgtgctcaagacatctagccatacttcatggtcgtaattatccaactaaaatgcgactacatggtgggctgtgggtgcatggttttgctagtcgtgcccatggcgattaaggaccggttcgcgggaaaccctggaagaatttatcatgcttaccataagccagcgtgggcaacggctgggcttgtagtgtagctttcctctagctgacgcatccaggcaagggtgggcgtgatggagtttggatgggtcctgcgacggcctatgcggcttccggattcacctaggcacgagaggggactgcccgctatcttgcgaggagtgggggtgaaacctgaggtgtggtgtgcttggttagagggggttatgtgaagggtcctgtcacgacctctttccggtatgtcgtggtggcatgtcggcgcacggaaacgtgtcgtggggctgtatcttgtaggtacagttgtacacctctgatcagagtaaaactattcgagtagccgtgcctgcggttatgggcagtcgaccagattcaccgtgattagtcccaccttaataaatcgactcaatgcactgtagttcagatgggttggttgggcctgttcaacgtggtgtagtgttgatcagtgaagatttaatgttactttaattactcaatagttttacggttttgctcaataaaatgttttacaaccgcctttatgcaaatagccacaaaccgtccttgtgttccccttgcacgtttgcatcattggtgtggcttgctgagtacggtggttgtactcagcctttgctattattcccccttttcagaagtgtagtgcttctgagctgaagacgaagttagaggaccaagactcagaccccagttgagttttgcctgtggagtggagctgaagccccgctaggatcgtcttttctgctgccgttgcttttgtttcggtgtgaggactaagtgcctctcctgtaagtattttacgctttatttacgtttggaactgtttattacttgtcgttttgtgtaccctggctggtcctggatagggatttaatacacaaaatagtctagaaatttgggctaaatttctgggtgtgatagaatgggattaatccgaagcgccgccaatgtagaggcggtcgatagggacaatatatatagatggagcgttgccttgtccagaatagggaaggagaggcgcgggggaagagagaataagcggaaattgaaccagagtgtggtccttgtggaacaagcttacaagggtgacaacttgaatgagagtgttctcatgtatgacaatatgagagaggcggacataagagaggatatattttcacatgttattttctcattaagattcatattttatctcgatttcgatagcatgtttttcaaactactagatggtgtgtttcatacgaaaattttctatgtaagttgatttaaactatcaaatttatccatttgttaatgttgtaataattaaaacttaaataatcatgtgctaatagctaaattaatttgtacaaaaactttctcattacatgcacatgattaattaagttttaattattataaacttaacaaatatatatatttgatattttaaagtaacttttatatagaattttttcacacaaaacaaaacatatagcttaatagttcgtaaaatgtgctaacggtaatgagacaagaagggagccgctaaataaattggacggctgagatactatctgctataggaagcgaccaaccaacgtccacgcttctctgcgaaacacggaagctgcagccgcggccacgtcggcacaaaccgaaggcgggaggacggacgacgaccctccattccccatctcttccaccatctctcctctccctccccacaagaaaaacctcgcgcgaacaatgtacagccctctcggcagcggctgcgcgttcgcggccgcggccagctccgcgttcccgccggccaccgtccccggcgggatattcgcggggaggaggaggaggaggccggcgaggctggttcttgcgtgggcgagctcggatggctcggacggtggtggtgccgccgctggtgcagtggcggccgaggcttccgctgtgggagagagcaaagaaggggaggtggccagtggcggaggttcttccgctgagtcgtcggcggagaagaagccggctcctgttgatcccaagattgagaaggagctcaagaaggtcggctcttttctttgtcccttggtctaagaactaagcattcagctcaggagatggtatctaatctctcgggtggacgtccacccgtttcttgcataccacctaaatgattatgaaaaaattccaaaaaaaattataagataggttaatatgtaatatatcatctcacaaacatgcaagtccaaattcgacttctacaagttgtaacaaaaataacaaattaaactctaactagtatacatatattcacaatcaaatttgttatttttattacaacttatagaagttgaacttgaacttgcatgtttgtgagatgatatattacatattaacctatcatgtcaatttttttgaaaatttttcataaccatttagatgacatgcaagaaacgggtggacgtccacccgagtgtttaaaacagtttcccattcagcttgttcgatataattcataagttgttgcaaataatactaggcaactgtaagaattcgaaacacttgaaaacttcacaattcgatagaaacctagtacaatgaattgcaggaagaaactaatttgagccatcagaaatgttgtagtcttctaataggtgatttaactttagagcaagtttaatagtatagccaactatcggctccaaattatatatagtcaatttaatagccaattcatacaatagttacctatatgtactacatcattaatgtttagtcccacctgtcatatacatatgtatcttggagtccgtattgtaactggctacaaatctgtagcctgctactcttatctctcctcttttatctctttaaaatatgtgtatagctggcttatagcctggtattgtacctgctcttagcatacatctagtttttggtcgtaggcccatatgcacaaagaaactcaaaatgttattttaaagggtagaaatgctaaagatttttgctgatacagcaaacaacatgacttcatgaggtcaccaccaaataactatgctgtgttcttgagcaggcagttcagaagaccgcagcaacgtttgcaccaagggcgtccactgccacaaagaaccctgcagtgcctggaacagctctgtacactatctttgaggtccagggatatgcctccatgctgttgggtggagccctttccttcaatctcgtgttcccgtcgaatgagccggacatttggaggctgatgggaatgtggtccatctggatgttcagtaagtaagaatttgatttgtggtacttgtcgttgtgcagtaagtttatacgtttgtaaattgttcccatcagcagcaaggattatgatctatccatgcatcaaccaagcccttgctcttttttcgtaagcagcaatggctaaaaatgtattgaaagtgctcttgtgctacaacattttgaatcaactggcacaaggggttaattcgtgcttcactagccataaactttatagtgcagttcatccagttctagataaagaatagttctaagagcaactgagaatttattttctttctagcacggtgtctgtttagctgttctatatatgcatatatgctgactggaaaaacatgatgaaatatccttctctttgccaacctttaacaaaaatccttgaggttgtcatatcaagtagtaattaacagtgaatctgtctctcaatattaattattaatctgaggctgtcgataaaatgaacataatttgatctctagatgctgtgtcgctgttgaggttaataagattcaatggatgcaatgaattagatacattttctgtgatgctgtaactgatcaactacctacttctgcagctataccttctcttcgggcccgtgactgctcaagtaaggagaaagaggctctcaactacttgtttctactggtccctctaatcaacgtcattatcccgttcttcgtgaaatccttcgctgttgtctggtcagcagatacggttgcattctttgtgatgtatgcttggaaggtatttcctcatgtcaaatgttgtctgctccttcaatattcagccagttttgttgtcaaatgtttaacaagattcatttctacacagcttggatggctgcaacggtcagagtgaacaatttcctgaacgaaggagcatttgaactgcaaattttgcctaagtgaattttggagggcacgctacatgcgatgaatttttcctagatttagtttcgtgtacatccatggagtgtaaagaagcttgctatgtagatgtaccttaaattgtcaacattagtgttgactaggaactgggcatctctcaacctgttatggtttcccagtagatcatatatgtctgcgcgctggcatgaaacggttgccaattgcatctgcttcgttcttggggctacaattcgcaactgaatttgctatatatttgtcgacaaattttccaccaaaaatttaacagatgtaattatagtacaatcgtagtgtaattacactgtaacttgcatgtaattacactgtaattataatgtaacatgtatgtaacttttaaaaatctctccataacatttatttcggtaaaatggaggttgtgagaacaaattctttcacatatgtgtatgatgtgattttttttcttcctcaccagaacaaatcttataatagatctaacgattcaaaattacgtgaaacttacatataagttacactgtagttacatgcaagttacagtgtaattacatatgagttacagtataactacactacggttgtattataattacatctgtcaaaaagaaaatttgtcaaaaagaaaatttgtcgacaaatgtatagggagtattcctttcttaaactatgaatttactcttttggaaaaaataagtctctttgtttgaattttagaactttgaattttttaccctgaaaaaaaaaagaaaaacctaaccatttaaatctttggtatccttcaaatcttcggtatccttcgagtcttcggtacgcttcgaatccttatggggaagtctataaattatacgccccttgcttgaatcataacgacttacttcaattttgactctatcccccatcagtattcgcatagaactagaccggatctttcctgaaatatagcccaggatgatggtgtcattctctaggcgaacgcggaacattccgttgggtagggcttccataactaaaccctcgaaagtaatttttgcttctctcggggtttttttttctctcctatttttcttttctgtcatatttttttctcctatttttctttttttattttcaaataaaaaaatgttgtatttttgtttgaaaaataggaagttcaagatagaatttgggtactataactataggtggggcgattaccatatataacataagacttctcctccaattttgtttagtcgagcttctcgatctgtcattatacctcgagaagtagaaagaatagcaattcccattccagccaaaaccttaggaattccttgatagttggcataaattcataagccaggtcggctgatacgctttaaaaaggttctagttctatatattccctttctagtctttctcttttgatgtcgcaaagttgaaaccaagaaatatctattactttcctgatgtttccgaacactttcaataaaaccctctcgtagaagtattttaacaatgttttcggtaatatttgtagatactacccgaatagttccttttttattcatgtctgtgtttcttatagaggttagtaaatcaacaatagtgtccttgcccataagactctaattctaggttcctcctaatttttctataatcaacatgttctcttttttcttttcgttttggattctaaagcatatacgtgaaacacaatctactaattttttatttgatctatatcttgtctactagtatttataatacttcaggagctaatgaaactagtttagtaaaattcaattctctcaattcctcgacgatcgtgccaaaaacgcgagttccttttggatttcctttttgatcaatgataaccgctgcattgtcgtcatagcgtattattataccgtcttcgcatttgaactctttacatgtacgtacaattacagctcgaattacttgagatctttctagaggcatttggggcactgcgtctttgattacagcaacaataacatcaccaatacgagcatattgctgattactagcagctcctatgactcgaatacacatcaattttcgagctccactgttatctgctacatttaaaagggtctgaggttgaatcatattattttgatttcaatttgttatttcaatgcaaaaggatgaaagaaatattgtctttccagaaagaagaacctggtttttttattttcaatactactttttttggggggttatatttctaaccgaagaaattgacttcgtatgggcattttgctggcagctatggaaatagctgctctagctatagtttcggatactctgcccatttcataaagtattcgacttggtttaacaacggctacccaatattcgggggatccctttcccgaacccatacgtgtttccgtcggtcttattgtaaccggtttgtcgggaaatatacgtaccagatttttccaacacgacgtgcatatcgtgtcattgctcttcgtcctgcttctatctgcctcgccgtaatccaagtaggttcaagtgcttgaagagcatatctaccaaaacaaatacaattgcctcggtaggattttccctttattcttcctctatgttgtttacgaaatctggttcttttggggttatagtcgatggttctctcttagttccatctctactgcaaaactggacatgagagtttcttctcatccagctcctcgcgaatcaaatgagaaagtgtgcaaatttctctaattccacaatattctaaaatattacggatagatacacattaataggaaaggttagggtttttaatattaaatttattaaaatactaaaatatatagtcaagaaaagaggatctagaatatatctagatgtgtatgtttatttatctatattctatatttaatgtaattcttttttttaatctcctttttttattttactcttattgaatcgcggtaaagtattctaattcaataaaaatttcgcgggcgaatatttactctttcatgtcttatttgttaattcataaccttatcaaataagacaattttttttggtttgttccgccatcccacccaatgaagtattgggatttttttcaagaaaatcctatccagtcataggttctgtcattcccactgcttctcctttaatggttaggtttgaatctcgcaatggagcttccaaaaaatttctttccgagtcaatttctcagtttattaactcaggacgctctttgttattccttgaaatttgtatttcttgtttcaatcaaattacgatttcgaattctttgttatttttattatattgatgctttatcacattgctttttatgatgtaattcatagaccatacatattggaatcctatatctttcttttttctcttccttctttctatcatccttccttttatctacatcccctttagttttgcttcacaacttagaatcctatttttttaaagaaaaaattgcagttgctacacgtatatgatagatttacttatttatgatagatgtatttattcatatagtgactgtttcttagttaggatctcgacaatacgaagcaataggttggttattagttcattttctataattacatagtagggttcattctatttttttaatcccctttttgaaccctaaaaaaaactaacgagtcacacactaaacatagcaattttattaaaagatttctcaattttcattaaatcttatagaaagaggtagaatttcttctttttttcagggattttagggaaaataaggctcttgtcattttttattctattacttaacagaatgggaagacagggttggttattcttcatctacgaatatccaaattttaactcctaatactccatagatagttcgaattggatagcagcaataatcaattttagatcgaattgtttggaggggaagtctaccttttttgatgcattcggcacgcgcaatttcttttcccgcgagacggcctgcaatttttacttttactccctttatatatgttttttagttaattcaatgacccctgtacatttgtcgataaattttctcttaaaaatttgacagatgtaattatagtacaatcgtagtgtagttacactgtaactcatatgtaattacactgtaacttgcatgtaactacagtgtaacttatatgtaagtttcacgtaattttgaatcgttagatctattacaagatttgtactattacaagatttgtactagtgaggaagaaaacaaatcatagcacacacatatgtgaaaaaatttgttcccaaggtctccattttatcgaaataacaagttacggaaagatttttgaaaattacatacaacttacattatagttacagtgtaattacatgcaagttatagtgtaattacactacgattatactgtaattacatccgtcaaatttttgagggaaaatttatcgacaaatatatagcaaaattatatctcattcatatgatcaattgaccaccatatctggttctcttacccagtttcactttcatagcacgtatgagagcacgcttgtgctttgatgctttctcgcgttgacaactcgaaaacgtgtttatccatagttccatgcccgtatctccaaaacgtatttctgatttacgctttcaaggtgtgcagcgacatcaaaatatgtatatggttcagtgccttatttgaggcaaatatttttcatggaagaaagatcaaactgcaccacatctcattcacatgatcaaattaaccatgtctgaaaacacgcttgtgctttgatacttccccgctttgacagctggaaagcgtgtttctccatgaccgaaagggtccaatgtccgtatctcggaaacgtactttcgatttacgctttcaagaaatggaccaaataggagtccgggctcgagccactcgactcgaccgattcgacaccgacgaaagagggcgaaaaccatgggctcctcctcgagcaacggccggaccgcgcccgcgccgccgcctccggctgcgcctgcgccgccgcacccactccacgtgatggacgccgacgaggaggacgagaacgtgaagcagctcagcgagtgcgccgccctctacctctccctccaggcaccgattctctcccgctccctttcccctctccctcccctgcgtgttctcttccccgcctcgttcttagtagttgaggacttgaggaggcgaaggcgattcctgtcctgctgccgcgcgcaaatctcttcctgacttaacagtctctgatcttgctgttcgcttggatcctttgcaggattgcctcgtggagtccaaccgcagctggaaggcctgccaagcacgtaagcatcgcgacaaattcgtcattcctttctctctctctatagtaggccttggcgttcatattggtgaactgaatgagttgctgaaagttgctgattgcttgctcagattggaactgatcaactgaatttgttgtcaaatggtttggaattaggcaaaaccttggatttgtagtgttgtgttgaatacccaggataactgcctcatgttacatgtgaatggtttctggtttatcaagtgttaatgtaaactcaggaatgctacgaaattttcttcttcaaaagagagtgcttatggtatagctgaagtgaggctcacttgcttatcacattacactctcagagagaaaaggaaatgtggggaatttttcttgcttctttgggaattgaattgttttgtatgaaattcttgcatatagataggttcttaatggcatgatatggccttcaatagcttaaaacgtgctagaatgggagttagaatcatccaagataaatctacatgtgaatgtggtttagcttcatgtctttcctgaaactattctaaggcttcgtgaagttatgtctttcggcgcttctttacaaccatgcgcacttgtgcgatattactgggtaattttctagtaaaagaagttgctgatccatgaggcaatttgtacacatttggcttacctaacagctcgcaggcccttaacaagtaacaacagcaggcatgcagatccaactttgccatatagcactaatgtcctaggctcctagcactgcacaaagtttggtcacacatttgcatcctagttgctttccaaaatcgaataacttacagccacattttattttgtcttttggctgtacaattgctgtgatgaggttaatgtttgctcaagtcaaggggctagacctgagttgagatgttgcaattttaagatgccttgcattgtgatccgagctaaatgtagcatttctttgaggataaaagtatggtagctatgatagttacatccatatttgtttaaagttagtgctgtcttagttttccacaagctggattctggttttattatcgtaacattatctcactttgttctaacaatatctgtgttgcttcctttttatggcagatgttcaagccttgaaagcatgtgaggcaaagagaaacaaaagtgaaacaagataaaattattttgcaatatttggcactaataccaggcaagtagaaagttaatatggtttgaagagttttgaaatcaactgacttgtttcttcaaatattgcgttatggctgttgccatcagcatcgaactgaacactatgttttttcaccagtctgcttttggaaggtttatcatattcttcattgaggatggcgacaccataggcagcgtgtttagagctgttagctgatgatggagaaggtctacagcatcataacctggagttaacttgttaaaagaacctgtagttagatttcgaccgaaaggacacaggatgagctcgccacgttaactgaacttgcttgattgtttctggtggcagtcgctgtttcttcacattttcatgaaatgagacaatatcagcattacatgcgcctttggataactgctgatatgagttcatagcttaagattatcattgttgctgagatgcctttaggctttttcaatacctgttttggctttgttttggggcgcacatggttcgccacatcgtctatacaagtgacatcgtagcgacagaatcagcgtcttcagtgacgcaactgccattgcagaccgagaacaccaactcctgccattctcccggtggctttctccatcggatagtttcttccgtgttcaattatgtacggatatgaacttctctggttatcagaaaaaagtagaactggaagtgtaaataggttacagccaaaagttttcgacaatcatcagacttggtatttcgcattattgacaaaccgcagagtataaattgctttctgaaaaatccgatacttttttaataatcacaggtttactatgactgcgcagactgttctattgcgggcttatacttccatgctcaaagcttactatcttctgaggctggaatgaacttgagtgagatactgttaacacaatgccgctcatctgtaggcgtgttgaacccctcccctttgaagacatgtcctaaatgtcctccgcaagccgcacaggtgatctctattcgcctgccatcaggatcaggctgaagttgcaaaatagtgccagcatcagtaggagagtatggaacgaccgaaagaggaaaacaaaacaccatatatattcatcgccattcgatgtagaagacaaaaccataccgttcgtgcgatggctccgggaaatccttcatagaatgctggccaaccacaacctgagttgaatttagtagatgacttgtacaatggagtcccgcatccagcacattcataaacaccctcagcgaagagcttgtcatattcacctgttccaggatacctggaaaaaaaaaaagatcaaatcaaaaaattagttcaagactaccagattaaccatgtcatacaccagtaattcgttaactgtacgacaacacaaatgttgataatgagaataggatcagcactgcaacttcgtacagaattatctttttgcagttttgttacattactcaactgtcaggactcaggactacagttgcagatcaggaacaaaacaagcctcaaaggatggtaagttggttacaaccaacaagcatttgtagtgacttcgctttagtaactttggctgagctatttttcgcttacattctgcacttcatgatatgcagctgtgtccaatgagacaataacatattggtcgaatagtagacaaaagaaatattaccgagaaaagggttcatgcactagtactatgtctgtatagcaagatacaatcctggtcaagactcaagacaaagaggatatgtctagagacaaacctaaaattaacatttcatacaggatcatagtaacaagctgatttttttagacaatcatatgtatatacacagccagtagtaacgggctggtaaactgataaattttgtcttcagagtaaaatatcagatactgttacacatgaaattccacatgtaattctaccatttgatatccaaagtacagctggtacttaatttatgaacaattgtgtgcacaaaaaatcattatgtcatcaaaatgcaaaaaataggaaggcatccattccaagaacgtacattcagtcattcagatgagagttatgttttttcacaaactggcaaaaggattgcacgtcattgtattagaagaagcaattgtagtttacacgacatgatgactgggagccatcgtgagtttacatatcagtttccactttcctactaaatctgtagccataggtgcgtgtttttcttgtgcttgagccgatgattaggaaactaactatatctattgtcacatcattttaattttaaacctctggaatattagtccttcaatttgttgctaattttgccaagttttttttttctaattactgtcaatttatatagacttttagctctgatgttttttttatcatctataaaaaatctttgaatttatgtaatactttttatacaattttttttatcacaatcatttgttaagctgcccccctcatagttaaagcctagcttcgcaactgatcacaagcattttagtttgttttttcttcttttgcttggtaaaatcaattggcctggtcggctattatttttgaggctgctcccactgcgaatagctttggctgtgcagctgtacacttcacagctgagcagggccaaatcataaccactttaaattgcattagcagatctagaaacgtttgcagcatgcaaaaatgtcccagaaatgcaactagataacattacagctgttgacccatggcaaaaaaaaaaaaagatggaaactcgggagcagattaataaagagacaggatggttggctgtccagagccagtaaccatgcataggcaagtcatttctgaaagagctcttgcaaagtagcaaggaaatgcacccttccacacatgctcatacatgatccgagtatatactgattcaaagttttaagaaattggcattatcagaaacggaaacagaaacagatagcaaattagcaatgactttacgctagtattttttattctaaggggaaaagaaggataaacagtgggaagaaacacgtcttactccgtgcccttgaggcggaggatgcggaactgctccggcgagaggatggcctcccactcctcctccgacttctgcacggatcccggaggcggcggcggcgccgacgaggacatcgccacgacgacctgcagccgccgccggcccgccgtcccgcggcaccggctggcggcccactggttgtggttgcagtgcggccgcgagcacgagagggtgacgtgccgaggaggaggcgcggcggcggtggaggagggccgggcgaggaagaagaaggcgagcgcggagagcgggcgcgcggcgagcggcgcgccggggtgcgggtgcgggtggggcgacgccatcctcagcttgagcagatgctggacgcccatttttttttcttccttggcgtgtttcgtctggcagtccgtagtacacgtgtccttttcgttttctggtggcgctgatagctgataaggttcttgtgcaagtgtagtgactggataacttcataaggccatgtacaaatgtacaatatggtgcctcgtaactcactgaaggtttgaagtgatctcgcaggggggcagatgaaacagtggttgaactgtggttctaggagagagagaacgatttgtgtgatccagaaagttacagaggagaaaaggggaactagaggccattgacgagttgacgggctggaggtcatcgccgccagcccatgcctcgttgtggcccgtgccgccagggagggaggagagggagcccaacggcggctccgaacaaatcgacgccacctccgggaagacgctgacaacggcggtggctcggccagatccggcgagcatgacgccagatctgtggatctctctggttctcgagctcggccagatccagcgagcatgatgccagatccccgctggaaagctcaagctcgagcgccaccgatcctgtcgccctttgccacacgaagctcgacgtcaaagatctcatcaccaccatgagctgggcgggccacgcctcgtcgacaaggcacagagaaggagaagaggagcaccgacagcaaaggagaaggggagcgcctccgtcggagaaggagaagagggaaaggcgagaatagcgacagtggtggtaagggggtgggggtggaaaatgaatgtgagaggctaactgtgggaccgttaggaggttagagtatatatatatatatgtgttcttttttgttgttataaggtctaaaatataaaagtattatcgatgtgataataaaaaagttaataaggactgaaatgaaaaaacatttagcacttagcagtagtctccattaaagaattgtgtgtatattagtggccttagcctatgtagtaacttgagaccactaatagtagtagcctccattgtacatgtcctcttggaatacaaccatttatgaagaaaatgcagatctcggataagtcagcctcatccttttttttatacttatacctatcagtcaaaatttaaattttaaacctaaaatttagagttaattttagggcctttcatcatattatatcttttagcttttgcttgtagatgtataaaaaagttttattcacaaattatttttcatttgcaaatatgccgtttcactttttcctccaatatgccaaaccatggtgctgatacctgctgcgttccaattgaaaggcagccactttgttcttgtgacaacttctaaaactaaaacctgtagatatctctgcctttttctcttactgagcatctgaaatacccttttccagaaatgcagaaaatgctgcaacttcgttgctctccttaaagacaggattttagtcttagcacctgcaagttatggatttagctcatctattggcaatctatatcagttttgagtgtatggcacttgctggtgacgaaatctcttttccagcttgtaggcataagccgtataatcctctcaaagaaaatcataaacgaatggtacgtttcatgaaaaataacaagagatggaaaaaaaaagtatgcaaggccaacaaatgttctatgcagcacaactgtccaaattctgaagaaaatgtgagcccctaatgcactggccagaaccaggttaaaatgaagtttcgtattcaggaaatatgaactgtccacacgaggtattttttctcaaaaatatgtttctaaatggaaatgccaacttgtcagtaacaaatatgagcaatacagcactacacagatcaaggatatctgaatgcattggacctctaagctacaattttatatatccagcatttgttgatcaagccaatccttcaaaaacaaccacctagtgaccgcatgactgcatcatatcatgtacaacagagcatcaagctgaagacctacatgcaagttcgtcagcaaacagttgatacttgaagcatgttactcaataaactcatcatcggtgctgtcataatcactatcctcatccagatcttcatcttccacctcatcctctactcgctccgacaaagtgttcgtgtcaaaagagttatcaacttccatttcctcgatgccaatcgtatcatatttcatgcgctcatcgaatttggcatcagaacagtttagaagccatgcaagagagcatgtgaatcccttcttcgccaccatctcatgccgtggccttacagtcgactcaaggccatatgtaaagaatgcagggaattcaaccagctcctccaaatccctctccatctcattctggaagtactcaaagctcatcttcattatatccatgttcaatgcgagcagctgtgggcatgctacgaccatcttgctgacctgagagagcaagaagccacaagatgtaaggaaattaacatgctttagaactgcagttcggccaaggctaatggcttgtggcatcctctctatcactctaccaaaatcttcactgctgaccaaaatgctagactcaaacaagctctgttgtgtagcaagcttgtctctcagctcaattccaagaatgtctgggtattgtgccacaatgaatgctaatgcctccttcctcaccccaaattccagaagcgcctcaatattaggcttcaccttgtcctccaacccaaaaccaagaacatatggcttcttctcgatgattcttgcaatagctagcctctgcaacccaatgccctcaaggtgttcgacgaaaggcttaatgatcttacccacccgcatgcccagcacctctgggaaacgggtgatgacgctgccaacctgccgccttgccacgccaatgccgacgaggtaggcgatagaggtgctcatggttccctcgagcttgaagccgaggagctcggggtagcgctcgagcacccgcggcacgtcgtgcggcctgacgtccatgccctggaggtacttgacaacgggggcgaggtcgacgacgacgctggcgtggagcacctgcgggtagcggcggagcaggtccgggagcgcgtcctggcggacgccgagcttgccgaggtagtcgaggacggggaccatgttcttgcggacgctgcagcccagcgcgagcgggtacgcggcgaggtcctcgttggagaggtcgagggagtgcaggaactcgacgcgctcgcgcatgacgtcgacggtggcggggagctcgaggccgccgagctcgcccgggtcgactccgagcgaggcgaggaacgcgtcgacgtcggcgcggcggccggcgcggccgcgctccatgtcaaggaggctggggcgcgcgtaaagggaggaggagggggaggggcgggggctgggccggggcctggcat

SEQ ID NO: 4603 - DNA, 30548 bp, Oryza sativa
agtacggccgcaagctctttatgggcggccaaaattgcaattagccccttgccgccctctgtacgggcggcaagggcctaatcgcaattttggccgacggcggcagacggcgcggtcgacccaccgtctaccacgtcagattgccgcccaccattagggcgacaggggctatttctgcaatttttttggtccatagattatttctgtaaatattaaaaaaaaatctaaaaacgaaaaaagttcgatttgacgacgtgtatgttcggcgaaatctttgggcctgggattgcccttatcaaaatttgcctaaccaaccaaacatctctattactccctccgttttgaaatgtttgacaccgttaactttttaagtacatatttgaccattcgtcttattcaaaaacttttgtgaaatatgtaaaattatatgcctacataaaaatatatttaacaatgaatcaaatgatagaaaaagaattaataattacttaaattttttttaataagacgaacggtcaaacatgtgttaaaaagtcacggcgtcaaacatttcgaaacggagggagtagaacacaactttaacatgaactagctgggtggcccgcgcaattgcgcggctagcaaaaaaatcatatattttttaagtatgattttacttagaattaattaaatagctatctcattgttaagattttgaaaaaccaaaccttatcatcctcatgtttctaattatatagtttttaaaaatttgctatcccttatgtcatctccttttttatttgcttgctcgatctatcactatttctattcattcttcttggaacatttaaaaattggattttctagtttttagagtttattatcacattgggtttcgtttttataatttctagatgtcccgtcaaacattgccattatgctcctctatgcccatccactatctcttctctttattgtcattgagattttaataagtcaaacataattatcgtttgggttcatttttactttctagaagtcccgccaaactgtcagcggttttgccattgtactcctctacggctcgctcgctgcctcccttctttattgtcattgagactttaaaatcggacatgattatcattggttttttttttactttttagaattttcgaaccttcaaaaattagacttgtagtttcattttttataatttttagaagtcctagcaaacgatgccactatgcccctctacagaccgtccgccgcctattctttattatcattgtgattctaaaaatcaaacataactattgttgtaattcattttttattttctagaagtcccgtcaaccatcggcggctttgcaactatactcttatacaccctgcccgctgcttctcctttttattgtcattgagattttaaaatttgaatatgattatcaatgtgttttttttttactttctagaagtcccggcaaccgccttacttgtttgcttcacggcatgcccgacgtccctccttttaatcgtcattaggattctatttggtgttttattaacaatttttatatgacgtatcaaccgccaccaactctactcctttataggcatgttacttaatttatctcgtcacgtgttttagatggtcttttctttcaatagtctttatttttatcaaaaaattagttatttataaattttattcctaattgaaatcttttttttctaatttcagaatttattttttttaaaaaaaattagttaataccgtattgtgttcttttaatgtttttatttttttattttcaacttcagttgtttcaaaattgtattcctacttgaactctcttttaatttttctaattttggatattattatattttttattcaaaattttaattaatctcgtattgggttcttatatagattcttgtttcaatattgcttatttttaattatgaattttagctatttttaaattgtattcctactttgaactcttctttattttcttttgctaatttcggatttatttttatttttattctgatttttaattaatcttatattgggttcttatatggactcttcttttaatatttcttatttttaattccgaatttcagctatttttaaattgtattcctacttggactctcctttccttttctaattttggattttattttattttatttcaaaatttgattaatcttgtatttggttcttatatggaaacttctttcaatattgcttatttttaattcctagtttcagctatttttaaattgtacttctacttggactctccttttcttttctaattttggattttattttatttcgagttttgattaatctcgtattgggttcatacatggaaacttctttcaatatctcttattttaattccgaattttagctaatttaaattgtacttctacttcgactctccttttcttttctttttctttttctccgattaatgtggaaatttctagcccaaacagtgaacatggtgcctcctttcagagctgttttaataatataatagatagatttagctttgcctgtaaacttgtgtcttataagcatagtttgacttcaatccaaatcaatattttcaactatagcatactaaaattttgttggtgctaaaactctaccaaatatttagtttaatccaaatagtccctttaatccacgaactatcgtggttaggtcaaccaaattatctccttaaactaaaataccaaacattttacaacatgaactattcatactagacaaataatcctcttagcattgttttagtcggttttaaattgagcttgcacacatgacatcagtgtggcaatccaaccaacaaagaattttctcttcctatgtccaatcacatccctagtcccctgctctctctctctctctatctctctcatgctggagattggagaaggtggacaatggtggaagatattgatgcaaagctcacggcgatggcgaacttgcgagcctccgcatggcttcagcttggttgggcaacaccatcctcgtcgtagagcgagtggcctccagacctatggtcgcgtgctccactgctctagcttgacagcaaggttagaggagagcctgcaacggagctcaaacttcattggggaggtgttggcggcggagtcaagctctttgtgggaaggatagctgagctcaagctctctaggcattatctcctggagctcgattgggtggaaaaggccgcaggcggcggcggagtcgagctctttgtgcgaagggcagctgagctcgagctctctaggcattatctcctagagctcgatttggtggaaaaggccacaggcggtggcgagcatcagtgcacgtggtggcgaagatgttcgaagagtattttggttgcggagcttggcgagatgtgcagctgcgtccgtgtgagtggtggtggagatgatgcgaccgtcggggtccatatatgagacttgtgcttttatccggatgtgcggcatcttcgttgtctccctcgctatcactgtcatattcccatcctcctcttcctcccccgtgtatcctccctctcccatggagaccagtggccaaacgtggcgtggacgcagcaagcgacggtgcgacgtatggtggtggtcgccaccggggacgagttcctagtgaggacgggattctcgaccccaagttggtttcgagctctacatccatgtgcctccactctgcctcgggttgctgcctcctcgatccgccttgcccaagcggtctccgcctttgccctccttctctagccataggtgtagagagagaagaggggaaactagggatagattggcttaggggcgggtgggtctagagattttttttatttgttaattggattgtcacgtttggcgtcacgtgtgtaagctcgagcaaaaaccacccaaaacaatgctcaaggagtttatttgtccaatattaatagtttatggtgtaaattatctagtattccagaccatgaagtaattcaatcgagcgcaatcgttaacagtaattcttttttgctacgaacaaattcttcacgcaggtgcagtaaagatgagttaagcacacgtaattatagagatttccccgcaaaaaaaatatagagatttattaacataacagcctatccacgtgggtccaactgtcagtgtgtgtgtgtcacgcgttcttctgacttctgactgagtgctgcgcccaccgatccgcccaatttggccccacctcgcagtgaccaggggaagaaaagttcggtcagatcccacgtgtacgcttagcaaattcacaaatcccaacctccccgatacatacgggtctccttcccacgaggccaccagcaaccgaaatcccctcctgacctccttcctcctctctccccgattccccccacccacccaccaagcgcgtcggaagcgatggcgtcggcggcggagatgcagccgctggccccggcgggctaccgccgggcgccggagatgaaggagaaggtggacgcctccgcggtggacctggaggccggcaccggggagacgctgtacccggggatctcgcgcggggagagcgccctccggtgggggttcgtccgcaaggtgtacggcatcctcgccgcgcagctgctcctcaccaccgccgtctccgcgctcaccgtcctccaccccaccctcaacgccacgctctcctcctccccgaccctcgccctcgtgctcgccgtcctccccttcgtccgtacgtgtgccctcctccccatctgatgatgcttcggttgacctctatcttagatttcttgtgcttgatgagaaattgagaatggttttattctgtgatcggtcgtagattcatccgcgtcccgctgattagcagctggtttgatttgtaggctacatagttgaatctagatagatcggtgcgttactatatgccttgctgttggaatcaaaactttggcctctagatctaggatctaattagttcacgaattaatacttagaattagacgtagtaagttctgcatcatggatttgcccactcgcattctgaattgggatgtgaagtaaatgtttgtgttatattataaactaatgctgcaattgcttttcctataaattgtgaatagcatttctatagatcatgttcagcgacgagtttatgacaaactagttaatgcaaacgctgtcggaaaattttgttacaaatgttatgagaccttaaatgatatgattcatatgcattttggtttggccttatttgtttcccttgacatcatatgatgcgtttgtgttagtcaagtgcggagtgtgatgatatgggcatggtggggctgtctttagaagtgtagaactcttctgaacacttgtgtatccagattatttttttttctttcaattctgaaatttctgctttgtgtttgccatagacaagattgttttatcccctagttggatcaagtaggcagcacacataactgtgtaagagatagtcaatgtatttagtccggtatgagttatattttaatagtatatggaaaaatatcaaggaaagtctcaaatcttggatcagtggggctgtttttttttactccctgctttttgttcatgttagtgttgcgagtaactaaacttcttcatctgaattttgagaaaagcctgagtagatgacattgttaattgtttggtaggatggaatggttttggtgctctcagctaattttgtgttatttcttgcagtgatggtcccattgtatcattatcagcacaaacacccacacaactttgtttacctgggtctgttcacgttgtgcttgagtttcagtattggtgtggcatgtgctaacactcaaggttggttttctttcctttgcaagttttagttagtttcttcaactgccaactgtactttttacataacaatcatttgtgtgctgcagggaaaattgtgcttgaggcattaatattgacctcagctgtggttgcctctttgactgcgtatactttctgggcttcaaagaaggggaaagaatttggttatcttggaccaattctgttttctgctcttgttttacttgttgtgataagctttattcaggcaagtgtacactcattttgatacaatatacttaattcaaatagcgatcttaccattacgaaaccaccaattgtaataagcactttgccgtgatatgctgtgttgcaggtgttcttcccattgggctctggaccagttgcattgtttggtggccttggagctttagttttctcaggtttcatcatctacgacacagagaacttgataaagcgccacacttatgacgactacatttgggcctctgttgagctctaccttgacatcctcaacttgttcctttatatcctgaacatgatcaggagcatgcaaagtgataactagccagtccatcagcaccaaccagacgtattgtcaacttgctcagtgacgtcagtgtgtcctgctctattaagtactattttgaacagcgatctatataaccgtgaaaacctcgtgatgtattttgctgtcgtctgactcaaaggatgagaccgaagtacaatatatgtatagttttggttgtgttgagtatgactgtcggaaatgtgatcccatgattgtgacgtggtgccaataatttttaccctgcgatgttcgtgaatggttttttttttcgtcttctgcaagtagaggttttggttcgtaattaggctctgaatgagcccatcttctcctcagttagtggtggagacaggagatcagcaggcaagcatgtacatcgacggtaggatactgaagttcactaatgtttctgatcttcgttacagaacaatctttcagaagaagggatattttattaaccactactcttgatcttgtttgttggcaacagattacttcgctcgagctctagtgtacagaaactataccagcatgctctttttctctgaaatttgaatgaaaagaaccacaaacgccagtaatattgggatttgaacatccgaacagcaaatcaaattgtacagaggaatgaatctcaggtatatgtgcgaaaattttgcacaaattttcagccatatataagcaaaccggatgtaaagctgcagccggcgtagaagtagaacacagcagaggccagcagggaactcgtgggatgtggctgcagcctgcagcggtggccggttaagttgacgggccgcagcggtggagtgcacgtctaccacaattcatttctgggccatataaatgttggatgcctgtaggtgtagacgtaaaacacgaggcatgagagatctgcttaactccagtacaggtccaaaactcgccttcgggtatgctagcgtgccagttgatttgattccgtaattaacaagaaataaaaacaaataaaccgcggttaaacctataaacgatagcaaatcggctaggtgccgatgacatatcatttatctttgagccgatgtcatatgtaaatcgatcggcggttgtaaatagataataaagaactaaatctactcgatcggttgtagatattggcaatatataattcttatatcgatatatacttaaatcaagtgattgagatagatcggtcgccatgccgagacagtataaatcacttagatcgaaatatatattaataacatgattatatatgttcatagcatagccgatcagatagatctagcatgtatcggctaatactccgatacaactctatattacgatgttaaaacagaagctgaatatacttagatgcaataatatcttaacataaagggcatatttaacgggtcaatgaagcgcatagagcaaatatagttaaatcagataagatcggctgccctctaccgatagatgttagccgattgtaggttagatagcgatattgccaaagattatgtaagatatatgataactcgacgaattacataaacaagattagagtatcataaagatggaagcgctaatcccgagaacgcaaaccgtcatgacaatttttacctcttgttgaagatcgaaaccgatgcagctcaacccgaaagcaagaactcgtcgaaataaaactaaagcaaaagggtggcgatgcgccgaaattgtattgaacgtgtgtgttaattgattacatgaggttcggggtctatttatacccgaaaattacaaactatattcatatcggacacgattattatctctaacaatctctaagataccacaagcctttgcggcagacttttacccaaacatatctctaaggaatttacataaaatatcctaattaatagatacaattgccttctcaggactctatccatgcacggcaatcatcttgaagcatatcaacccaacccgatgttgtacaccaagtcgtattgtcggaatcagctgtatcggctcacctagtttaactcggacacagccgatcctgactgtagccgatctggactccagccgattcttgctctgttctcagatcgatcttcgccttcgactccactttgatccaatcctcctttccgatgatgatattaccaaatttggtcgttaacagtaggccacaatctcattccggcccataaattatgcccttcgaccttgttcaatagaggaattgaatgggattgaaggacaataatttctcaccacaatcctcgcagacactcacgggggattaaggaaaatttaaagggatttatttcacacgtatagaattattccctatcaataccctccaatttctttctcctggggattaaacaaaggaaaaagtacaccaaaggtctctcaacttgtcacctagttacaaaattgttcttgaactgaaaaaccggatataacatattccccaacttacaaaaccagtgcaaactaggtcctttggctgttttgactccggttttatccaacgtggcagttgactcagcgtggggcccacgtgggctccatacgtcagcctctcctcctctcttcctctctcctctcctctctctcctctccatgggcgggacgggggagtagctgggcacggcaggcaggtgcggtgggcgtgggcggcgaccttcgatgtaactcgagtccgggagccaccaccaccaccagctcgccacccacccatccatggcgaacccaaggatagccatcgcgctatggcccccgctgttgtgtcgtcgtcatcgctgttgtcgtcgctgttgcgcttcctaaagcggccgacgtcgctccccttcctgctccccctcttcgtgttcctcacctagatctgccggcccttctccccatgcgccgttgtagagaagatggggacggctggtctagctcggtgacgcctgcgcccgcgcgcccatgcacaccggcctgccgggccttttccccgtgtgccgtcgtcgagaaaatggcgacggccggttgagctggtggcaccaccgcggtcgcctcctcccatcctactgctggtcgtcgtggcgcgctgccaggatgccagtggcggtggacgtctcgtggtggccaggcaacggccccggcctccgccgctcagcgatgtccgtcgttgacgccgcgcaccccatcacagccgacgaaggggagggacgacggcgagcgggggacgacgttgcccacgaaaccccaggttttccccgcctgtcaccgaccgcagacgatgcccttttccttcttccgcctctcgggccgctccaaccccgagctcgcacacgcggcgatgtcaccaccttctccggcgtcgtcgttgccgccactccggccgccgccgctgcgttgccggctgccgacgccctcctcttctcctgcctcggcccaccccgccagcctcctccccacctgccgccagcctacacagagaagactgagttagagaggaggaagggagaggaggggaaatagagggtgatgatgtggttacaccgatatatgggtcctacgctgactcagctgtcacgtcggataaaaccagagccaaaaccacctagggacccagagttatccggttttgatagttgagggatgacttatatccggttggttgagggacgattttgtaatccgatgacagggacctcatacgtactttttcgttaaacaaacaaggccttaacatgtcccaatcccgttctggtccataaatacaagagtgaccggtccggtccatccagtatgggccacacgttcgctgtaatacctttccagcccatgatggatgggcctcacgtaacacgttctagcagcccacaagttacgggccgcacgtatgagcgacaaccgcgtttccgcaagatcgagcagagctgcagaggaagccaaacgttttatcttcttggctaccgatgcatcatgcatcatcctactatcctagttctaagagcaagtataatagaatagtccactactaactccaattcatttatagccgatctaatagttaattcatataatagttgcttactatactattaatatatggtctcacctgtcatacatacattgcgtcttaaagtctatactgtagctagctatagatctgtagctcgctactcttctttcttatattttatctcattaaaatatatttttagctggttaatagtgtgctattgtacttgctctaactagtttaggatcgccttaactttggtattactgagtacgttgaaccacaaaatcccgaaagaacatgctactccggtagtactaatgaactggaatatcttgccacgccttgccaccctaactcagaatgcaagaacttcacataaattttacaaaggtgtgtttagttcatgtcaaaattaaaagtttaataaaaaaaaagttgaaaactaaaccaggctttaatcttaaatacgcactccgtccatagaccatagaacaattttccgcacctttaaactttcatccttttccattccgttacctcgagaagccaacaccgaccccgcggccccgtccatccccttgggaaattgcacgcgaatgattgcgccggagcctctcttttccccgtgagcgatccagcgccggtcttttccgcggccgcgggccccgtgctccccgcggcagcaaaaggcgcacacacacgcaaaaaaaaaaaaaaagcggcatcacaccaccgtgcgctcgcgcgggcggacacgaatcagccgtcacgtcgcctcgtgccggcgattcccagccatccgcgcaaagcgagagcacgaacgatcgcgccggcgcccttttttttcccctcccgagacagcggctgtttgctgggcaagtactgtgcgtgcacgctgcacgctgttcgactcacatgaaacccaagttgccgatggtcgatgggcgagcagacaagcaggttccgcgagcaaaactgagaagccacgataagaattcgatctaccggcgggagcgttgggtaaatagtgccagccatttttgatcaggaatgatgacgttgtgctcatattcttcatcggtactctctccgcctccataatataagagattttagagggatgtgacaaattccttatattatgagacgcagggagtaacgaagaaaaagtagcagagataaattcatatgcatcgttcttatgatagagagaaccttatgttactctactggaaagttagagagcactaaggccatggccaacgctccatgctagagcgtggtctcacccgcgaatattcgcgtcgcgtggtctcacccctcccgacgcgaatattcgcgccagctcggccgggaccgcgctctcgtagagctccctgaccccccgcatagcatcgcatagtttcattagcttttggcgaggaacgggcgagcagccgtgttgggggagaggcgtcgctccgtaccgtaaccctggaacgttgtagccaactacctcccgcgccaaggccaaaaatggcgaggaagtaggcgggggagaagaagatggggcaccgccgctgccgccgcatctatccggcgctgccgcgcctcgatccggcgccaccgcagcctccatccgccctaccgccgccgcctcgatccagcgccggggagacaggtggcaccgccggagaggggagcgccggggagagagggccggggaggggagaggcgacgcgctggggagagactccccggcggtgccggcgaggggagaagcggagagaaaggagacgcagggagagattgggtgggagatatggtgatgagaggaggggttgacgtttatatatgtttgtgatttttagagggtatactgtaaatattggacgtatatgcaaattaaaataatccaagggtttaaaagcaaaaatatgaccgactaacatgtactgaattaaaaattaagatgggggtatggcttacactgtgcgagggatatcactggtgtgattttatcctatttagcatcacccttttttatgagactatactctgcgttggccatgccctaataagatgggcagatgtaacggttttagtttcacaagagaacctcagacccagaggtgtgacttttatgcgattggctgtgtatggcagtatatggccatatggggtacggtccagacatatcagactgttgaaagaatgcgttaattgagcagagaaatcttggccccctgtagtgactatcggcaagattgtactatcatcatactatgaatggagaatattgaaaaatgaggattatatgtgggccttcatatcaacttatggtcccaatctggtagtgttcattaaaatctctttatatctctcatgaggtataataaagccacagctcttcggaacaatcattacctaaagaatttttgttttcccggggtcaagggtaataaaagaaacaattatggctacatctgattattagtgatagtactacctactatcttcattcataaatactccctccgtactcgtaaagaagtcatttagaatagcgacacggtctccaaaacacaactttaacttcttgtttctataaaaatatttattaaaaagtgatatatgtatacttttatgaaagtatttttcaagacaaatctattcatataatttttacatttttaaacttaataacttgagagttatttatgatttatatttctaaggtttgatttaaacattgtcatcaatgattttctttacgaatacggaggaagtatgatagatccgtgcattgaaacaccatagcaatcggaaaacatcatagtaagaaattagtacgatcaaacgcggaccaaacagacggcacagaaacagatacgtgatgagaatacatgcaagagttgctcatggccccgaagtccatatacaaagtttacaaactcatcgcagtcttttaccttttttttatttatgctataaacctaattaagttaatatctgaacttacggtctgatctaatctacaacaatactaatctagattgcatataaagaggaaagtccatcctattagcttaattttatttggcctcagaaacatattctttgttacgctagtccctcttttttttttcctgtgcattgtctaagagtaggaccatgtaaattaacgcttgtatactttttttatattgtttcaatctaaagtttgctttgcaaaacatgtcatcataaactttggtttgcaatttatttaacgcaaaaactaatcggcgaggcctttcgatattgtcttatcgcgcaacgccaaccatagaagccgtggagaagccagcgcacatacatgtcttttttttctattacacatacatgtattttttttcctcttcttacaaagttttctctcaaattacttattcgatctataatccgattacatgtgttcgttgcaattaaatcttcaaaactagatcttacatgattatactgcaatgaaaaaatatttatatttgtaaattacttttattatatacttaagttacttttatcatatatataaattactttgagatttgactaaattactatttatatattcataatgctttaagttgattatgtttattatagtttttagtcaattctataatttatggactttaaatttaatttttagatacaaaatatttttctctcgaatttacttttaatgttgtaacaacttacttctattttgtgctaacttacttctattgcatagctaagttactactacaatttaaataaattacttttaaattaatgaaatgtttaaatatattcaacatggatcttgttttgtctcatattttacgtagagtataatgatgtaaatagatcatgaaaattatacgtgatttaaaagatataagttattaaagagcttaaatctgaaagtaatttatgtataggacaaaagtaacttacatatataataaaagtaatttacaatatagatatttttatcagaatataatcgtgtaagatcttattgtaaagatttaattgcaacaaccataatggtgtaatcggattatagatcggataagtaatttaggagaaaattctctaggaagaaaaaaaaagacatgtactgttgagtgtactagtaactgttttttggaatagaagggcgtcgctggttagcaatatgccgctagcgcgcgatctagccgtatcctttatttaaatatgcatatgggctgagcgattcaagatatatccatccatgcgagaccaaacttatagccggaacggaacatcggagaatgtttcatcgtacaactatcgtaaaaaacatatcatacgtatagcagccctcatagcaaactcataccaatgttgctactataattccttgataagtaactgataagcgtggaagagggtaatgacaaccataaaaaaaaatcatatcttctatatcaattttgatggtggataacatgcggcccagttgcctaattgttgacttaaaagctcaacaaaaagtaactaacatcgaatgaaaagaaagacaaataatcactccgtcaacaaaaataagagatacaacttatttagacatgaaccctattagtaaatcttgattcaaagttgacgaaaatccatataaccatagtctctaaattttggcatgcaagaaaaatggattcctttttctcatcacacctttgtagattggcctaaaactagtctctggattatcatttcaactttttcatgataaattatccttggtaagagaacttattccgtagattgcatcgcatacgtgttcgcgaaaaaaaattgcatcgtcgcatacaatgtgcataacccttcattgtacctgactgaaaaataaaataggtctagaaacaaagcaacagctttgtgtaaaaccttttaaaaacaaatttgtttaacaaaaatctaaaaggccatataattgatgcctacaaatctgcagttgcccaattaggcaacgaccttgcccaagcagatatggtttataaatgacctctgaaaaagcaaaagtgaggttcatgcgtactttgtgtagcttctatgagaggtttgtcgcttaaaggctaacgactgttcatgatgcaaagcaaacataagctaaggctggacgacggcaaagtgatcttaaaagcgccttttaaatttgtgcaaaatttgcaggaatgagctgacgagaatcagacaggcaccatatgatggtacagtacttctacgtttgctatggtataattaaagtgtagagattgcaagtctgtggtgtactgagacgaactaaagagcaggggaatatagcattatttatcaaatattccaatattgcttgccttggcaggaatataataaagtaagtacatacatgcactccactggttggtctagcttttcggtgaaatttaccatcttattccaacttgatcgttacgggtgcctgtaataagcaaatagaataaaactgagcagaatacctatacttgtatgggaaactattataaactctcgagggaatgtctccttgttgtttacatctcactcaaatagttataaaaaaaataagaagatatattaatatgtaatatattatttcacaaacatataacttaaaaattcgacttctacatatcgcaacaaaaaacaaattaaactacagctagttaacatatattcacggtcaattttttctctgttgtgatgtattgaagttgaatttaagttctatgtttgtagagtgatatatcacatgttaatattttttttaaaaaaaataaattcataactatttgagtggtatgtaagcaatgaggggatgtcccttcgagagtttaaaatccactctcgtatttgaacatgtgaaaatcatggagggcatacgatttagcaagtagttagttaagagcaacataagtcggacggcttttagtattgatatatgattttcacaaattaataattctaaaattcataattactacatatgggacttagtaccggatgaaatacattatagtttgtattcttagtgacagccactactacgaaaaccatttttcgtggcggccattttggatttttgatggcagaatttgcaaccgccacaaagcaaaggccagtgaaaatcaagatcttcgctagcggttattgaccgccagcaaaaatccaatttcgggcggtcgtctttgagctagccgccagcaaaaaaccattttcgctagcattggcttaagacggccgccagcgattcgctggcggctgtgttaaatcggtggctgtgttaaatcggccgccagtgaaaatctattttgagcccaaaaagaaatacccatgcagctatacagccgccagcgaaaatacccatgcagccgcctattgattcattaatttcaaaattcaaatccacatctagattcgctgctcatttccaaattcaaacatgaaatacaaaatcatcatcagcacagatcaaacatcatttacacagatcaaaacatgtgcatcatatggaacaacatgcaaaaaaaagaaggaaaaaaaaatcaaatatagcagcatggtcggaggggggagccgcgggagcacggtcgacggcatcgaggtcggtgccgccctccccgtggtccggcgacggctgatccagccttcccgtggccgagcggcggcggatccggcctccccgaggcccggcggcggcggatccaccgtccccgcgcacctgagctcctccccccgctcccgagagccgctgcccccacgcccgagagtcaccgccgcgctcgcgcccgagctccgccagcacccgcgcccgcgcctgagagccgctgcccgcgcccgagctcaccgccgccttcgccgcccactccgtggagggagagagggagttagaagaggaagagaatggggccggatcggcggtcgtatgcggcggtggagctgcggcgacggcagccggcggtggtggggaggcgacgaggcgcggcggtggagaaggaagggaggagagacggagaagggagagaggcggactgggcgatgggaagggagaagggaaaagggataaggacggacttggcggtgggcggtgggtggattttgttcgcctcaaaaaagttttgtagtggtatttcttacctaccaccagcgaaaacgtgactttcgctagcggacacttaagaagtccgcctaaaaaaaatagagttttttttatggcggacctctgagcgtggccgccagcgaaaatcggttttcgctggcggtccatggccccccacccctcgatatgtttttgctagtggttttcgtgtatggccgccaacgaaaataatagaccaacaccatgaaaaatcgtttttctagtagtgagctattccatgtttggtaagtctaaaattttgaagtcctaattatagatttagcatgattccaaatatgtactagtatcgagttgtactcgattcggggtctgaattgtagccattttcatgtttatcagtattataaaattcggagttaatattatcaaggttgtatggactttactatttttaatgactagaaaaagtacccgtgcgttgctacggaaaaactaaatcgtggcatattttttatgcagtatttgagcattatgaattgtgaaattgtctcacgtggctggttattgcattgcgatggcttcatcctgattatgaaaatctcacaaaaaaaaacataataggaatattccaaattcataaatgatagaaataacatgaagatatgtctacatgggtgtttatgcagcaacctttgaaaaatagccaagctgtatcatctcatccatatcacaatcggatcaggaagagcatgcagccgatgctagctgcgcttctttctaaactaataaagagaaatttacgtctgtgcagtatattctagtacgaatcgatctgatgacctgttctcttcttctatacatgcgagcaacaaattcgagacatacatgtacatgtatttgagacttttttttatggcgattaaataggatacggatttgaagtcggactatcgtatccgtactcgaatcggacgacataccaaacaatcatcaaaagattcgagatcaaaaccttatcccctgtgtatgtgttcttaagagagagaaaatcgtgctcctaatagtgctcgaagttactgtagctgggtgatatagttcaacgcattttcaatggcggtcgtcatatgtcggttcgtttgaaccgccatagaaaatgatttgaggtggtggagggttaagatggccgccagcgaagatgtaggtatcttcgctggctgtcggtgatatgggcccgggggtatcaggtttagagggaggaggctgccccccgatgccacgtggccctcccccgaggggagtcaggcccgaggtaggacggtggccactccttcccagagactggatggaggaggctgtcctccaatgccacgtggctctcccccgagaagggtcgggcccgaggtagggcggcggccactccctggccgagactagagggagaaggccgccccaggtgccacgtggctcccccctgaggggggatcagacccgaggtcgggcggcggccgccccctcccgtgactaggggtcgggcacccccgaccccctctctaggtcaccacatatggtgggttaggtgtccgccttcaggtgtccacctacccgcatttatggcgtcccgagcggtcgcgccatgccgcatttaatgcagcgtgcagtgcactcaactggtctgtgatcggtcgaatgaccgatgggactggctagtgcgcctgtgcgctgctcgtgtgtcaggcggcgtgcagcctgacatgtcccatcaaatagtgatggtgagaggttctcatcctcttatcccagccggagtcggtcctgctgctctggtcaaagcaaggcttccgtttcccggtataataggagcagagaagtcttcacccattaaatggtgactgacagtggcaccccccgtgtcaggcggcaagatttacaggcctcatcatcaagacgacgtgtgcttggcttcccaagtcaagagacaagacatgcatttaatgcaaagattataatacttctccaccggagctaggttaggttgttgggcccatgtggtaaccccttgaggtataaatggaggtccaggcctagtggtggaggggggacttcggagcgaactggcgcttgggtctcacaaccccaagcacttgtgttctatattcaatcaatcacgcacaggagtagggtattacgcttctcagcggcccgaacctgtataaacctcttttgtttcatcgtcttgggagggtctaaccccctcaagatcacacagctccgctcaccaagccctcgaatctcacccgctgccccaggccgaactcacaaaggggggcctcacggttccctggtggaggagttctttctccgacatctggcgcgccaggtagggggcgcgttcgtgatttttgaggttctttcgagcgccggcatggtgagtgtcgcgccgccgctacgggggaaggcgcagcatcctcatgagtgtcgcgccaccccaggcagggggcaaggccccccacatctccaccaggtaagcttggctaccaggtctttgtggcgagtcttcggaatgtccgagggcccccaaagctccagccctgcctcaccgagaagtacgacgatggcgccgacccctccgagtccctccagatctgcacggtgatcatagaggcggcggggggtggcgaccgggtcatggcgaacgtcttccccatggccctcagtggccaagcgcgaggttggcccatgaacctgctgccgcctcagttcactcctgggaggactcttgcagttttgagctccgggtgtcgtcgaagcccgggaccacctgtgctggctcttctgtagcggctggctttggtcccgccggctggctacgatgcccggcccggctcaactgatcgtcctttcaagcttcaagtattttcaaattttcaattcattagcttgaaatcttatatttatttccccccattctattctcatggccctgaaacgcccgcgtattgcgcatttgtttgctccctcggtggtaagagcacaacctctctcccatctacatgaacgattctttgctaagtgtgggggctaaattttctagccttatcctagccttaagttgagccccgggtgccatcgacgcccgggaccccatgtgctggctcttccgtagcggctggctttggtcccaccggctggctacggtactcggcctggctcaactgtggacagggattgctggctctagagttttcggctctcacactcgtgcgaaagtaatcgtccatgtagaaggaaaagagattggaaggaggccactgaaaggaaagagcaaacagaatgtgtagcgtggggacacaggctcgtgggaacctgacctcgtttgctaagtggtcacatgtttcccaagatggttcggaacccatggtgggaggccctcttcgagctaaaggtttgtgtttgcttcattcatacatgcaattctttgctataagtgtgggggttatgattccaagctctatcctagccctgcgtcgagctctgggtaccgtcgacgcccggggccccctgtgctagctcttccgtagcggctggctttggccccgtcggctggttacgacgctcagcttcgcttgatcgcaggcgaagattgccggctatagaaagttcagtcctcacactcacgcgaagataatcgtttgcataaaattattattgcttatatttatctctcgcccatctcttcctcgcggtcctgcggtacctatgtgtcgcgcgccggcttgactcccttggtaacaaaaagtttgtattcgcttcatccattcaaacgattctttgcttaaagtgcgggggctacgattcctagctctatcctagccctgcgtcgagctctgggtaccgtcgacgcccggggccccctgtgctagctcttctgtagcggctggctttggccccgctggctggctacggcgcccagcttagcttgatcgcgggtgaagattgctggctatggaaagttcaatcctcacactcacgaaaataatcatttgagtagatgaagtagaacatgaacagaggttaacaaatggcaggggcaagcgaggtacgtggcgtaaggtcacgggcccgagagaatataacaacgtttgctaaatatatacagaaaataagttcatagcctaaggtacgggctagcgagtcgccctcaggctggggcgaaaaaggcgcatgggtcctagtgccagcaaagaaagaataagagatcgggcccacatatcatcagactaggaaagtggcgtcaaccctgaccacctggggaaggttttggtcagggctaacgccaggggctactgtcggtgatatgagcccgatagtatcaggtttagagggaggaggctgccccccgatgccacgtggccctcccccgagggcagtcaggcccgaggtaggacgacggccactccttcctagagactggatggaggaggctgtcctccaatgccacgtggccctcccccgagaggggtcgggcccgaggtagggcggcggccactccctagccaagactagagggagaaggccgccccaggcgccacatggctcccccccgaggggggatcgggcccgaggtcgggcggcggctgccccctcccgtgactaggggtcgggcacccccgaccccctctctaggtcaccacgtacggtgggttaggtgtccgcttccaggtgcccatctacccgcatttatggcgtcccgagcggtcgcgccacgctatgcggcgtgcagtacactcaaccggtctgtgaccggtcgaatgaccgatgggactggctagtgcgcctgtgcgctgctcgtgtgtcaggcggcgtgcagcctgacatgtcccatcaaatagtgatggtgagaggttctcatccttttatcccaaccggagtaggtcctcccgctctggtcaaagcaaggctcccgtttcccggtgtaataggagcccagaagtcttcacccattaaatggtgactgacaggggcaccccccgtgtcaagcggcaagatttgacaggccccatcatcaagatgacgtgtgcttggcttcccaagtcaagagacaagacatgaatttaatgcaaagattataatacttctccaccagagctaggttaggttgttgggcccatgtggtaaccccttgaggtataaaagaaggtctaggcctagtggtggaggggggacttcggagcgaactggcgcttgggtctcgcaaccccaagcacttgtgttctacattcaatcaatcatacacaggagtagggtattacgcttctcagcggcccgaacctgtataaacctcttttgtctcatcgtcttggtggggcctaacgcccttagatcacacagctccgctcaccaagccctcgaatctcacccgctgctcccggccgaactcacaaaggggggcctcacggttccttggtggaggagttcattctccgacactggcggtccacgtcaccacaccaccagcgaagatatggtatcttcgctgtcgtcaacttaagagggccgccagagaagatatcctatcttcgctggcggccggcttaagatgaccgctagcgaagatgtgtttccgctggcagcccgtgacccccacgattttttgtgctggcggtttttccacttagccgccataaaaactattttccaaacgccatgaaaaatcgtttttctagtagtgacatcttcaatttgtataatagtagagatttattaattcctaaattaataattaatgtatatctaattatcaaaatttaggtgaattttgacgtggcaacaccatctagaacaaatgactttttgatatagcacactattaaatataaatattcgatcacaataatatgatctatctaattacaatattgattggttaatgtgtcaactcgtaagaagtgttcgtatatacatatctatagtagtataaaagacactaaagatgctgatgcataatatcaaggacactctaataagcaaataaataacactagcatattttttaaagaacttgtttatgttatatattattgtgtattttattttgcccacaataaatcatgggtattttactagtaaatataaatatatagatagatagatttctgcgtgttctcatgcacagcaatttctacagcccgcacgaaatctactacaacggtcctttggcacgatttggcaccaacggcagcatacgctcgctccggcgagagctgggggtttttgtcgtctgtcgactgtcgctgaccacctcattaattccatctcttcgtccatggagtacatcggtataccgcggcacgtcactgcgagcgatcgagcacgaacacacaggaacgagctagaaatattacgtacgagctgcatatatcgcgatcgcagcgactagcataggatagatcgcactacacggcaatacggcacggcgcggctcggctcggctcggctggttccgtgtgcgtgcactcatcatcaccctctcacccatctctctcggtcgacctctctctctcccggccccctccgtatggccggtcgatggggaaaagctaaccgattccgatgccgttgcaaagccgaaacgtacgcatgctgaaaaagcaattaatctagtatctgctactgccttctcgctctcgccgagcgggcggttgcactccctactgtgctactgtgctggtgcgtagtgtagatcaacctgcagatgccggtgccagcctcgcgcgatctcgatcgagtgcatgtcatcttccggtccatggttgatttgatcattgaggtgcagcggcagtacagatcagtggccgcgggccagccagatgctcgctaattattaccctgcagctacgatcgacgaggccatgtaccggaacggaaaaacgtatttctttctacaggtagtttccaaccggcctagctagatagctacttgtcctgtcaaatgtaacgctagctgctagcggcatccagtacgagagcatataattaacgtgcttttgtataggtgtactttggtttgctgctgatcgatcgcgatcgatctcgtgccgagaactcgttgtcatgtgtgttggcgatcgatgctgcactactgcaccggctagctagatatgtatacgtactggcagtgtcatccgaaactgcgcgtgtattgcgatgccaataatttagccggaatatataccccgagaaaaagcagaggatatatatagtactgtttctttcatacatagggccgcatggtgtaggtgtattggttatttggtttggtgcatgttggaattaatagatggggtaaggcctatttaaagattaattctttggaaaatcacaaaagcctatctcatgagatggcatgcatgtcgagtttagtaccaccttacttattctagaagagggggacctccttaaaagggaggatgccctcctagccacttgaagcatgtgtggtggagagaagagggggaacacgcgctcgctcgctcactcgcctcgcctcgtctagcagggcaggtggcggcgcgcgtgcacgacgtacgcgtcgaatggtccgcaaaattggctcctcacccttgctgcagatgcagcctccttttgcagttttgttttgctgcaggaaaattcggatttgttttgttttggaaacattccgaaaaattcggtgcgtgaaaacgacatggagtccggataagttacgcgcgacttatccggttcggttacacggagtggagatcgtgcgggcgccctgattaagcgacctatctctatataaaccgagccgccgccttcacgcaaaacacacaaaatcaatctagggtttgcctcctcctctgtgctgcgccgtcgctcgtagactactccatcccgctcgtcggcgtgcacctgcgatcgggagagcaggtctccggaacctctgccttcgacgtcctacactgggagaaggcggcaataaggtttttgggaagcgcttcgcgcgactgctccctgttcatccgcgacggctcgccttcctctccgctcacgtgctgcgcgcctttgtcgctgctcgcaaccgcgagtagttcctgccgagcaaccggtctttccgtcacctcggtacgtgttcgacatgttgcgcatatttgatctgttcatgttttactgcttagtttacatgtgtagatctaatgatgcgttaatgctattatacatctgtaatgtcatgatttatttatggaatatattaaatcattatatgcctatattctcaacaatccaaaaaccttattataggcgctgtgattttactatggctggttttgccgatgcactgaggccggataaatttaccggtgtgcactttaagagatggcagatcaagatcactctgtggctgatagctatgaaatgcttctgggtgagtactggcaagcctatgggcgttcttaatgctgatcagcagaaagaattcgatgaggccactactctctttgtgggatgcattcttagcgtgcttggcgatcgtctggtcgaggtgtatatgcatatcaccgatgctaaggagttgtgggatgcactgaatactaaattcggtgctactgatgctagcaatgatctgtatatcatggagcagtttcatgactacaagatggctgacaaccgttctgtagtcgaacatgctcatgagatacaaaccatggctaaggaactcgaactccttaagtgtgtcttacccgataaatttgtggccgggtgcattattgcgaaactacctctatcttggagaggtttcggtactgcactcaaacacaagagacaggaatacgatccgttgaggggttgatagcgtctcttgatgttgaggagaaagctcgggaaaaagatgtcgcgtctaagggcgatggtgggcagtccactgccaatgttgtgcacaaggcccagaacaagagcaaggggaaatacaaagctcagcagaccaccaacttcaagaagaaaaacaacaacaacaattctaatcaggatgagaggacttgttttgtgtgtggtcaacctggccatctggccaggaagtgtccacaacgcaaggggatgaaggcacctgcagggcagacctctaagtctgctaatgtgaccattggcaacactggagatggaagcgggtatggtaatttacctactgttttttcagttaatcagtctactaattggtgggttaatacaggggccaatgtacatgtttgtgctgacatctcattgttttcttcttatcaggtcgcacggggttccaccgtactaatggggaatgggtcacatgcttctgttcatggtgttggcacggtagatctgaagtttacttcgggaaagatcgtgcagctgaagaacgtgcaacatgtcccttctatcgacaggaatcttgttagtggctcccgtctgactagagacggatttaagttggtttttgagtctaataaagtagtcgtgtctaaacatggatattttatttgtcaaggtcatgagtacagaggcctgttccgcttttccctttctgatttctgcaataagtctgtgaaccatatttttggcagtgtggatgatgaggctaatgtatgacactcacgtttatgtcatattaattttggcttgatgtctcggctttccagcatgtgtttaattcctaagttttccattgtcaaaggttctaagtgccatagttgtgtgcaatcaaagcaacctcgcaagcctcacaaggctgctgaggacaataacttggcacctctagaactcctacactcagatctctgtgaaatgaatggggtgttgacgaagggtggaaaatgatatttcatgacgttgattgacgatgctactagattttgctatgtgtacttgttgaaaacgaaagacgaggctctagactattttaaaatttataaggcagaagttgaaaatcaacttcacagaaagataaaaagacttaggtctaatcgtggtggagagtttttctcaaacgagtttgacttattctgtgaggaacatggcattatacatgagaggacgcctccctattctcccgagtctaatgggattgctgaaaggaagaaccgtacactgatcgacttggtgaatgccatgttggacaccgcgggattacctaaggcatggtggggggaggcattgttgacctcgaatcatgtgttaaacagagttcctaacagaaataaggacaaaacaccatatgagatatggattgggagaaaaccatcactttcttacttgcgcacatgggggtgcttggcgaaagtcaatgtaccaataacgaagaagtgcaaacttggacctaagactgtggactgtgtctttctgggatatgctcaccacagcattgcctatagatttttaatagttaatctgaggtacctgacatgcatgttggtacaattatggagtctcgtgatgctaccttctttgagagctttttcccaatgaaggatacacatagtagttctagtcgaccctctgaaataatacccagttcaatcacaccaccagaacaaactgaacatacacatgaacatgttacagaggaggatgacagtgaagctcctcgaaggagcaaaagacaaaggacggctaagtcttttggtgatgatttcactgtgtaccttgtggatgacactcctaagtcaatttcagaagcatacgcatctcctgatgcagactactggaaggaggctgtccgtagtgaaatggattccattatcgctaacgggacttgggaggtgaaaacctgtggggtgcaagtgggtgttcaagaagaagctctggcctgacggtactattgaaaagtacaaggctcggcttgttgctaagggctatactcagaaagaaggcgaagatttatttgacacttactcacctgttgctagattgaccacaattcatgtgctactttccctagcagcctcacatggtcttctcgtttatcaaatggacgttaagatagcttttcttaatggagagctggatgaggagatctatatggatcaacctgattggtttgtagttgaaggtcaagaaggcaaagtgtgcaaattgttgaagtctttgtatggtctgaaacaagctcctaagcaatggcatgagaaatttgacaaaacattgacatttgcaggctttgcagtcaatgagacaaataaatgtgtatactatcgccatggtgggggtgagggagttattctgtgcttatatgttgatgacatactgatatttgggacaaaccttgcgtgataaatgaggttaaatcattattgtctcaaaattttgatatgaaggatttgggagtagctaatgttatcttaaacattaagctaattagaggtgagaatgggattacactcttgcagtcccattatgtggagaagatcttgaatcgctttggctacattgatagtaagcttctccaacaccttatgatcctaacttgttgcttcgcaagaataagagaattactaggaatcaactagaatactcccaaatcattggctcgctgatatatctggctagtgcaactaggcctgatatctcctttgctgtgagcaagttgagccggtttacctctaatccgggagatgatcactgcgtgcgcttgagcgagtaatgcgctatctgaaaggtactatggaattggggcttcactattctgggtatcctgcggtattggagggatatagtgattctaactggatctctgatgtggatgagatcaaagccactagtggatatgtctttacactgggtggtggtgctgtttcgtggaggtcttgcaaacagactattttgacgaggtcaaccatggaagcagaactgacggcactggatactgctactgttgaggcagaatggctgcgtgatctattaatggatctgcctattgttgaaaaaccggtgccggctatccttatgaactgtgacaatcaaacggtaattgtcaaagtgaatagttctaagaataatatgaaatcgtctagacatgtgaaaagacgattgaagtctgtcaggaaactgagaaactctggagttataacgttggattaaatccaaacagttagaaacctggcagatcctttcacgaagggactatcacgaaatgtgatagataatgcatcgaaggagatgtgtttgagacccatgtgagttatactatggtggtaacccagtctatgtgatcggagattccgtgaattagaacctgggaagaacaaaccattagtaaactagaggagagtaccaatctataccctctctaagtgaagatgcatgtactctcgtgagctgcaaggcaggttggctatgccttaatgagttctgttggctttaattagcgaagatgctgtcctgcaaagcattcatgaaagaactcacctttgtaagcttgactgttggtcgcagtctatgaagattttgggtgaatcttctaggaagcttactaaagacctaggagtatgacttatatgctccacccgaggggtagtctacagacggtctagtaccagataagactttgagtgaaacttgcttgcacaagacatgcaattcaaggcgtagtccattgttcaagttgtgagtaagtgtagcttggagttctaggtggatgttcaaccttgatcagtctccatcgaaccgttggtatataaaagtacattggaaaaggcaaatctcagtgggattttgagatttggtgggggattgttggaattgatagatgggctaaggcccattcgaagattaattctttggaaaatcacaaaagcgcacctcatgggatggcatgcatgtggagtttagtaccaccttgcttattctagaagagggggatctccttaaaagggaggatgccctcctagccacttgaagcatgtgtggtggagagaagagggggaacacactcgctcgcctggcctggcctggcctggcagggcagg

SEQ ID NO: 4604 - DNA, 14723 bp, Oryza sativa
agcttgcggaggtgggggaatggggggagaggaggcggcttggggtgggcggaaaagaggaagagggacttcatcatttggcgagaggaggaagagaggcgaggagaggggggtttggggcgatgagacgatgggagctcggcccgctcggggcctcggggtagagacggcgcaggtggccggccgagtagtcgatggagggggatatcttcctctgaatatcgattcccctggttttctttataataaacagttattaatccgtttagtatagttattactaatattttaaaaaaaaattgaggaaaaaaaagactctagccattacctgaaatattttttctagaaaacaaccattttgtagaaaaagatttaaatctcgaaaaaaatgccccacgttccaattgaagggtattcagtagtcactttgttattctgacaactttctaaaatccgaaaagggagttgtcagggttacgggtcaggcataccccctacccttcgatatacgttacgtgtcgacatggcatacccacgcgcacgcggatatttcctttatgatctaaggaaacctttcacgaaatcaatagacgggaaaagtccttctcggataagaaccgggttacctacgtatcgtgctaggtctggtatattcgagtcctactcgaagagcactagacctgcgatataaaagggaccccccgaggagggcataggggatcgaatctcagagccaacacaacccacacagcctacgaagccggagcctgtgaggagccaagtcgtcgagagctagtcgaatcaactcgactacaatctcgccggatctgacaagttccatcttttcctttgtaacctgtgttttccaccatataatcccatatcaactggattagggctattacctgtcaaggagcctgaaccagtataattcttatcttttgattgctcgatgtcgtactacgtagatccttgtaccagcgtaccccaataccctctatatccggtctgcgggtatcacccgtcgacagtggcgcgccaggtaagggcacttggtactcaaggttctactactatgccatcaagcttcgtcgacaacaacgtcaacaccagctccagccaagcactctcaacttcaacaatgctggtatggactcaagtcggcgaaatcgtcttcccggtttacaccacgatgccgatctcaatcggtccttcaatgactgaaaacgagaacgcagtggctacgaaccaagacggctctatgtcgaaaaatccacccgttgaaacggagaatggattaccgactacatccaaactcgggaaggattctgatgcggccaagtcttgtccctccgacataaatcacgggccgacaaagatgacttccgaagctatcaggtcttggtgtcctatccacaaaaccaagaaacatacccttcaagattgctgggtattcatcaacgtccgtgctgaacttcgcgcctgcaaagaacgtggaattcagcgtatttctccaactcgggatgtctattgtcctatccaaaagacaaagaatcacgatctctcgagctgcaaagttctcctcggcgccatgaaaaccccgtctcctaagtcatacgtccccgtcagggataacggcaaggaacagggagcgactccagcctcagatcgattcgttggggtaatcgatctcgatcctcacgaaccatcggtcttacatctcctcgaagactacgggtcatcgacaacaagtgcgccgcgggaggtactagttatcgatgacgttggcacgacagcgcaagccaacgcagaagcggcgaatcaatcgattactccagcccagcacatcagggctattcaagctatactgagggaaactccttacgatcccgttctgaacgacgacctcgagcgttggacagaacgattacgggagtcggtgaccaacctcagcaatgcattcgaagaggccgttaccggggcacaccaagatcagccaccaatcggcgaccccaatggtgaagatccggagcggagggaatcgcctcgacaggctacccctccacctcgtggcactggcgatcttcgagatcaaattaatggtcgccgagaagcacggcgcacacgggatgacgcaaatcgctctcggcgtcatgtttcttcacggcgccatgatcgaggagaccgcccaaacgaggaccgagaatgcaacgatcgcgaacggcgggggccagacaatactggtcatggccgtcgccgcaacgacgacgacgaaggagatcggcgtcgaaataacagcgagagacaacgacaagattcctgggatccaggtcgtcatcctcgtaatcgtacgccggagccaagcgacccatcgtcatcgtcatcatccgcgtcctcttcatcatcagacagacatccacgaaggtcacgcgaccgccggcaacccaccgcccccagtgctgggtgtagagcttttggtcgttccctacgtgatgtctgacggcctgagagattccgacccggggccattgaaaagtatgatgggagcaccgacccggaagaattccttcaagtctactcgacagtgctttatgctgccggagcagatgacaacgcgttggcgaactatttaccaactgcgttgaagggttctgcacgttcatggctaatgcatcttcctccctattcaatctcttcatgggcagacctgtggcaacagttcgtcgccaatttccaaggaacatacaagcgccacgcgatcgaatacgacttacacgcgctaacacagaactcaggggaatcattgagggaatacgttcggcgcttcaacgagtgcagaaacacaattcccgaaattaccgacgcttctgtaattcgcgccttcaagttcggtgtcagagatcgctacactacccaggagttggcgacaagacgcatcacaactactcgaagattattcgagatcgttgagcggtgcgcccatgtggatgacgcgctaagacgcaagaacgacaagccgaagactgggggagagaagaaaccaaccgcagacgcctctgagtcaaataagaagaaaaatcgcaaaaacgggaaaaggaaagctcaagcggaagtcctcgcagcagaatacgcgaaccctcccaagcgcccagacccacaagccagcgatacaaaaaaatcatggtgccccatacacaaaacggacagacattctctggaggattgccttgttttcaaaaagtcgctcgagaagcacatgacgtttgaaaaaggcaagcgagtacgcgttgtcgagaagaacgaggagacacctcctcacgaatcggattctgcgtacccagactccgacctccatgtctcacacatcttcggcggctccacaacgtactcctccaagcgggaatacaagaaagtggaacgtgaagtctattcgacatggcagggggctgcacccaagatgaagtggtctgaacagagaatagagttctcggaggaagaccaccccaagacctctgttagcccaagacgatatccgattgtggtcgaacccactattcggaacatcaaggtagcacgagttctcatcgacggtggcagctcgatcaatctcctcttcgccagcactctggatgcaatgggaattccacaaagtgagttgacaccaaccgatcaacccttccatggaattactccccaatcatcgtccagacctctgggcaagattacgttgcccgtgactttcggccaagccaacaacttccgaacagagcagatcactttcgatgtcgctgaattcgatacaacttacaacgccatcatcgggagaactgcacttgcgaggttcatggccacatcccactacgcatatcaagtgctcaagatgccgggaccgaagggaacaatcactattcaggggaacgcaaagctggcggtgcagtgcgacaggcagagcctcgacatggtcgagcaaacgcccaccccacccgccacgtttgagccacccaagaaagtgaacaagcaaaacaaggcgcccaagccggacggcacccatcaagatcgttccgctctccagtgctaaccctgacaagactgtcaaaatcggggctacactagacgagaaaataggaactcgcgctcatcaccttcctccgcgataatgccaacgtgtttgcttggcagccgtccgacatgccgggggtccccagggaggtgattgagcacaaacttatggtacgacccgatgccaagccagtaaagcagagactgtggagatttgcaccagaccgaaaacaagccatacgagaagagctcgacaaacttctcaaagctggcttcatcagagaattacttcatccagagtggctagccaacccagtcatggtgcggaaggccaacggaaaatggagaatgtgtgtcgacttcacacacctcaacaaggcgtgccccaaggatcactttcctctcccccgaatagatcagttggtggattcaacagccggttgcgagctattaagcttcctcgacgcttactctggctaccaccaaatcagcatggcaaaagaggatgaggagaagacagcgttcattacgccgttcggggtattttgctacgttaagatgcctttcggactgataaccgtcggaaatactttccagcgcacggtccagggcacacttagcaaccagcttggcaacaacgtcgagtcttacgttgacaacatcgttgtcaagaccaagacaagcgactcattgattgacgacctgcgggaaacgttcgacaacctccgacgatatcgcctcatgctcaacctagagaagtgcacattcggagtaccgtcgggcatgctactcggattccttgtttctggcagaggaatagaggcaaatcccgagaagatcaaagcaatcgagaacatgaagtcgcccacaagactcaaggaggtacaaaagctaaccagatgcatggcagcattaagcagattcatcgctaggatgagagaacgaggacagcctttcttcgctttgttgaagaaacaagacaaatttgtatggacacaggaagccgaagagtcatttattgcactcaagcgctacctatcaaacccacctgtactcgttgctccccaacctaatgaagaattatttctttatattgccgccacaccatattccattagcactgtcattgtagtcgagagagagaaagtacaacgaccagtttattacgtcagcgaaactctccatgacgcaaagacaagatacccacagattcaaaaactgctctacgcagtcatcatgacatcaaggaagctacgccactactttcaagcccacagagtcacagttgtctcctccttcccccttggcgaagttgtgagaaacaaagacattgtcggccgcatcgcaaaatgggtagtcgagctaagccaatttgatatccactttgtgccgcgaacagccatcaaatctcaggtactcgccgacttcgtggccgattggaccatgccagataacaagtcagacaaccaaggcgacaacgagacatggacaatggcgtttgatggcgcactcaacagccaaggagcagaggcaggatttatcttgacatctccctccggagatcaattcaagcacgcaatccacctcaacttcagtgcaaccaataatactgcagaatacgaaggactactcgccaggatacgagctgcagccgcacttggggccaagcgactaatcgtcaaaggggactctgagctagtcgcaaaccaggtgcacaaagactacaaatgctccaatcccgagttatccaagtatcttgcagaggtcaggaagctagagaagaggttcgacgggatcgaggtccgacacgtctatcgcaaggagaacgtcgagccagacgacctagcacgacgcgcatccagacgagaaccgctcgaccccggcacctttctcgacgtcctgacgaagccatcggtaaaagaaattaacggtaaatctggcccgagcacccccgacattagctcggaggtcaccgaggcagaacgtgccgttgctgacatcgaaataacagacgactggcgcaccccattaatcaaattcatcagcagcgaggaattgcccgaggatgatatagaggccgagaaaataacccgtaaagcaaagatctactgtatggtcggtaacgatttatacaaaaaagcaccaaacgagatacttttcaaatgcgtctccctcgacatacatgaaggcatatgcgggtcatacgccgccggttggacattagtcggcaaggcctttcgacaagggtttttctggccaaccgcccttaaagatgcatgcgacatggtccagcgatgtgaagcctgtcaattccatagcaagcacacaaagctacctgcacaagcgctccagacaatccctctgacttggccgttctcgtgctgggggctagatatatttgggccattcccacgaggacagggcggctatagattcctatttgtagcgatcgacaaattcaccaaatggatcgaagcactacccactggggaaatcaaggccgacaacgccattaagttcatcagagggatattctgcagatacggactaccgcactgcatcataaccgacaacggctctcaattcatcagcgccgacttccaggattactgcatcggtttgggagtcaaaatatgtttcgcctcggtctctcaccctcaaagcaatggacaaatcgaaagggcaaacgacatagtactacaagggataaaaacccacgtctacgacagactcatgtcacaggacaaaaaatgggttgaagaactcccatcagtactatgggccgtacgcaccacaccaacaacatccaacaagaaaacacccttcttccttgtgtacggctctgaagccatgctccctggcgagttacgacatcaaagtacacgagtacagaagcattccgacgagaaccaggaggaacagcgagacatcgatgtaaaccttctcgaggagcatcgtgagcgagttgccgttcgagcagctagctatcaacaagccctccgccgttatcatgagaagcgcatccgagcacgcatactttcgatcagtgactatgtcctccgacgagttcaaacccaagcagggtgaaacaaactctcaccaaaatgggaaggaccctacacgatcacacaagtcttgcggccaggcgcattcaaaatcgcagacggcgacggtcgcgaattagcaaattcgtggaacattgaccaactacgtaaattctatgtatgagtcaataacgccgtacctgtaagcacccttacagtatcaataaagcctatttctaggtttcataccacgaccaaagtgttttcacccgacgatcccttactctgataacacctagtgttgaaacctatccttatgaccctttacgccgtctcgacaaggcctccgaggaacctaagggatcttcggctggggacgcccagagccgataaggccttgtcagatccttcagagacaaaagaccatgtaagatttggtcgtgtaagagttctcgccgtacgtattaaccaagccgtgtactcggaaatcgagctttccaacttcacggctgggggctaggatcagagcttattcaaccaaggcagatcaagtgtccaagagccttatcatccgagaaaatttctccgacgacaaggctgggggctagggagagtgtatgactcaaacggccgaggtcgttaactgagaacacactctaacacataacatccagagtaagatgcgtttgtttaaggaatatttctttatacacataataattcttactgtttttgacataaatctcccactacattacactttttcctaagacatctgtaacaggccacgagtactaccaagagggccaatgccagtccatagactggaataccttctcggctaatggcgacatcgacctcgcaaggtggtctatctccgccggagtcctccgagaacgagcaaacccttcatggaggaattcaagatccaggcgcgggcggtgatctcgcaggcaagctagtacatgtcctccggcatatcggcttgctcgacgacactcttgcttcaaggcctcgtcaatacacttgtcgatgccatcgagttgggcacaggccccgttgagcaacgagatgtacctggccgccgattcctcaggatcgctgcggactactcgaagctccctgcatacccgggccattgaggtacagcaactctttaaatatgacgcaaaccacacctcgcggcctcggagcgtttccacggcttgctctttcttcatgactagcatggttctctcgagttccgccacttcaaatttcgtcttccaatattggatgcgacgatcttgggttgcaagggcatcctcgagacctgctaaacataacgaccactaagacaagctggaaaccactaacccaacacggagttaaataggctactcacttgaggtggttgtcgtcatctcgacctccacatcaagagtttggtcctcgacatcatgtgagacgtgtggttcaaattcgaataccggaattatcgccagtgactcaggctgcccgcgctgctggacatcctcgtcatcagcatctctacaatcgacaagaaaaacttccgagatcaatattgaacaaggatggtaatcatatgcacgaaggcaaccagagttcaagatttacaaatgacaaaaaaatacaagaagtcctactcttcaaaaagggggaggacagactcccccaggtcactgacttcttccatcacctccttacgtgtgtcgcttgccaccccctgatccaagatctcacacagatcgagttcagggcgcgacaactttacacatgcgaggacgtgacacgccccggtgtagataccgttggacgtctcctccgcgatcctggccatatgcttggaggggatttcccccatcgccgtcgccagctccgcaagagaagaagtcaacgagaactcatcggggttcaccgggatcgtagacttaacgccgcactccctggcgagctggtggaggccggtgtaggtgacctgcagcgaaccacggatctcggagagattgtctccaagttccgacatgcggtcctcgagccctttgcgatggcgctcgttcccggccaccagctccctcatcttggcgaggtcctcgcgggctttagccagttcccgcaccaaccgctcggcacgcgcgtttgccgccgccgtctccgccctcgcctctgagatctcgcggccgatgcctcgagcaccagcttcgagaaggcgccccatttcaacttggagctcctcccaggtgaggacggcctctggcagactacgacccccagcgggatcgctgacagggccgcttggcgtcgcctcccgactcccgaccacgggcacgacatctgtcgacaccgtggtaggggatgcgctggacgttcccccaaatttggcccaagcagccttcgcccgcgcctccctacaaacgaccacgaatcaaaactccatttgaacagaagacacgagaatccaaaaatctgtttactaacttctcgccgatcgtcacaatgcgctgacgtcgcggaggtggaggagacgcgtcggaagcctgcaagacaaccaatgtagagtgagaataaaccttccttgctacataacctagcgacaaggtgaaattaccgagggagttgctgccttgcggcgatgtccgagcacagacgagaatttcctcgccttggtcggagcttcgccaccactagtggtggcagcgtcagacgcctccttgacgaccttctccttcagaggtgccgccacctgatgatctgcgagcggtccgacgacgtcagtcaaaggaagggcctacgctaaatcatctcataagctgatttcgagcagagaaggcgggacgctatcgaatgaactcacattgatcgcttcatcgcgctccgtcgctcccttttcacaaaggggcgcggggatgtcgctcgccgtggtcgggccgctgatcatcacctgaccaacacgccgctccacggcttcgccgctcagacctgtcaaaaaggaatcaatttttgataagtcgaagaggaacgcgagtacaagcatgtctaaatgaatgcgagaaagataccccgaggagaaacccgggtcgcgtcgtctggcccataatagttataggtcggatgggcccgaccctagagcggctggattcgcctaccgacgaagtctgcgacgacttcatatcccgataagccccgttctcggagatcatcgatgatgtcgataaatgattggagagagggggtcaaggggggcttggcggtccagaccggaatcttgtccggttgttcctcgggaataacgaggaccggatttgaatccttgatctcaaggtaaaaccacctgttccgccatttgctgagagaagagggacactggaaggggacataacgcgacttcatgccatcacgaagtcggaacccgacgcaaccggataccctattggattccatccagcgcaactcgtaataaaagcggaacagatcaagaaagggctctaccccaatgtaggcctcacaaagatgcacaaagacgctaaggaaagcaatggaattggggttcaagtgtagaagagaaagcccatagaaattcaaaaccagtagaaggaattcggagggtggagggagaaacccgcagacaacataatcttcgatcgtaaccatacgacctaagatgggctgaggattagtacctcctgcttccctctctgccttttcacggccaggaagggcgccgtcctcttggagcttcttcagggtcgcgctggtggaagccgacttgccgagatccatcgctgctggaagatcgccggagatggacctagagctggtgaagctagggttctttacggcggcggagaaggcgaggagtgctaacaggcggtgtgtttgacggagttggcggacttacaaatgcgcacccaaaatccctttaaataggcgcacccccaacggtgcgaattccaaggaactgagagaaatccccgccggaaatttctaggtccgttacgcgcggcagtttttggacttcagttcaaaattcactcgtgaccgttgggcttcaaacggtatgctcgattacacatcatctccgcggttctcgcacccggaatgataacgttctcgacatccgaagtcgcgaatggccgcacgagtttatttttgagcagaagtcgggggctactgtcagggttacgggtcaggcataccccctacccttcgatatacgttacgtatcgacatggcatacccacgcgcacgcggatatttcctttatgatctaaggaaacctttcacaaaatcaatagacgggaaaagtccttctcggataagaactgggttacctacgtatcgtgctaggtctggtatattcgagtcctactcggagagcaccagacctgcgatataaaagggaccccccggggagggcataggggatcgaatctcagagccaacacaacccacacagcctacgaagccggagcctacgaggagccaagtcgtcgagagctagtcaaatcaactcgactacaatctcgccggatctgacaagtttcatcttttcctttgtaacctgtgttttccaccatataatcccatatcaactggattagggctattacctgtcaaggggcctgaaccagtataattcttgtcttttgattgctcgatgtcgtactacgtagatccttgtaccagcgtaccccaataccctctatatccggtctgcgggtatcacccgtcgacaggagtatctgaattctcattttcagagttttgcttgttctgtgaagaggtgatcgaaatgcatgtttgagagtaggggaggcttagagagagttagaaaaaaaaaatcttcctgacccctcttcccccaactctagcggctcaccatgggtgatggccggaagaggggtcgagcatctactctactagttctttagtatagattaggttagagttttctatagtcgggtgtcgcgcccagaaatttagcccaaatttccagactattttgtgtattaaatccctgtccaggaccagccaaggtacacaaaccgacaagtaatatacagttccaaacgtaaataaagcgtaaaatacttacagaagaggcacttactcctcacaccgaaacaaaagcagcagcagcggaaaaggcgatcctagcggggcttcagctccactccacaggcaaaactcaactggggtatgagccttggtcctctaactccatcttcagctcagaagcactacacttctgaaagggggaataatagcaaggctgagtacaaccaccgtactcagcaagccacaccaacgatgcagacgtgcaaggggaacacaaggacggtttgtggctatttgcataaaggcggttgtaaaacattttattgagcaaaacagtaaaactgttgagtaattaaagtaacattaaatctgcactgatcaacgctataccacgttgaacaggcccaaccaacccacctgaactacagtgcattgggtcgatttattaaggtgggactaatcacggtgaatctggtcgaccgcccataaccgcgggcacggctattcgaatagttttactctgatcagaggtgtacaactgtacccacaagacacagccccacgacacgtttccgtgcgccgacatgccaccacgacataccggaaagaggccgtgacaggacccttcgcataaccccctctagccaagcacaccacacctcaggtttcacccccactcctcgcaaggcagcgggcagtcccctctcgtgcctaggtgaatccggaagccgcataggccgtcgcagggcccatccaaactccatcacgcccacccttgcctggatgcgtcggctagaggaaaactacgctacaagcccagccgttgcccacgctggcttgtggtaagtacgataagttcttccagggcatcccgcgaaccggtccttaattgccatgggtgcgactagcaaaaccatgcacccacagcccaccattcagtcgcattttagttggataattacgaccatgaagcatggccagatgtctcgagcacgcagctcgtcatgtcatgatactaggaggtctaatactgcaattatcccatcaactgagctagtggtaattaagcatggctaagcatatagttctagctaagtcacataagtaacatgagctagtcgattcattacccaaagttgacaaagaacagatatcaagtaaacatggcacaagcgagcagataggtaataccctgaccccgtgtaattagcaaaacatgcatatttatttgcaaacagtaaaacatttgtaaattaggatcaaaatgctcaaggggaatgtgtgacttgccttgcttcttcaaacaatcttccgaactcttttcctcgcgaccgcggacttccgaaacgacggaaactacacgctggcacgcaaaacgaggaaaaactctaataaaaaccaaggaaacagtacataaaaactaaacaaacatgtagagctcaattttagatgaattttgcaagttgaacggctcaattcggagttcgaatgaattaggtatgaattttagaagttttgagccatttaaatgaatttctataattaaactcgatttatttcgcaattattatttatttttacaaaggaaatggacctcgctgacgtcatcaagggggaggggcggcgccggcaagcgggccccaccggtcagcggcacaagggcgccggtccaccgtggaccgggaccaccgaggcggtccaccgccggtccacgggaaccgacggcccggatcggcccaaagccgatcggacgggcacgaggcggcgcgactggggcacgggcacggcatgaagccggctcggccgagacatggcgcggcggcggcaagggggaggcggcaaccggctgcagcagccggcgacgtggaacggcggcgggcggccggaggacagcggcgcgcacggggacggcgacgcaccccaagaggcggcggtcggcaagaaagggggacgggaaaaaaaaaggaagggaggagagatcctcaccggaagcggcggccgacgcggaggaagaggacggcgacgacgattgcccaatggcggcttgcgaggacggagggcggacggggtcgcccttgaccttcagaaggagaggagggagttagggaggggaggaccgatgcggggtgactggaaacgaaggccgatggcgatgacaagaggtagagctcaccggcgaccgaggaaggaggagctccggcggatttccggcgaagaggggcggcggccgaggtcctcctcgtccttgcggagctgagggaggcaacggcgcgagtcgacgtcgaccgaagcggcggcgcgacgcggctggagtcggcggcggcggcggagagaggtggtgaagagggatgacgcacgtggcggcggcgtttcggagttggacagggcaaacggagtggaggccggggtagagctcggcaccgcaatgccgacgacacaaacggcgcggcgctgcggcccctagggcggcagtagcgggcggctggggcggcgaacggcggtggaagctcggcctcgcggtgggaatggtgctgcgggggtggaaagagaaaacggggtgga

SEQ ID NO: 4605 - DNA, 49809 bp, Oryza sativa
aatccgatggaaaaaaaaatcctatgaaggtctttgaaacaaaggattgaatcctatccaatcctttaaaattcctatggaatgggtaatcctatgtatattttggaggaaagttagcaagaggtctaacctcttggaaaatttcctctgagtctatctctctcatgttcagaatcctatgtttttcctattcctttgttttttcgttcctatgattcaaaggtagaacctcatggaaagaatactttgagtctttatctctcctcaaatttatgtgattttcctgcggcccaatcaaacattcattcctatatttttcttgtattttgcaatcctctgttttacactagaattcctgtcagaatcctatgttttttctattcttccatttttttcattcctgtgattcaaatgggccctaagtgtaaaacagatgattgcaaaatacaggaaaaaatacagaaataaccatttgattgaaccgtaataaaaacataggaattggatgagagagactcaaaggaaagttaccaagaggttcaggttgaacctcttgctaaatttcctccataatttctataggattgtcaatttcataggaatttcaaagcattagataggattcaatcatatgtttcaaagggcttcatacaaaattttcctataggattaaaatcctccaaaatttctatatttttttctccaaatcaaaggggccctaaacaaggccttaacgtggttaggatcaaagtccagacctactacctctttgttgggccagtttaaccaatgttagttaggaaaaatggattttaatatccccttgagatatattacttaaatagtacccctccatcctaaaatataagtattttttgatcctgatacagtctccgagatgctactttgacaaacaatatctataaaagtaagatgttttaaataaaaatagttgcatattatgttagtttgtttaatgataaatctagtaacatcaattttacatgattatattttttatttctttgctattaatagttaaagttaaaaatgtttgactcgttactatgctaaaaatgcttattttttaggacggagggagtaataaaaaaatttaaagagaaaaaagacgagatagattaatatgtgatatataactccagaaacatgcaaatttatatttgatagccgcaagttgtaacaaaagtaatagatttaactgtaacttgtacacatatgctcaaagtcatatttattttttttcaacttgtagaagttaatattaaactagaattttgtgaagtgatatattgtatactaatctatcttattattttattgttctttttaagaaaatcataactttgggacgatatgtaaagaatgaaacgagagctttgcctgttacttaccatctccacggcttcgtcatcgttgattttgtcacgaaccgtgtacaaggctacaaagtagccgtagcaggatttgccatttttgggtgtgtgagatctgactcatccaaagcaaagcatgcattactgtgatctgtcctccagggcttgcttcctgccatgatagctagggcaccatttgtcgccgtctccaacctaaaaccctcgctgctgagtaggaatagctattttttgaattgggaattacctcatccatagaaattttaccagtgggcgtgaagagacagactacgggaggaacaagaaaatcaagcttactagtattggagaggcttttgtgcgtgacagcgtgagagtagctccaatgttaggctaaaattgaaccgtgcgcacaaaaggatcggaccgagcaaactgagagtcgacttgtgtgttagagcaagtttaatagaatagctatctactaactctaaatcatctatagtcaatattataatagccaattaatacaatagttgcttactatactattaatacctgatctcacctgtcatacacatattacatcttggagtccatgctgcagctggctacagatctgtaacccgctgctcttctctctctttcttttatctctttaaaatatgtttatagctggtttatagctcgctattgtacctactcttagagcaaggctaataatgcaaccgacctattggctataatattctttgtagtcttctctcagtctacccgtataaatagttagctctttacaattaataaatggtccacttgtctctctcacagagtttcttagttcttgtgtacaagccggctataagtttacagtccgcttctcctctctcctctcttctctcctccacctcagtatttagctggctctcttagtgaaaaaagcgacttccaatgagcaaaaacatttcctatcatagggtcacacgagtgggtagggcggacgcaggtgagattgagattttcatcccacgaatcaattttcacagcgatcgaacagatattttgttcaattcgcttgcatggactgcactagtcaaaccaacagtagagcactactacaaaacatatagtgacggaagtgataaaaccaacaaatatagtgcctttcctacccacacgcccatcagcccaccaaaataccaagaaccggcatctttatctcctaataggtgccagtttttttaaaaaaccgacaccttttacccctgtcagaaatagatgccggttttaatttaaatctaacatcttttagttggcgctaggcccacccaagaaccatcatctttgtggcaaaaggaataagtgtcagcttttttaaaaaaatcaacacttataatatattatagatgccagtttttaaacaactgacaccccataaaactgagccgcacggggaagggaggcgtccgttcttatccatccatccttctcttacccacctctctctctctcttcttccttctcttccctcccctcggctctctcatgcacccaccccatcgagcggcggcggcggcgtcctggcggtggagatggccacggcgcctcccctctgccagatccgccggggaggggaggcgtcggcccaacacgaggtgccgcagcgggaggcaacagcgccctccgccagatcctaccgggagcggcggcccgacaggaggggggacggggacggcagaggcaggcggtggtgagagggaaggcggcggcggcagaggcaggcggttgcgagagtggaggagacggcggcggcagaagaatcggatttatgttcttgtttctcatgtgttcttgttgttgttcatgcaaaagaatcgagttgaaggaattgagattgtgttattgttcttgttcatgtgaatcgggtgtgttcttgattggtcggggtgaaagggatctactcggctcgatgcatcagccgagtcggcttttttttattcgtaaaaccttaaaggtgtcggttctaaaacgtaaaaaccgacatcttaccaatgtagatgccggttctataaccagcatctaagagggtttccaacaagcaccaaagtgctttaatttctgtagtaatggaggggccctgataggagtagcatttatcccggtggagtgtgcagtgttacgaggacatgctaccgctatagtgtgaggtacaacatccaagtcaacatgaaaaaatgagtaattttcgtaacaccgtataaactttgctaaactagcattcgatgttttctacaggagaaacacaaattttacactcaagttattgcataactatagttttagagctccaccttcacatgaaccgctacaagacaagtgagttatacatgtcaaacatgtagtttttctcgtcaaaacctatcattttcttcagactagcgagagtgcgagactctattcgtcggcgacatggcgttgcacgtactggtggagtctaaacttctagttttatgaacgacgacttagcttaaatttcatagttctatgagatataaaatcatgaatttgtagtagtgtgataatttagataaaacatatttgctccctccgaaaaaaaattctatgaccgaatctgaataagcatccatccattcattcttgaaaattagttttttcaaagacagagggtgtacttggtaaaaattaaagatgtcaagtgtgaaatggattctaatctcttaaggggatgcctcatcgtttttgcatgtcatttaaataattataaagaattaaaaaatagcaagataaaataatatgcaatatattacttcagaaatatgtaagtttaagttcaattttgatctccataggttataacaaatttaactctaaatagtatgcgtgtgcttatagttattttttttaacttgtagaagtcaaatttaaacgtgcatgtttgtgaaatagtatatcacatattaatttgggtattaatttatcttatagttttttaggatatatataatttttagacagacaagaaacaagaaactgataacatccgccgagagattaaaagaattcccctaaaagtatgtatgatttcgccaaatttactgatgttttttcattacaacagagattgcaaaaggctagcaccgagatacttcgcactatcacatacagaaatgcagaatttatacaaagtgagtataactcaactgatcaggtttcctgtggtggaacctgtccaccaggttcaaatcttaaatttaacatgggcttgtgtttgtatcatttatttaaaaagaaaacaaatgagctaccctggcaactgccggcattgctatatactagctagctagccaaggtgaaagctgttgcaggtcgtctgcagcaacgggaggtaggaggtgaaacccagccgtgacccctccaggtcgaactccagcaggttgtcctccatcatgtgtccgccgatcaccaccgacgtctccggggctacgcctccatccacaacgccgaagcagagcgcgccgtccttggtggccaccatagagttcgccccgaacaccacccacgacacggctttgctctgcagcaccagctcgacggtcggcacggccggccccgcgcgggtgctccccaccatggtcccgtcgtagcaaagcttgaacggcgccacggccggcacacggggaatcatagccgtctcggcggcgaacgcgtcggtgaccgccttgtagatggaggtctccagcacggtgtaaggggacaacatgctcagcttggtgccgcccactccgctcttggcgatggccagcagcgtcgcgttcaggggcacggcgcggccgttcaccttgatgcccgtcacaccgatgaagtactcggtcgacttgtcccctgccgtggacaccccccgttgtggtcaccggattgacgagtagcggggtgtagattagtgacttggagaggtccatgacgggctggaactcgtagggcgcgtcgccgaaaacgacgacgccagatgactcagccggcgcgaggcagagcgcgaacttgcgggagaagcggaagatggaggcgacttgcgtggggagcgcgaagcgggcgcggctaagggacatcatgcccgtggccgcggcgccgaggcctttggtcagggacgttgcaccgcaggtgaacagaaaccccggcgcggtggcgcgcggaaccggcatggggcggcaggtggtgtacagcgacagcttgtctgtgatgatgttgccgccggtgctgacgcgcgtgatagtgtactccgggaacccggtgcaggtgtcgttgaggcagcccggggacgccgcaccggagcagccggtggcacaggcggcgctcttcgcgaggcggcaaggcttggacccgcacggcacgcgcgcatacgacgacgactcgtacccggactcgcagtccacccagagcatggcgcccgcgaggtcaaccacggccttcacgggcacactcggcgtccgctgccagaacatcgtcacgtactgctgcgttgcgccgtccttgtccaccggcagcagcacggcgctcgggctactgcctgaagccgcgcggcacggcgagagcgggacgaagagcagtagcactagcactggcgcggtggaagcgagaacgagacgaggaggtaggcatgccatgctgggaaaaccaaggatgtgcagtgacggtagtgaaggatcgaatggtttttatggagcgcgcgcccacgcgcggccaggagggtaggtcgccgcgcagacgcaggcgcaggggcgagaccgcgccaggtcgcgaagtggacctccggaatataactcttctaccacttgctagtgctgctcctgtattttaaggtttgggcaagtgcgatctttgaacaaattaacatgttttttatgggtgagatgagatccaaagggaatggatcctatattactgtgctctttgtgatcctgtgatcatgtccctgtcctgagcccctgacgcggtgacgacttaccgtttgtcgctaatctgatataatggagtaaaactctggttagaatctcggagaaaacctatgacgcttgtgttgctgacaactcacaagtcattttatagagaatcaccctcatgcgaaaatatatatcgatctccgttcaagcccctatatttatagataggttgatttttataggtgggcttttaagatgttcgctttaaaaattataccacatgagaaaataacgatgaaatacaaaaggcattggccacaaaaggagcagctaagtctccttctcacttctccctcattcctgttgcctcctttccggtgaagagaaaataacaatcaaatataaaaggcattgtccacagaaaaggcggctaagtctttctctcacttctcccggcctctttcctgttgcctccctttcttcaggcgacctctccgtctttcctatgcccctctcccttcctagcgacggctgcttcaagcggttgaggcgaaggcgtcgggattcgattggttgatagaagcggccacaggagggcacaaaaagcaatggagacggccgccacgtgcacatctatctctctagatctaccgacgggaagggtcggggatgatggcggactgcaccaatggcagcggcttcgtcgacgaatttttattaatttgccgattttgtcggggagttaggtatcgacatgttatatacccgacaacggtactttatgaacgtagcgtacaactgataccaacatatgcaccagtatggaataaagagacaagtaacattgattttgatactaagttcgagccctcaagaagggtaataacactactttagtttcagtataaaggagaagcaaacaaattaatcatgagaaacaaggcagtgggttgtattatgtggctagctatctgtagggcttcctcgtggtgtaatctcagtgtggtttgtatctatgacttacaagttgtaattagatgtcctcccctctctgggggcttggtatctaaatatatgaaagcaacaagctttctaaaaggaggataagccacatcatctacaatgtattgaccgttggatgaactggtaaatgaaaatacaccgttggatcatcatgctcatctatgacagtggaaacacgttggaccaatccggatgcttctagactaaagacctcaaaaagcagagaactcatgtgcttagtctatttaacactaccgttaaaaaaagtctttttaacactatatatatgtttgcttaattaatctcctggctaaataaaggaaaaaaaatatgacgccttacccgtaaatttatattgaatttatatgcaaatttatatctataatgtatactacttttgattgcttggtattggagcaacacacagcaactaagtagtatccactgtgtaccaattttattttaaaacagtccctacaaacgcacacactacacttaggatcacttagtgttattgttgtctccgttctaaaatataggtgcttttaacattcaaaatttctcataaaatatagctatttctacacctactctctcatcttaaccaacatagtcatatcctatttaatttcttcatctactttataatgtcaatcaattacagcattcctccatttacatctcttgctactgcatcattcccaaaataagtattatggcaaattttatatagaaatataaagcatttctaggacactaatttcaatgcatatctaagtatttttagccaatcaggtgttcgaaagagccaatcggagtagttcaaaatttgatagtaagtgatcgaaagaaatcattcctccttaatcttactctttactaaacaaactagaaatacttatatataggaattaatggagtatatttgaaaacaaagaaattaaagtacttacaaaaccggtaccttcaattaatgttaggatcaatgtctcaagtctaattatataggtaggtacgctaacgctcaaagtcgcacaagtgcgactaagtggctagtttatattgaaaggctaccccttgtgcaagtaaaacttgggaaccctaagtaaggtatgggcagacaaatacctatctttctcgggttagactccataatccttccctaaacaagcagaattccttccttacatgtaattttgtcttagatatatccttcagtataacattaggtatacaatattttcgatggtgaccaatataggtatacaaggtacgccatatctataacattgatattatctttccggaaaacttttttttcaaaatttgtatttaactttttgccaaaaatctttttcagccgaacgtcttaatgcacatgcctgcgaaattacttttcacacgcagttgtggtgcccttttatgtcaaattcattttttcacatacgtgcaatttcaggcggacactccaccgcctgagaaaagggattttagccgtacgtgaaaatgagttttgtagtagcgccggttgtaatatcccgagcttcgaattagtatattttggaaaaaacaatcaacttttaaatcattgtccgaataggcgatcagaaaccgtggatgcgtggatacggcatctggcggttcatgagcaattctaacaacaaagtagaaagggaaaattagaaatgtaggtactagttgatagtattagctaccatgggtccatggctactacaggttgcccacagtattgctatctgctagccgaggcgaaagttgttgcaggtcgtctgccgcaacgggaggtaggagctgaaacccagccgcgacccctccaggtcaaactccagcaggttgtcctccatcatgtgcccgccgatcaccaccgatgacggatacagcgcggggccgccgtccaccacgccaaggcagagcgcgccgcccttggcgggcaccatcgagtttgccccgtacatgatccacgacacggcctccctctgcagcaccagctcaatcgtcggcaccgctggccccgcgcgggtgctccctactttgcgcccgtcgtagcacagctcgaacggtgccacggccggcacacgggggatcgtggccgtctcggccgcgaacgcgtcgatgaccgccttgtagatggaggtctccagcacggtgtaaggagacgccgtgctcagcgtggtgccgcctacgccattcttgtcgattgccaagagcgtcgcgttcagtggcacgtcgcgcccgttcaccttgatgcccgtcaagccgatgaggtactcgatcgacgtctcccccgttgtgtacttccccgccgttctcaccgcgttgacgagcagaggcgtgtagatgagcgacgacttggagaggtccacgccgggctggaacacgtaaggcgcgtcgccaaatacgacgacgccagctgcggaggccggcgggagacagagcgcgaacctgcgggagaagccgaaggttcgggcgagctgcgtggggaacgcgaagcgggcgcggctgagggacaccatgccggtggcgccgttagcgaggccctcggtcaagaacgtgtggccacaggtgaacaagaactccggcacggtggcgaacggccccggcgcggtgcggaaggtggtgggcagcgagagcacgtcggtgatgatgttgccgccagccgtgacgcgcgtgaccgtgttatccgggaacccgctgcaggtgccgttgaggcaggccggggatggcgcgccgaagcagctgttgaagcagccgccggtcttggtgaggcggcacggcttggacccgcacgggacacgcgcgtaggacgacgacacgtacccggtatcgcagtccacccagagcgtggcgcccgcgaggtccagcacggccttcacgggcacctgcggcgtccgctgccggaacaccgtcgcgtactgctgcgtcgcgtcgtccttgctcaccggcagcaccacggctctcggccggcctcctgccgccgagcggcacggcgagaccaagacgaagagcaggaggaggagagcgccggaagcgagaggaggaggaaagcgtgccattcttctgagaggaaggatgcgatattccgatggggtgtgaaccattgcagcggcgaggaaggatatttatagggcgcaccctcgcgcgcggtttggtatttcggctctcgcaccaatcaccatcccagaatacaacggcgatggatggcggtggtagcctggtagggcagactgtatagtcgcgggccgagcgagagtacgactgtacgagacgccgaagtggaaacggaactctgctgttatagcaaggaaaatgctggtagtatttgacggtctgggcatgtgcgaattgcgacctttgttctcgaccaattgcgggccaccatgcaggcaggcaaaccatctgcacagccttttgcaggggtggccattgttgtatgggtgatgagatgatggtatccaactcatccaactaatctaaactggaccagtgctgatcagctggagcgaggggagctgaaatgggagaagactgcacaagcagcgacggttgattacatttgctgacaaagtaaggtcaagtgcttgagattacctatacattttacgataaattttctcttaaaagtttgatagatataattataatacaattataatgtaattacactgtaacttacatacagcttgtatgtaactttcaaaagtctctccgtaacatgctatttccgtcaaacggaggtcgtggaacgaaccctcacacatatgtgcacacagcgactttttttcttcatttgaatagatctaacgatttaaaattatgtgaaagttacatgcttacattatagttgcatgcaagttacagtgtaattacattacaattatactgtaattatatatattaaatttttagaagaaaatttatcgataaatatatagcaaaattaaattacattacgattgtactataattacatcagtcaatattttagaagaaaatttatcgataatatatagcaaaattgattccaaattgttgtttcagtcaaacgccacctctcactatcaaggatatggtaaagaacaagtagatccaagtcaaatgcctacgctggttgactagttgtaatggatgaacaatttattccaacaacttcacacgattgcacaaagaaatgcaaagcatcttttttttttttgagatagtaagctaagctgcagtggcgactgccatgcgttgcacatctagccgaggcgaaagttgttgcaggtcgtttgccggaacaggagggaggagctgaaccccagccgcgatcccaccaggtcaaactccagcaggttgtcctccatcatgtgaccgccgatcaccaccgacgtttccgacgccacgccgccgtccaccacaccgaggcagagagcgccgcccttggtggccaccatcgagttcgccccgaacaccacccacgacgtggcctcgctctggaacaccagctcgaccgtcggcacggccggccccacgcgtgtgcccgccaccttgctcccgtcgtagcacagcttgaacggagccacggccggcactcgcgggatcatggacgtctcggccgcgaacgcgtcggtgaccgccttgtggatggaggtctccagcacggtgtagggggtcaccgtgctcagcttggtgccacccactcccttcttgttgatggcaagcagcgtcgtgttcagcggcacggcgcggccgttcaccttgatgcgcgtgaagccgacgaagtattcggttgatttgtctcccttggtggacacgccccccgtgctcaccgggttgacgaggagtggtgtgtagatgagcgacttggagaggtcaacaccaggctggaacacgtagggcgcgtcgccgaagatgacgacgccggccgcggcggccggcgggaggcagagcgcgaacttgcgggagaagcggaaggtggcggcgagctgcgtggggaaagcgaagcgggcgcggctgagagacaccatgccggtggcgccggcggcgaggccttcggtcaggaacgtggcgccgcatgtgaacaggaacgccggcgcggtggcgagcggccccggggccgggcggaaggtggtgggcagggacagcacgtcggtgatgacgttgccgctggtgctgacgtgcgtgaccgtgttctccgggaacccgccgcaggtgtcgttgaggcaggccggcgacggcgcgccgtcgcagctggtggcgcacgcgttggtcttggcgaggcggcactgcttggacccgcacggcacgcgcgcgtacgacgacgacacgtacccggcctcgcagtccacccacagcgtggcgccggcgaggtccagcacggccttcaagggcgcctgcggcgtccgctgccggaacatcgtcacgtactgctgcgtcgcgtcgtccttgctcaccggcagcagcacggcggacgggtcgccacctgacgccgcgcggcacggcgagaccgagacgaagaggaggagcaggagagccgtgcaagcgacagcgagaggaggaggcatgcgtgccatgctggaaaggcgaaggatgtgactgatcgatggtgatgtcaagaagctctgtggcatggaaggatttttatagcgcgcggcgcgacgggttggtcgctgccacgataccgcggcttgcgacggtgcgactcgtgcgaggcagcgagtgatgcgaagtggtgacgcgcagccgcgggcgggagccgggagacgccgaagttgaccggactatgactcttctactattatgactatccagtatatactcctctattttggcgcttccattaatttatgatttggtcatgtgcgaattgcgatctttcaactagtcgttggcgtgctaagcatggatgctgggtgttgccatttttgtatggatgggacgagatccaaaggcaaatggtttctgtgcgcacgtgatcttgtcccaatcccaggcttatcctgccataagcctctgacccggtgacgcggaaccatttgtcgttaatctcaactaaaaaactcatgttagcgaaaaacttttgcgtggccgacaactaacaagtcgtctccatggagaatataatcgacgcgggattttgtgggcgggcacaaccttgaggccatgggatggaaggaagtctattttgcgtggggcttttgttcagaggagtaaaaagttggccgctgatccggcacgcggggcgtgcgccggcagcttttcttctggtcgcgggtgcacgccgactcgccggcgcggccatggatctgcagggaacgaactggaccacactgtacagtgtccactgtccaccgtgcgaggcgataacgacggttcatctgctggcaaagttggtccaacttgggcgaggttgcaatgcaggaggaggtgggctctgcagcctgcagtccaaccatgccatgggatatgggccatggtccagccccgtgtcgtgatggactaaaagctaggatgggccgaactatcttgattgggctcaattggccagggccatattacaatgaatgagagctccatgttttacatttacatttaagacgccatacaatttgataatgtggtaccttttcagcatgtaaaatattttaagagacaaaatttaaaaatgaatatgcttagtgtaaattatttgaaaaagaggcagtacattaataggcaaaagagttaaaatatgatattggtttgatgccgaaattgtataaatacgagaaataaaaagataggtaatcagatttttctaatatatgtttttgttatggagatttgctctttactaggaacttgcgttaataaattttggtgcatagcaatataaggtttagggttcttttgaaccgtgggcttaaagaaacatatgaatagaggaaaaaaaggggcaattgcttatttgaccctgtttcataaactaagtaccgatttgaccctactttttcaaatcgaacataacgtttgaccctaattgctctacatggttaaagtttctttagaaaaaagaaaaaaataatttgttattcaaatagaccaaaataccctcacttctctctcatctctttctctctttcctggcctgactcactctctctaactctctcagcgcgagcagtggtagcggcagcaccggcgcgagggagggaagtgggcccggctggcgctgtagagaaaagccacgccgccggtgcgcggaggaaggaaggaggtagcgccggcactggcacaggcacgcggaaggagggaaaacggccgcatcggcgacaggcgcgcagaataagggaggcggcactggcgccggcgccggcacagccgcgcggaaggaggtaggaggtggcggcagccaacgcgtggagggaagaagaggcgccgccggtgtgcgaggggaaggaaggcggtgagcctgggatagagctgtgaaggctggatctggcgagggaggggtgacgacggctcggcggagatgaggattggaggcagtgctccacagctgtcggccggtgtcggctcgccctctcactgctcgccgccttctccctgctagtggagctatggaggagagaagaagagaaaagagaggaggagatgagaagagagaatgacgaacgggtcccacatgcaatagggtcaaatgagtaagggcagaagagatattttgtacttcagttaacaccgttagatgcctttaacagaatatggtcatacaatatcttcaattttgaaaagaatggtcaaataaacaaagttgataaaaggggtcaaattggtagttagctttcgaaagagggtcaaatgcgtaattccccaaagaaaaaaactggaatagagcatcatggcctcatggctagcctaatcccataggaaatagaaactctggaattctagtaaaagaagttgtttggctactgtatgtctgtatttgaaaaccacgggaattaaaaatgaaacacttcattacaataagtaaatagggaaaaaaataaagagacatttgccatagcacgtaaaaaaaatgaaaaacactagggctgagttcgacaaaaagaaaaagagtagggagctcatcccataagcacttaaaatgaagtgacttattagtgcatgattaattaagtattagttaattttttttttcaaaaatgggttaatatgatttttaaacaacttaactatagaaattattttgaaaaaaacacaacgtttagcaatttgaaaagcgtatgcgtggaaacgatggagatgagttaggaaagatggttgccgaacatagccttaggttgagttcgtttctaattttcccaactcacctctctcttttttcatgcgcacacttttcaaactactaaacggtgtgtttttttaaaaaaattatgtacgaaagttgatttaaaaaatcatattaatttatttttaaaaatgattaatacttaattaatcatgtgctagtgagttgctccgttttgcatgcgcgagggattagttcccatcccaagtgccgaatacagccttagggtagggcaatgttgtcttcaatctgcattgtgatgcctaagcatgtgcactaaccacttttatcgggtgcccttaggtaagattaaattgtagccagttgagactactctagctctcaatggtgagaatatagaaatacagactcaagttggggagtcgaaccttgagtacctcattggggtttccttgtttttctagagttgaattcatgaatgcgcttcaactagccaagaacaaccagggtttcccctgctggcagttaccgcaaggtagccacattagccgagctttactacagggtacaatagggttgaattcatgaatgtgcttcaactagccaagaacaaccaggggtttcccctgttggcctgttggcagttaccgcaaggtagccacattagccgagctttactatagggtacaataggggtaaccgctggtaggatttggggaattctgtttgaatttaaatttgaataaaaaatcatacaataattcaaaataaattcctacaagtagtacctattttctattgcaatatggtgaacaatatttgtgaaaatgatgaagtttacttcattttggagctccattggaacaaaaaaaaatgaaaaaaagcaatagatgggttgggatataatacctactttgtttaaatataaaaaatatatatagcaaatgttatgccaaaaaaattatgcaatattacattatttttctagagacaaccatgttttttcatgaattgtccatgagtttttctttagaaaatttactacattttacattttttccgcaattgtttcttttcagcttcaacgcgcactgcatggtaattgtgtattaccgcatggagtttcaaattttgaattcgaagtttggaatatgaatttatagtggttaccatgattactgtgctaccactggtcgctaaatagtctgctggcaatagggtaagccctaggaacaattaataagtttacagcattgtgcgtgttcaatgggctatgtgttttccatatatcggataactagactacccaacataatgcacgtgcgcaaagtaaatatacacacatgtatagtgtgagctgctaagcatgtagactgtagagtgggtgtgtttaatgtgctgcaccttctggttgtttttttcccttgctatagtttggtcaaaaatcatatgccattatactctcttaatagtaagtacatatatgccattatatatgtacttataggcaatctctagattcatatattaaatttattcatcatgccatattagagcgccgtcttcgtctgagtggtaaaattacgtcttatgtggaacaaacgcacaataacatggtcttaatttgtattaaaaaaatcattgcaatgaacccacgcctatctttttcaaattagactccaaattctcattcaatgagttttccccattcaatgaaaagacaagtataaacgtgtttcatggatatagacaagatctcgatggcgcttccaagcgtgtcatgcttaatattggacaaaacttgtttttcagaatccgaagttcatggttttagttgtacaatatcgaaattgtacggttcactttaagaacatcaaaaaatacctcagctactcatttctaacatttggtcaaaactaccatgaaatttacttaccatatcgttacgccgtcttcttcacctgaagcatctaggcccccggtgttaattttggtaattaatgacaagcattaattgtggactaaccgttgtgtttgagcttatttatttgagttaggttcacttatttgtgtgcacatggatgatcattgatggattaaaattgacggtgcaaagcaaaaggaagagaagacggtaaactagtgttttctttttaaattgatcgaggcgttgggcgatcaaaattgtgctagtttatttatagttttgccgtactactaagagggggaatgacctagcaaagagatgattttaattgtcacattaggtcattgcattttcacttgtactcacattttcacaacacacttgttatatttttgtcactgctctggactgccagggtcggtttgaccgccggacagatgccggtttgaccggcctgtgtcaccggtctgaccgccatgtcaggaccggtctaaccgccgcaccaaagacggtctgaccggccggctatatggctgggatggcatgctctgggatggccgatcccgagccgccggagccgtattcggtcagaccgagctggtggcggtctgaccgagccgaggccagtctgaccggccaccccatgtcggtctgaccggccgggggcagtggggcccaatgacagccctacaacgggctagaaaactagccgttgtagagtagcacggtctgaccggccacatacctccggtcagaccggtagagcactgagttaggggatttcgcccccaacggctagttttggttggtgggagtataaatactccccctccagcagcaaggggactctcttaacacccaattcaattgcatacatcccttgcacctctctcacacacctttgagcttagtgttcatccattgtagtggttgaggttgttctagccaagagtcaagtgcatttgcttccattgtagagctagtgtggcacttgattgatcatctccatgccgggtcattgcttgttactcttggaggttgccgcctcctagacggcttgtggaggagttgcccggtgacctctccgagaagattgtggaggaggcctggtgccgatttttgagtggtttggagttcaccacctttggagtgaaggaagaactaccctagtgatcgaggcttgggtagtcctctccgtgggccggctcccgccttgtccaccccttgacgaagggggtgtgcggtggcttcgtggttgagcggtggagttgggctcgcctcaatggggagtaggaaaccagcgagtttccgaacctcggtgaaaaatctcttgtctccttgtctcatttgattgtggcatttacatttgtgcaatttatatttctagagacatacttgagatcatatcaccctaggattgctaaacattgacataggagtgtgatttattttcctagagatataattgagccactatcaccctaggcttgcaaaacataacttagttgcttagttagagttgaccctcaccaagcctagcaacttaggttagttttgattacgtgtcatttagttttaaatcgcctattcaccccctctagtcgacatctcgatcctacatcacccctcctttgcaacaacactcaccaactaccgcaacaaagtatgctagatagaacaatgataagcgagctggagggtggcagtacatccaaacaaggttgatggacgatggtgagtgaagtggagggtggcgcatttggcgggctcgagggtggtgcaacatactagctcgaggacaacaatatcggggcaagctcgagagcgccaacataggggcatttagggtctaggtgagctcaagggtagctgcagctagtaagcttgacgtcaattgctattggcaaactcaatagtagcggtggccgacgagctcaagcatggctgcgaagcgtgatcaatgatatggtagggaggacgacatcaacggcaaagcacattcgatgatagcgaggaggatgatattcaatcttggtgagagaggattggaggtaggacaaccgcagaagtgcacgaagggtaacgatatgaatagctagcattttgcacaacaccaccattgttcaacacaatacatgttgtttggctcgtacttgtaacaataacgattactagaatacatggtacaatttaatttgtattggctacaggctcacacgctaaccatgaaaattagatagactcagagccccacgagagactttgatgctatagaactttctgagctgttaaagtgaaccatagaattttgatgttcgatgtgaatgaacaagctttgtattaataagattaaaagagcacatatgcacaaaatatcaattggccataatcattgtaagcactatacagtactccagtatttttttcatgggaaaacaagcgtctcctagactccatcttcttcacgatcttgtccagtactccgtattatggttgttaatctcgacaaatactttagctttacacgcctttataaaatcgaaaagaacgtgaattgaagataaaagaaaaagttactgggattcagatcgccgtcacgttccgcaccgtaacgaaacgtaaataacggccgccgaggaagaagaggacggacgagcagcgaagcagccgcggcggaagaagaaaaaaggagacgacccgtcgcgccgcggccgccgtccggcaaacgcggccgatccgactccgccgacccgagccgagccagtaaaaccccacccaaatcccaacacctgcaactgcaagtgcaaccccccttcctagcagattcgcatcgaatcccgatctgagctctcccctcccccgacgaccacctcgcagctctcccgccccgatctgcgggcgccggcatggcgcggttcgaggtgggcggcaagtcggtggagggcgtggacctgctccggcggcggcactgggcgtcgcgcctcgacttctggcccttcctcgcgctctacgcgctctggctggtggtcgtggtcccggcgctcgacttcaccgacgcactcgtcgtcctcggcgcgctctccgcctcccacgtctcgctttcctcttcaccgcgtggtccgtcgacttccgggcgttcgtcgggtactccaaggcgagacacctctcaactccccaatccccccaatctagccaccgctacgtttggcgcgctttagtgtctagggctaaacagctcccgcttggtgacggtgcaggtgaaggatatccgtgcggccaactcgtgcaaggtaacgccagcgaagttctcgggatcgaaggagatcgtgcccctgcatatacagaaaactgtgagtatggcgtcgttttactgtggagtgttggtgttttccattttttttggtcactgagtgttggtttgggtggctgctcaggtggcctcgtcatcggcagcaggtgagacggaggagatctactttgatttccgtaagcagaggttcatctactcctcgcaggaggacaactttttcaagctccggtacccaacaaaggaaccatttgagcattatatcaagggcactgggtatggaacagaggctaagattaacacagctgtggataagtgggggagaaacatgtaagctgcaacttagctccctactatttgtttatggcattcagtaatgagtaaattgatcgcttgtatggctgtgaatgatattatctataacaatataattcaacttaacaagtacaatctccgcaaaaaaaaaaaaactcaagcactattgtcatttttttttcaatggatgattgtcctggaaactagctaatcacccatgttttttccgtggataaaaatgaatcgcataggctcttatacgtttcaaaacagtatatgtgatgtttcatcaaatatgtctttcacatatttttgttacaaggagtatctgactgtgttgaaacaatcttattctaaagttaactcatacactacatatttgaattacatttaagtttccctaataagaagaaaagaagatgtaaaatatctgttctgtaatattgattaaatttagggtgtaattcataaaatgcagtgtcgatatggtgtgggggagattcactaccacaaccaccgtgccttctttttaaaggagtatagatttttgtgcaattgaagattaacttgtagtcacgtcttgaatggaactcctaacttcatgtaaaagacatgcctgaggagaagaggaacacaataaaagtagactcttgcgttttgcagcatatagggtgatgatgaagtagagtccaaagagcagatgaaagcatttagggcatacttaaatatgtttacacttgggactatctaaaaaactttcacaagtttttttggtcaaaaactttcaaatgtaactgtagtataattagagtgtaattacattgtaactacactatagttacaatataactcatatttaactggtatgttactagaaaaaaaaaaccatgtgagatgagttggctagctacagcacgtgctcgttcaacacatcacactccaccttcctacgtatggctgtgattttttcccaatgttgcacgaatctttaggcgaaacaatggttagaaatttgagagttttgattggaaaaaaactgttgcatgttctgtagcaaatccgttacactttgcactagaaattcaattactatctctttataaattgcgctatcttaagaccactttgataggcaatttgtatctttttttatctgattataaatactaattgggatgtaaagcaacaactgtctgtggtactttttttttggtgcagtaaaatgctgcaaaaaacacaggctaggtgtataaaatctgtatatctgcattactcaaatcaataatgtgaaaaaaaaaagagatttgtatcaaaactgaaacttccatcatatatacatatgtttagctattgtggattagtgtctgatgatcaaattgtttccttctctagatttgagtatccacagcctacattccagaaattaatgaaggagcagtgcatggaaccattttttgttttccaggttagcctatctcatcattgacttggtattttaatggttcatctgcctttgctaattgtgatcctttttttactcttcaggttttctgtgttggtctttggtgtctagatgaatattggtactacagtctgtttacacttttcatgctcttcctgtttgagtctactatggcaaagaatagactgaagacattgactgagctaaggcgtgtgaaagttgataatcagattgttgcaacttatcgctgtggaaagtatgcctgcttcatttgattgattgcttatactgtttttagcatgttattcatcctacttatgtttttttttattatacaaatattcagatgggttagaatacctgggacagaactactacctggagacattgtgtcaataggccgctcagtaagtggagaagacaggtctgtgccagcagatatgttattgctggctggatctgcaatagtaaatgaagctattctcacaggagaatctactccacagtggaaggtccctcctctcctttactcattaattctaatatattcttttttgtgtggtgaaacaaccaagggttacaagcaaacttattgattctgttattttttcttcatttgaatttaccaccaaatttgactaccagaattaaaaagatctaagaaatgttaaatccataataaactcccatgtcaaacatgcacatatacaattggaaaaacccattgtctcttaaaatgtggaacagatgtctccagagaatttacttacatcacaggtgtaggaactaggaatgatgaatttggcaatcagatatttgcatatactttaagcgtgtgagctaggtagttacttttttggcatggaggttaggtaataaaacaatatctggttagtttcccagcccaccattggaggagacactacggcttgtagcatatttacttgaaaggttggggatttgggggtttctctacaatgattgcattgagctggtatttctgctgttgtatttctctaattaaatggtccagtggaacaccccagttcttcttatcagaaacaaatagaattaaagaaaaatgcttcaaagacgcattgaattgtgttaaccaactgtggcatccaacttttgttttgtcctgctttcaaatgtgctatccctagtatttttgttcaaaattttcagttctggacttctggttctgactaatcttctattcttataggtctcagttgctggtcgtggtcctgaggaaacactatctgtaaagcgagataagaatcatatcctatttggtggcactaagatattgcaacatactccagataaggtatacacatctattatacctactgctccctctgttcacttttaggtagtgttttggcatgttgatttagtcattttagattttctacgtaaagttttcccttataacccctatcaaagcttaggaatctcaaaggttttctggttgagataacttcggctatgtcacagctccatgtggcagtgctgctggttgtatcaactgatgccactatgctttgcctaatgggtagatgggcttggaactaatgaacgatattaaactaatgaaggttaaactggctatctagcattaaagaggtgcatcgttctgtggagtatgttagaatgtcaagttttgctgattggagggaggagatgtactgggaatcttgctgacatgtcttacttctgtgcagtctataaatctccgagcacctgatggtggttgcatagcttttgtattgaggactggatttgagactagccagggaaagttgatgagaactatcttattttcaactgagagggtaactttttcatgcattagagttaataatgctgttaagatgtgcaaacataacactctgattctaacaatataacaggttactgcaaacagcaaggagagtggcctgtttatcctatttttgctattcttcgcagtaattgcatccggttatgtgcttgtcaaggtaatgccagatggaattatcaagaaaatccatatgtttaattgtatgctatatagcacacttcaatattatttgaactttggtctgtccgtatgtagggactggaggacccaacaaggagtagatataagcttttcttaagttgttcattgattcttacttctgtgataccccctgaattgccaatggagctctccatagcagtcaatacatctttaattgcattagcccgccgtggtattttctgcacagagccattcaggataccatttgctgggaaggttaataaaaaaaactttgttgtgcttatgtttaatccttcttgcaaaagcttttaaaagctctttattttttttatcaggttgacatatgctgttttgataaaactgggacattgacatcggatgacatggtaaatgatttacccatgtgttgtattttcaattcaagtggaattttgtcaaccgaggtgacatgcatttcaggaattccaaggtgttgttagtttggaagatgatgaagaattaataacagatgcaaataaattgccactccgcacacaagaagtattgtccagttgccatgcattagtattcgtagataacaaactggtatgtaatggactatatgtcagaaataactagctatgtgaagcatagccaacggaagtttagataccttcttttgttgatggtatgtttcatcttatcaaaggttggtgacccccttgaaaaagctgctataaagggcatagactggatctacacatctgatgagaaggccatatctaaaaagtaagttgttgcctgaaataacagatgtaaatatgtgttcattgtagaactgttcatgtgatgacctaaacctgatcagacaataatgtctatgtcatagttaattaagtgttatcaagtagatttgtaaaactgaacattagctgtgtgtctagtcaagcgaaataaactttcatattggttttaacactagtgttatttcaccttgtcagttatgtggcatgctgccaactttgtcccttctctgaagtcaagctagttgtattaggagtaattttttatctttattcatatatccaagattatagtggactacttctctctggacaatttctcttctctcttctgtttgttatatgcacaactgtggctctgtttatagcattggaaagtcctgtacacagatgatagactagatgttttttctatcaaaagcaggatttcgatgtttgattgacttgcatgtattacatccaaatatatctgaaatgtcaataccagtacagttattagttattgattccaaagtaaaaagatattctattatttattttacttgatgtcatcttcattgcaggtctggtggtcaacctgtaaagattgtacacagataccattttgcttcacacttgaagagaatgtctgttgttgtcagtatacatgagaaatattatgctttcataaaggtaggaattccgagagactacataaatgttttacacttttttcttttgttagtaagattgctgcttaggatggttcagaaacaatttcttttggttttggcccagtgtgcccatgcatttggcatgatttcttgttcttagatattttaagtcaaccaaaacaaatgtgattttcataaggtttgaatttctacatgtttatgaatatttattattggtttgaaccaaatgaatagtgagaagaattcaccttgttatcctacatatgttttagatggatattaactagggtacactaaattttgagcggctatccaaagagacctattcgaggcttggctcttttctctttgtttgaaatcataagaaaattagaagtcagcaaaggaataatttaccatttgtcatgttagaacttatcttcattcaaacaaaattaaatatagagtaaaatacacggccggttcttaaagttgagcgcgggtgccacttaggtccataatcttgtaaattgcacatctagatctaccatcttgtttaagtgactcattgaggtccaaaggatctctgaccgggttgactggcttacgtggcggtccagtgtggcaacatatttgcattttgcccccccttttgctttcccgtgtccgatccaatcccttcttcgcgtggcgcacgcaggaacgcgccgacggcgacgtgtgtcagcacgcgcagctgcggcacccacccgtctccaccacgccgcgcctcgtacccctccggcaactgctcaccggcgttgcacagcgcccagaggaaccgcacaccgtcgttgacgggaaggagaaggaggagtggaagggaaaggcccctgctctggctggccgctggcgcgcgcggcaagcggctgtggcagttgctcaagtcgagctcgccctgccgccgttgccgccgttgaggtcgcacccaccccgctcgccgacgcctcccccacacgcacggccacggtcggcgacccctccccccgggagcggccggcgacacctccccccgccgcgcgccgagctcgccgacgcctctggcgccaacaaccagcgggaaggggaccggtggatctggctgtcagttaggcgcgagcgccaccggcgcgctagctatgaagacggtgacggagctccgagctcgcccaccatggtcatggcgacggcgctccgcaagctctcctccggctccctccgccgcccgccaactgctgccgcattcgcccgccgccgctccgcccgcagcccaccgctgcgcttgcccaccgccgtttcgcccgtcgctcgttcttcaagaaggatttaagggtgacgcggtggggcggcacgacgcccgccgtcgagaaggtgatgctcgtctccagcaccggcaccacggccgacgtgctgtggcagggcggtgtgccgtccttggagttggtgccgttcgacatcctcaacgaccacgagttcttcctggggcagcacgtcgacgtcgacaccatggcggcggcaacaacaacgatggcgaggcgcgtcagcttcgttgaggtccacgacggcgtggcgtcctgatcttcgagctcgtccgccacttgcttcatcccctctaatactgcgtcgttggcaatcatgcgccgctttgtcgaggtccacgacaacgtcgacggaggacgctgatgttggcgaggcgaggcgaggccggagaacgtgatgagcaaggcggcacagccgtggtgcgcgacgaggcgccgcatcagctcggccatcggtatgacgtggccggcgaaggtgctggcgatgaggacgacttgcggcggcggtgggcgaggtgacgatggaggtggccgagggatttggggattttttttgtgcctagggctctactgtagcgcgaaggggctatttgcaaattagctgtctacgtggaatgcaacgtagatggtcagcttcggtcaaacgaggtttggacctcaatgagtcacttaaacaagatggtggacctagatgtgcaatttacaagatcatggacctaagtgatatccgcgctcaactttaaggaccggccgtatattttactcttaaatatataaggtctcctttgaattcgttcaattccttcaggaaccaggagaaatccccatgttccaaaggaggcctaactatgatacacattaaactaattaacagttcataaaaaatattgtgtatcaggcaagcaccctgcaatagatatgtttgcttgaacaacagtcttctggatgcattagtgaccatttaatagggaaatctattagcgaaaaaaaatcttgatactagttatttcggagctagctcggtgcattactctgtactttctttattttagatcttgtgatattttaaacattttttgctcaacgtttctgtctaggccttctgcaagaaacctttaatgaagtatcctcttattttgtggttcagggtgcaccagagaccattcaggagaggttagttgatttacccgctggatatgtggagacatacaaaaaatacactcgacaggggtcccgagtcctggcccttgcatacaaattgcttccggatatgcctgtaagttagcatttaacatttctcggttcattaacagcgcattttggcatatcattttttttcttagtactagcaaaatatttgtgccttgcaacagatttcaaaaaatatatcttaagtttcttaacttagaaattatatctttgtttgaaattcgaaaagacacataacttgcaagcaaaacataaaaaaagacatataacttagaaactatccatccttggaagatcccagccactaagtaatggcagattcaccactaccactaggttcttttatactctctgttagcagtcttccagaaagttcctgatctgcaacatagcaaggacattttaactaaagagtaaaccttttcttttaacctgatgtataagagctgataaattccagctatacatagaattctagtttagtaaaagatagtctgactatattctacagcttgtctttgtatccttgtattagcaaaggtcactggagtcctatgaatcttatgtttgctcgaattggtactgataggttctttacctgacatgttttagcacctttacaaggaatgtttgctgaaatgaagaattccctaaggcctaagggcattcgggctgcatgcattaccaatgagttgggtctaaaagcaaagtaatatcactacacatgcatataactactacatgtcatctaatgacatctttcagagggaggtttgatgatggaaacttgagttagaacggtgacgggtgaaggagggcactgagttggggaacaaatctagaattgctggtccatgatcgcaactgaagtttagggactagggacttgtttattatctttggttcattcaagaagatagtgcagtccccttctatatggatgactctacttgaccccccctaagaaataatctgtgtcctagaaacagatcgtcctaagataagtatccaaattcccatcaaaccaacctaatactacatatctaacaatccctctccaatagacctgacccgtttgccagacagaccctctctccatattttgtggttcttattcaaaagttttgtatctgcaccaacttatagttatctaaaactaccattccttacccttccttaactcttctcaacctttgttaaggtgtaggaatttatgtcaggtctcttacttttgtctagtattcatccaggactctcgatcttgtaggcctagagccctcatgttgaatgcatccactattcattacaacattcatcctaggtggatttgcttggatatgtccatgaaaatgctcttacaatggtgcaaaataccatgtagcattttacaggggaatttggtggaaaatactgccttgaaacatctagatggcagtgttgcaaaagacagaatatgggtgtcggaccgacaaggtgccgccaagttattagtgggaatacagatgattaagcggaattgtacagatttttgtcgttcacactagcatatacattaggtgttaatgacaatagtagagaggacatatagaaccttaatcaaatatctgtacatttttctgaatgtatcatgaaaacatcattatttgctgaaagaataccaatgttaatgcattaataccaccaggcttgtccatgaaacgagtgcaattgtgcaactggactgcaagtctacattagtttaatagaaaagctatagctcctgattagactgaaaatgaccaattaataatgccattggctgcataattgctctgaaacattactggcacaccggttcaatgatacgatacagtttggctaacgtttccatttagacagctgactaaacagtcatggtgactgacttccacaacactgctaaatggcaaatgtttgcaaaccaaaacctgcttgctaaaagcatcatctatttgtactggaggaaatacattttttaggaagacaaataatggattgtcagggcaatgtgggatatgctagaggcaaagaacatagtgttctgatttggagaatcctaggttcagaagaaacatctagacatttataatgatatttgtctatgatccacaacttctgcatccagaaaatagtcattatttattcactgcttacacttcaggagatattgcaaaatttgaactgtcctcaatctcatcattagtcgttccacactatttttaataaattacccaagtctcttcaaatgtatgtgatattcatcacttaatgtatacccttgaactttacaaagtagttgcagtttatttgtttattttgtatttttcagaagcaaccctatatctagtttgaattgtttggtctcttggtatttgaatgacaggtaaatgaagctagaagtttggaaagggatcaagtagagagtgacctaacttttgcaggttttgcggtaaaccaccctcccccactcccatccataaattttataatttctcaagtttgttgatgtgctcttttatggtaatggggttttgtgggcttaggttttcaactgtcctataaggagtgactccggtgctgtcttacaagaactggagcaatcttcccatgacttggtatgtactcttattcatcttgtgtccattcatcaaattacaagggtgcgatatagtgacatctccatgcattgtgcaatattaccttgttgaaggatttttgtggaccagtttctatatgatctttattatacactatgcatcggccaatgcactggaaaatttccatttgtgattaaagttcttaccacctccctgatgtattcttaggttatgatcactggggaccaagctttgactgcttgccatgttgctggccaagtgcatatttgttccaaacctgttttaattttgacacgtacaaagactggtggttttgagtgggtttcccctgatgaaaccgacagagctccatacaggtaagatatgcaagggtctgctctatactactaagcatttttagcaaacatttcatactttttagttaatacatactccattttttaaaactccgtagatgacgccattgacttttgtatgacgtttgaccattcgtcttattcaaaaaaattatataaatgttatttattttgttgtgacttgttttgttattgaagaaactttaaatacgagttattcaaaatttagtgcaaacgttattctaaaagtcaatggtgtcatctattaaaaaacagagggagtactttccaaagattcttttgtacaactgttgtttcttttcagtgaaaaaatgagtcttcctatttgtgctggtgaatattatttttttcctagaatacgcatgagagctgcgtatcattgcattaatagaagaaaacgaggcgtccaagatgctgttacaactgctgaaaagaaacaagctgacgaatattcacatttcttcttcttttatctatggcacaaacactgttgttaggaaagaaattcctagaatttggaaaatgataagcagtgaatatggtttcttttcctgattagtgattaatatataatttaattgttattccaaattcactttcattacacagacatagagcaactacatccattattttacatctctgccatcatgatgactgtgtggaacgtgtatcttctttaatactatgcctaatgtgctgcattaatattttgtagcgctgaggaggttgccgcggtgtctggatcgcatgatctctgcatcagtggagactgctttgaaatgctacaaagaactgatgctgttatccaagtcattccatatgtgaaggtatctgagaacagattacatctttttggtgcttttacggtatcttctactaccggcgttagtatgctagtagggtctaaatctatcagttgattttcatgtgtacttagaacatttcagtagaggtttagcaaggtaattttgaccattcacctgtcgtcgcatcacatgccatttgacatctgaatctatctatcaaccaacatgcacttttattccaattttggggatggaaccaaaatatctgctgtccatactaccaggttcagtaccatagaatcttatccattaggtcaaatgcaatggatggaccaaggtttatcctagggtactataaaaaacagttaaaagtatattgaatccttattcccattgtttattttgtatgtgttgtattttcaggtttttgcacgtgttgctccagaacagaaagaacttgttctgactacattcaaaactgttgggagggttacactgatgtgtggggatggaaccaatgatgttggtgcactaaaacaggtcagttcccactttttttttctcaagttcactatagatttactcaaatatgtgtgcccacaatacatttgttaatcacgtagatgaaactttatctgaactactctggtgttattgatcttgtagagatatttcttactgcatcttttcctttttgtgtgtattatttgtacgtgtcatttggccctcagatataattgtaaccactatatctttactatgcgttatggctatgagttgatggttgctgaaggccccaccctggtcttggcgtttggctatctgtggtacaaatgatatagatgactggataacgtttatgcttacatgctaaaccagccgcacatctgttctagttctagcatcagctgaggtggaaaatttacttttcgctttctttttcatgaagtattaaaaaacaaatccagagactttggatgaagttcttttcccaaaattggtaattggcatgccgagaaatcttagctgggtgaatttttaacctattcaacacaagaatcaagaatcaagcagagcttgcatttggctttaggattagctgtcctggatcattcaattaaataaaacctgaacacctttgtttgtttaaatgggatgggatggtatatagaacctacttttactaacaccatctttagctgatggcttgggaaatacatgtccatgtaataggtgttaggcatgttgacctgtattagcttggtattttcttccattctatcagtggtctgttctgcaagcttaactgtaactgaaaggttacttctaaattgataggcctgaggcatttctatctagtactttcttgtcaggtattattgcttctattgatgctttaaatctatatgaaagagatggggtgcataattacaacaatatttgatgggaacagtttttttgtgatctccaaattttcaggctcatgttggcatagctcttttgaatgctgaacctgtccagaaatcagatacaaaatcccaggcatcaaaatctgaaaataaacaagggaagttgaaaaaaccgaaaccttctcaggaaggatcatcatcacaattgacccaaccagctaacagctccgctagagcatccagtagccgccctttaactgcagctgagaggcagagagaaagactgcagaagatgatggatgaaatgaatgaggaaagtgatggccgttcagctcctattgtgaagcttggggatgcttccatggcttcacctttcacagcaaagcatgcctctgttgcccctacacttgacatcatccgccaggggagaagcaccctagtcactacccttcaaatgttcaagattcttgggctcaactgccttgccactgcatacgttctgagtgtcatgtacttggatggtgtcaagctgggtgatgttcaggctactatcagcggggtcttcactgcagctttcttcctcttcatttcccatgctcgtccccttcaaacactgtctgcagagcggcctcatccaaacatattctgtgcatacgtcttcctttccattcttggtcagtttgccatgcacttgttcttcctgatctcagccgtcaatgaagcaaccaagtatatgccagaggagtgcattgagcctgattcagagttccacccaaaccttgtgaacacagtttcatacatggtgaacatgatgatccaggttgcaacctttgcagtaaactacatggggcacccatttaaccagagtataacagagaacaagcccttcaagtatgctctatatgcagcagttgctttcttcacagtgatcacatcagatatgttcagggatctaaatgactacatgaagcttgaacccctgcctgaaggaatgaggggcaaactgatgctttgggctatccttatgttttgtggctgctatggatgggagcggattttgcgatgggcgttcccaggcaagatgccagcatgggagaagcgtcagaaacaggcaattgcaaatcgggagaaaaaacacgaataggatcttgtttttttttccttcacttcaattttttgctccactggcatagtttcaatctaaataggccttaccaaattttgtcagtgccaaattttgataagttttggcatgactaattttggtaaggcaaagttgtgtttggattgaagccaaaataacctaagttcactattgaaatggtctattttcttagatatgccaaaatttggcttcaaaccaaatagatactaaatactattgaaattgcaaaatattggtaagcctaatttaggcctcaaaccaaaccagcccgtagtttaggagaattttgtcggactgtaggccccattactaggagatacatggtcaatatccattctgcttacatgttggatgaagattttaaaattttccatatcttatgctaatgttatagcattgatggttgtacaatgaagctgaattgctacagcagttctctcacggcagaagttatccgaatttactttacattttatcgatttatggattttccacgcctgtggcattttgttttggtggacttaggtagggtggtgaatctgccttgaagcatagcttcgattgagctgataaggtccagcgatttccaaggtgatcgcaaaattggggtaacgtctactagaccaaattgctatttacactaaatctgccgagtagcggtttaaggccttatttagttgggaaaaaaattgttttggggtgtcgccttgtttagttggcaaaaaaaaaaaaaatttaagatgtcacatcggatatatagatatacatttatatcagattacaactacgagataaatttattaagtctaattaatccatcatgttttgtctcacaatttacacgtaatgtgtcaaatattcgatgggatagggtgaaaatttttgttttggaaactaaacagagcctaattccatccagcaaaatcatccatcacacagagaactgataaaaacgatatttcaatccaggcaattgatatttggtaatgtgttacacaaaaaggttccagaattattacgacaagacattttagataaccatagattgccctctagatatcaaaaccacattaagcaacagccgcagaatgttccaatggtagccagcacctcccaaggcaaatcagtacttgtagtccttgacgtgaaggctctcggaggcgccctcgccgaggacagcgtcacccttgtatgtaccgagggtagcctcggagttggccttgcacctggtaaggaaggccgccctggccttctcaatgttctccgccttgccggaccaggccttgagcgtgctctgctggagggcacggccgaaggagaaggacagcgaccacggcttcttggtgctgagcttgttcatggcgttgaggttcagggtcgcctcctcctcgctctgcccaccggacaggaagacgatggcgggcacggcagcggggacggtcctctggagggtgcggacggtgtactcagcgatgacctcgggagacaccttcttggcgtcagagcctggggtgaccatgttgggcttgaggagggtaccctcgaggaggacatggtgctcgttgagggccttgtagcacgcagcgaggaccacctccgagacgtaggcgcagcggtcgatgtcgtgagggccatcaacaaggatctcgggctcgacgatcggcaccagcccgttctcctggcagatgatggcgtagcgagcgaggccctgcgcattcagatcaatggcgagctgcgacggctcgttggggccgatcttgaggacggcgcgccacttggcgaagcgggcaccagcctcgtagtacttggcgcatctcttgccaaggtcatcatggccctgggtggtggtctccttctcggtgccggcaacctcgattgtgcccttgtccaccttgatgcccgggaggacaccaccctccttgaggacatcgacgaagggcttgccatccttggtcttctggtacagggtctcctcgaagaggatcacgccgctgaggtactggagggcgccaggggtgcagaagaggagctcgcggagggagcggcggttctcctcaacgttctcgacgttgatgctggcgaagcgcttgccaatggtgccagtggactcatccgcagcaaggatacccttgccaggagtgccaatgtaggcagcgttcttgatgagctcgtctgcaagatggcaaacactatattattaacaaaaaaaaagcagcatctctgtatggcctaaataatagatctatccaaattgccaggcataaactatgtccaatgctcaactagaccaccgaaaggctgtcacttgaacagatcaatattagatataaaatttctgctaacagaacatgcatgtctagatcaacccaacttatttctgtcccaaataatacacgacttataactaaagaaacactatgcataatttaaatcacttgaacagatcaatatagatagaaaatttctgctaacagaacatgcacgtcatctagatcaaccaacttatttctgtcacagatactacacgacttataagttataactaaagaaacactatgcataaactaaatcaatatggcagaaaatatgttttataatcaatcttttaacacacaagaacaagatctgctccacttatcactaaagaacccttatgtataaactaagccaatatggcatacagtaagtcaactagtaaccaatctttaacctatagacacaacaaaagatttcacgattacgatcacataaataaacgccactccatcgatttactgttcccgaacagatctactaacaaactcaccccgaaaacccaacacaagaactagatctaaacagcacgcaactgaaagcacgaacagatggagagaggagaacgacatggagaagaatgctgatggatggatggatccatacccttgtacttgccgcagtaggccgacatggttgcgggcggagcgaacgagggaggaggctacgacgaatagggagatcgaggagaggaaggaggcggcggctgtggggaatgaggcgagaagggagggggaggggggtggccttttgaaggggggcgatgatgagttgatgacccgatccgatctgtgggcgtccggccgccttgtaggaggggtaagaaaccaacaaatcgggtgccagtgtgcgccgcgagtctgcgacccgtccgatccgtgggaagccgaggaggcggctgcggcgcgcggcggcggccgccacctgtggcgtgggccggggtcctgtcctggtaggtgaggtgcccgcaattttgggccgagatagatttgacgagaatttttttcggttttagattattttttttaatatttacagaaataatatatcgaccaaaaaattgcagaaatagcccctaccgcccacctctagggcgacaagctgacgtggcaaacgggggaggaacgggcggtgacagagggagggtttttttttaggaaaacccggcggcaaggggcccgaatgcaaaaaaagccagtcggggccggctattttgcaggcggccccttgccgccctctggccgggcggcaggcctcgttgcctataaaaggcctgctgcccatcccccagccgtcattcttctctcctcaattccagtgaaaaaaaaagaagagaggggaggagaagagaagaaggggcgaagccctgccggattcagacaccgatttcaggtaatattcatagatcctatatgtgactattgagttaaatagtgtgtattctttaaaaatttgtttgaataaatgcattatatttttagggttttagttgtactaatctagaagtgtgtattgtagatatcggtaactacgtagatctgctagtttggaattaatacattaccgttgcattggcttacacaagaagatattacgttgtagatgtttattgcatgaaagagtaatatgatctagttatttcgttgacagatatgtcgaacaaacaaatattccaagtttaccatggaccaggaaacgttcgttacgggccaactggggtagatctgtcagattttattgtatcagaaaggggaattgatagaccggctgagaggagtgtaccttctataaaaggatggttaatgaggggcttcagagttgatccacagacaagtgacataacaatcaatgttatagtaagtcgggcaactgagggtttttattgggaactaatgccagttcaaaactctcgagtgtggagatggtatttggaaaatgcattgcaacgcgggtggcctctagctttggttccgtttgttcacccaaaggatccaggtgtgcagacgaacatggatgatggcgagggaccaagtgctgaagtaaacgagacttctgtggaggaggtcaacgcacgagaggacgggggcgtagtagctccagtgggcattcaaccaggtggagtggccgacgagggggagactgtcggtgccattgtggatgaaatggagagggacgattctgacaacgagcgtgtagaggaaggtgattcgtcagatgatgagacggatattaatccagcagaatgggctagtgaggatttttctgggttgatcgtctctgaagaggatagtgtgagatgggagtacaaagaaaatgaggttattcagggagcgatttatagtagagcagaagatatgaaataggcggtaaaacattttgcagtgtcacttcatagagagttttgggttgccaagtcgaaccggtcgcaatatgaagttcggtgtgttaaggaaaaagatggttgtccctggagagtgcacgcgtataaggggaaatggaaggattattggacagtgtcagttgttaccaagcatacatgttttctacctggtgttcagaaataccacaggaacattacatgtgcatttgttgcatctgagatgtatgcgcatgtcatcgataatctcacatatgaaccaaggtcaataatccgacacattgaagagacatacaagtatactattagctatgccaaggcctggagggccaaacagaaaataatagagatgagatttggaacttacgaagcctcgtatgacaatttgccacgcctgcttggtgttatcgaggaaagaaaccctgggagctcttacgaagtgaagaaattcccctcaattgaacatcctgacaagagtgtgctgcaaagggcgttcttagctctacatgcatgcaagatggcattcgtgaactgttgtcctgttctctgcattgatgggacattcttgacaggaaagtatcggggccagatactaacagcaataggggtagatgggaacaatcaggtattgcccttggcatttgcttttgttgagagtgagaataccgacagctggtactggttcctgaaattggttaaaacaaaagttgttggtatgaggccaaatgtatgcctgatacatgataggcacgctggcattctgtgagcgataggagagttgcagtttgggagtatggaatgaggataccccggtatttgggaagatgtatagagtaggtggtgcatgcgtcatatgggagctaatttcttcaagcaattcaagaacaaggagctcatgaacatgttcaagaggctgtgcaatcagaaccaggagaaaaaattcaatgagctttggaagagattagatgagttgacagccaaatgcagtgatcagcgtgcagcggctccatcgaccgccgttgctgaccctcctcaagctcttggacctctcccaacggatagtccaacattggttagaagaactggattggagattcggaaattttctcagtggattctgcatgaaccaaaagagaaatgggccaaggcgtatgacacaggtggtgctagatatggaataatgacaacaaatttggcagaagtttacaactgggtgatgcgcggtgtccgtggactgccactagttggcatagtggagttcattttacatggaacatgcaggtattttagggatcggttccaggaagttcttccctctatgccgaacaacagcattttgtttggagctttcatgcagaaaaagctagaggagttgcgtaaaaaggccatgaaacatcgagctctagtgcaaggtacccaacagcacaggtttgagatactatgtcaagataaggcaggcaggggtatctaccgcaagagagtgaagcaggagtgtgttctcaaagccgacggcacatgtcattgctcttgtgcaaagccgaagctgctccacaggccatgcacccatgtcattgctgccgcagcggagtgtggcataccagatgcagtatatgtgtcacagtacttcagtaagcaagtaatatatcatacatggagcggcgagatttatgggttcggcatagctggggagttcacagagactaacaatgaagtactcaatattcctgacccatcgaagctccgaggcaaggctggaaggaggaggactcgtcgcatccgcaacgatatggacgagtcggaggctggcagggtgaagcgttgcagcaaatgcgatgaacatgggcacacctacaagcattgtcctaaagacaaggagaaaccaagtgcggcggaggcaggactattaggatcagcagcagatggagctcgccctacgggtgaaggcactacctccactcgaccacgtcctaggcgtcgtcgtgccacgtctggctacgtggtgtagtttttatgttctatgtcggcatgtggatttgcttgtaattcgtttcgaacttatcgatgtgtttatgtttcgtcgtgtaatgtcagacttcggcatgtcatgtctttaggtctcgtgatgtaacgtcggactaaggcgcctaacgtctttaggtatgctgatgtatgtcggacttcgacacgtaatgttatgttatattattgaactctacatatatgttaaattgcatgtcatcgttatgtaccattagtaacgtttgctatatttaaatagcctgtactcttgttgtacataattaatctcatgattttattactatttcataattttgcaagttatcttttgttttacagtactattttttgaattgttctaacacgaaacactatatttttcagagatggcacgtcaggatacacctcagttgttggacccggcgatagatcaccgacaccggtctcaccttactgcggtgcagggggctcagcttgggacgttccgggcacggacgtgcggtgagctactcacggttcacgactcctttgtcgagaggtacgaatagtgttttactataagttagttgcactataatattttttataatgacatattaatttgttattgcaggctacgtgaggccggcctcctaccgatgtgtcggctggtggaggctgcggccggtgacgcggacccggccagacgatggactgtggacaggtccctcctagcagctttggtcgatcgatggaggccagagacgcacacttttcacttgccgtgcggtgaggtagcccctaccatacaggacgtatcgtacttattggggctaccgctcgcgggagacgctgttgggccagtgaccacggctgtggactggcaggatgatctgacggcacgtttcgcactagtacagcgcgcaccgcacctcccattcgagccgttggcacaccaccgcaacaccggacctacgaaaaggtggctgcttcagttcaccgtgagtgtttttgtaccgaaatgacaatcgtattacatatttagtccgcagttaaggtgcctaacattttatcgacggcttgcaggttgagcagctacaggcggaggccgacgagtactcctacagccgatgtttggaggcggacttgctctggctttttggctgggtgatgttctgtggcggtcacgggcacgcggtcgacaagggacttgtgcactacgccaggagcatcgctgacgtcgcggtaggcgaggtgtctcagtggagctggggttccgcgttgttggcggctctgtaccgtgcactttgtgagtcttgcacgaagacggatcccagcgcgacctttggtgggtgccctctctttctttctatctgggcagctgagaggattgcgatcggccgccctgaggtggaccagcacgcgtacgaggagtcactgtacgaggagcgaccagaggtcgactaccctacgatgggtactttgtggtgccgtcgtcaggtacgttgcatcgatcttatcgtattgttaagttaattgctaagttcattgtacatcacatcgatcgtctcgtattgcagcgccgatgggctcacgtccaggttaggcggtcgtatcctgagtttgttatggagttcgaccgccttctgccgactgacgtcgtgtgggagccctacagtgccacggctacccaggctcgtgcgccgttgggtctgtccacactctgcaccagggaccaggcgtactggatgactacggttccgatggtcttcgacatctgcgttgagcctcacgcccctttccgcgtgatgcggcagttcggcttccgtcagccctttccagtaccgtttccgaccaccgtcccagctgctgttcaccggtaagatcttgcactacgctttccgttgttgcattaaaatctgcctgttcacaataatttgtaacatctgtcgtttcacactaatattacacattaattcgcaggtactcgcgcaagggtcagcagtcagctggcgactggcccgccaagttggcgacttttgttgaggactggttgctcgcaaccgaggaggtcgtggaccacgagggagagccacacactgaggagtcgtaccaggcctacctacgctggtaccaaccacgcacccgtactagggtcaccttcgctcccttggagcagcagccccacgttgcgagcactagagacctctatgccaggcaccgcgaccaggacttcgctcgtgctgtgagtaccctgcatcgcaccattcctttatgttttcatgtctttctcttcgtcaaattttacgaatatttacgaacaaattaaccatgcaggtcgacgacatcaaccgggtcgtcgttgacggttcaacgacgatccaacgtttaggcgcggggattccggtacccgtagaggagcacctgacgacgtacacgcggatggtggagtcgatgcgctcgattctccgagtgctcacctgtcgtgcagacgacgttgctcgggcagacgcagctgtacagcggccacccgtaccgactggtccccgtccagctgcgcacgttcctaggccgactccccctccgcacggaggtaagtatttttattactatttctgtacatgcctcgcatatataagtgagccgtttcacttgccgattgcttcagggtttcgtgcaccgttcagcaccccgccttcctcggctaggccttctgttgtgccccccacaggtacttaaaaaaacaacattacttcgacaatcaatttacatacattttatgtcttagcttacaagggtcccgttgtcgatgtgtaggtttcgcccagttcgctatgacgcaagccgcccacttctcccaggctgcagggtcagcgtctcaggcagctgtgtcgacctcgcactcagcgcagttctggcagtacaccgggacttcgtcacaggcagccggcacgtcgagtcagggtccaccactggaccatgctgggacctcgtcggaccacttgttgccttccaccttcctcttcgacatcactgacttcgacttcacttcaggctcgacagaggacgtcatcggcccctcacagctgggaggcgcaccgccggtgcagacgcaagactaggcgcaggccactcctccgcgggacactcgtgctacccgtgctgtgccaccggatcgtttcacctactcccaggaccacgtgcgagcacaggcccggaggaccaagcatggtcgcggcgcggggcagggccagtagagcagtcttctctttgtttacttgcttcactttccagtactgtatgcttgtgtaatgactacattgttgttatatgtgcacgatacctttcggcgcatgcacgactactttctgccgcaccgatgcagcctcctttattcgcgtgtgatacgagtatttgcccgccatttggcgcatacgaccaatgtaactttcggcgccgatcatgcatgtatctttcggcgccaatcaggcgtacccaccataccccactgtcacaccctgaagtttccccctctccttgctttaaaaattggctaaataaatcgtccgaagaaattatcttatttaacctagagctaattccctaattaataaatgcaattaataattgaattcggcgtggtggaatttttcttgagttccccatgctccaatgcattaacaagatttttagtggaattttcagagccttggaaataattttaaccaattaaaaatcaccaaagtgcaattttaatcccaggaaaatccttcccctctttttcttttcttttccttcctttttctctagatgggccgtcggcccatctctctccccgcgctcggcgcccctttcctggggccggcccgttccttctcccctccccgaagtcctccctccctccctctctccttcgggcgccgacaggtggggcccacctgtcggtcgtcttcctcctctagccggttggagccgagccccaaccgccggcgccccacctccccacgccgcccgccttctccgcccctcttcgcgccccactccgcgcccgcgtcgccgcccaccttccccacatctcccagcccgtgcgcgcgctcgagagggcgggattcgatttcgaatcccacccctctctctctctccccccacctttccacgtcgccggcgcaatagggtgggttcccggccacgtccgcctccccctccgcctataaatcgttccccgcgtccttctctcgttttttcctcttttcaccgcactctcccgtgccgtctaccgccctcgcgccgcgcacccgagctccgccgcccgccgcccatctccggccgcgcgccgccgccgctagagccaccgccgcgccgcgtagtcgccaccgtcacgctcaccgagcccgcttgcacctcggccaccattcggttgccgccaatcgtcgccggagcgccgtttctctcgcacgccggtgagctctccatttccacctaactccggccggccgctctagccgccgtggtcgctctccctacccctaaccccctctctgttttctcctagcgtgccgccgccgcccgtccgcacctcagcatcgccgggtcaccgccgcctttcatcctccgctttggtcgccgtgctcgccggtgaggctcccctccgctcccttttttttttccctctctcccgtgtgcgccgccgtccttcgcgcgtgcgccgtcgccttcagccgctgccgtcgcttttcgccccgtcctccgtcgcttcccacgccgccgattgccgtcgccggcgaccgtgcgcgtcgccgccggttgccatggccggccggccggttttgaagccgagccgagccgtgcctagccgccgccgtgccgtccgatcggcccctcggccgatccggaccatcggtcccgtggaccggcggtggaccacccgcgtggtcctggtccacggtagaccggccgctttgagccgctgacccgtgggccccgcctgtcggcgccgccccctcccctcgctgacgtcagccctgggacttattgcgcaataaattgattaaggacttttctttattagtaaaaacacagtttatcttctaaaattcataagtaattcatccgagctccgtttaagtccattcaagtctcagtaaatcaagaaaaatgcaaagaatccattaaaaatggttttgtttcctgtttcagtagtcttatagcatgttttgcttgtgtgctttgtttgtcgcgtaggtttcggccgtttcgtcgatccgaagtttctcgaagacgttgctgaggtcccatcagttcgagagcaaggcaagtcatgcaatacgtttgatcatattgtacccaatttacaagtatcccgcatttctattaaatgttgcattcttttacaatgtaatgtgggatgggtcctattcctcagccacatattgtttaccatatgccgttgataacttgggtatcaaaatgactagatgttggtttaggaaatgcttagccatgcttagttcaactagcacacaaatggggatcaccttattacatagactttgtctattggcatagctttagattggtgccaccgcaatggtgttagttaattaaaatacactgaatggtgggctgtgggtgcatggttttgctggtcgcacccatggcagttaaggaccggttcacgggaaaccctgggagacttaccgtgcttaccacaagcgggagtgggtaactgcttgatctgaagtatagctcgaccctttcctaggcaccggtggcgagggtgggcgtgatggagttgggtcggccggggtgtccggttgtccagctgccggattcaccgcggcgcaagaggggaccgcccactgccttttgaggggtgggggtgaaaccttagcgtggtgtggatggttaggggagggttatgtggagggtcttgtcacgatttccccctttgcagtatcatggtgatacttcggggcatggcgacatgtgtggaatcgtgtcttgtgggtacagttgtacacctctggccagagtaaaactattcgaatagccgtgcccgcggttatgggcgatcaaccagattcaccgtgattagtctcatccctagtttagcttaatgaactggtgtagttcaggtggttggttgggcctgttgcaacgtggggtagcgttggacagtgtttggttaatattgattaattactacaactgttttactgccttcaactactgtttttaaatgctagctttatgcaaaagaacctctagcctcctttggttatatcctgcatcatacctcctcttccggtatgacttgctgagtacagtgggtagtactcagtcttgctctctttttccccacaccagagctgaagatcttcctagttggagctgttttgtcaaagttggtttcgtcgctgccgtcaaggattgcctgtggagtggagtcgcccgctgctgaagtcaagcttcccggtttagctcgcttttatcttttccgctgcatttgtaatcttttctatttttgtaagacgtggatctgtatgtcaacaattgtcgtttgtgtaccctggctggtcctggacagggatttaatgcacattcagcttagaaattctggttcgagaatttctgggcgtgacacccaccacgttcacatgtcaggggtatcactcgattttttgcgcctatataagtcgccttaacgagtgaggcctcacaatctttcagaactcagtcacattcagtactctcttccccacttgcttcattacaaatccgaccggctttcgtcaatggctagacgccgaggtgttgaggatccaaactggcgtagcgatccttgtgtatacctactaccaccttggtgccagcgtcctctctgcctatgcggtgatcgatgccaactaatggcttcgaggaatcctgatattcgaggaaggcgcttttttaggtgccctaactatgaccgtgaggtattttattatctgcatatgcttattcattccgtatgggcaatcgctttattcttcgtaacactactctattcggcagacccgcactacggcttgcgcatacatcgagtgggtcgatacagaaaatcccgttctcgacctaaccacttgtttacaagaaggtcgttggtatttcgcatccgaaagtactgagcaatacttacagagaaaagcggcttatgaacgacaatgtcgtgaacaacagagcgactggcgggtgctaactacggcactccctccatgggaagcccgtccaagatgcaggtgtggtgatcgttgtcaggttcttcgttccataaatcctacaacattgggtcgaaggttctttgtttgtccaaatattcttgacgacgatttcatggtaagaatattttgattacatgaatccttattttctcacaacatttacttactttgcttgctttacacctattctttcctcccatgaaccaccaaggagatgtcaatacagagaatggatagacaccagaagggtcctaactccacctagccgtgttgtgcagcttgaactaccagagcaatacagggttactaaagcgcggtttgagagaggagagggatcctcacgtaggggttagctattatcggacaacttggcatattgaaatttctactgtcatgcttccttgtcccattactacatcgtcgttgtgttcaactattgcactacctccctcctagttcgaatctaatatcatctatgtaaccgcaatgtaaatagttgtatcatgttcaaattgtactactatttcttcatgttacataattctccttgtttaagtccatataatgtttctacgacccagactgcgataggcctatataaattatccgagtactaatacgtcgaataaggtacaaaataatacctcacttaacatatgaaattgcgcaacaaccaacttcaatacatttttataacaatattaacaagttttaccaataaatacttctttatttattattaacataacatagaaaaatcttttggccgtacttttt

SEQ ID NO: 4606 - DNA, 10927 bp, Oryza sativa
aagcttcatcatctttttttttccatattgtgtaaaagagttaatgaatcttttttatccatttaaacaattggctgcttatgtatattaagatatctgagattgtggacaaaatgataaattaagtaccggtgtcacattgtttttcacatagcactcttcagtcttgcaccaggataatgcttagcttttgcaatttgtaggatggcaagctggtgcaggaagtgtatatatttgaagcctaaactagagaatttggcagcagaatgctatccaaggttagggattattttccagtaaagtaggcaccgctggagctcgccaaattgatgatctctgtcagtacttgtgttatgcagaattcggttctactgtgtcgatgtcaatgctgttcctcaaaagcttgtcaatcgtgcaggagtaacagtaagtctagccatgcttaatcattggtcattcaatgtttgttttatccttagtaaacaatgaacagaaatcattcttcctctcaccgtaattgtgcttcatagttcttaaaggtattctaaggcacttttagacatttcatttaaaaagaagtgctatttgtagaagtttttagagatcctttattgtgcttctttccctgttttagaggaaatagcttcctcttgagcccctggaaactttgttgctagttgccggctttctgcaatttgtatctaagtttttgttagctctatcctttagctttggtaacagagtaccatatcaatgatggacccttcatttatttggcctcgttgctatcttgtcgtgcaacaatattcattaggcaacttgttggaccccaagtatatattaatctacacatctaatgccttcttttgtccaatatatgtgatctgttacgcggaactcgtgcagaagatgccttcaatacaggtacaagcttttgtttgtttctctatgtattgacattgtatatccttaagatggtttttttttgggtcatgtacagctgtggagtgactctcaaaaacaggctgaggtgattggtggacacaaatcctggctagtaattgacgatgttcggaggatgatcgatcaggaggaatgatccattatgtcctttagtgcaaatgatgatgtgatgatgtccaacaggaagaatctttcagtatagcaaatggagaaatcagaaatcaaaagccagtatgaactcctttcaagagatcgagccatatatttaagtatcgaatcgacgaaattactacctctacagtcaaataggcactactacacaaggcagcatttcaatcgtgttctctccaaatttggggtcgacagaatttcacaacctgtggctgcattcctgtggtgtccttgatgtatccatgtgtcttgtttggaaatctatgcaattaaaggcaaagacttcttgctcatgtactgtcacagtacgggcaagcatttaaattagtcattagatgacaataatatttagtcaatgagccttcagagggcatgttgaaagtgttatggttccaaatccatatgctgcacaactgtgattgacttgaactactagtactacaaaagatagctacagtgtcagccttttgcaaagcaggtgttgctagttttgttcagaatagaaaaacaagcatgtatgtatatgttcctgctgaacaaagtatagttatccttaaagttaattgggattagtggaagcaagttccctcttataagctcaactagttgcccacatgcttcagcattgggtactgggggactaatactactttttttcaaccacaaacaacatgaaatgcttttgttttcgtatattaaaacgatttcttaatttgatcgcaacctcagcactttcttgtgtctggcactttaaaaaacacggcaaaagcactatctttacaccttctgcttctgcagtttagagaaagaaaacacacaaatcccagactgaaggacttgttaatctctctttttttttctccacttaatctgctggtttgactagacaatcaatagtagtcaatgaaaacaaactctttgtgattggatagtggccagggcatatagaatagagggcccacatgtcagtcaccgcaagagagagtgaggatgatcaccacagtttcgtgaaagaagatcagaatcagatcagccatggtggtataaccgtccttcctgaaaccatgcaacgcatgagaccggagaaaaataacaaacttgagagatgtcaggttgttagggttgggaattcaggtcagatattcagaattcagcaactgcatttgtcagtcaaacactgaggcatatgaacctgatctcgaaaagaggaaggaaaaaaaggcttctctttttttttttcaagttgaggtcctgttatcctccaataagtgtaacaacagataaatgcatatgtttttaatttagtttccaactttataatattcaaatcgctcatttttaccctaaaatagttattgccacaaaccatctaccaattcaggcacaaaagaggaaggaaggaagaaaaaaggaaaaaaaaaagatctcctcctgagctgttcgttgtcgccgccggtgtgaaccgaccttgtgtttgtttgtgcatgctaaagctaggtcatataatcttatcatgccactcctacacacggtgcattgagattcgtgcgggggtgggatcggacggtggggagtggtccaagaggagagaaaagaagaagcaaacgcgtcgctttcagctgtgggggcgtcgtcttctcccttctctcgcgtctcgcgtctcgacctcctttcccattcgctaatccttcctcctcctcctcctccgcagtagcagcagccgcctccagaaattccccaatccccaaaccctaaataaatcacccccacccccacctcctcccccgtacacgaatccaacccaatccgatacgatacgattcaatccctcccaggagacgctgctctttctggatgtcgattccgtaggggggagtctctctggtgttcctcctcatcaaggtgaggtttgtttttttgttattattattgctgttcgatcgaatcgttggtagatgaggagggaggcggaggggattctggcgatggtttgtttgttgttttgtgtgatgattcctttagtctggggcataggaaaatgttttggttgttttccttccaccccgtggggattgggtgcgattctttcccggtgtttcaatctgagttgtgactggattcgtctcaaagtttgggtttttcttttttgtttgcctgttttcttcgtgctcccgcaacttgatgctggagtctccttaaaggtgggactttggggggttttttttccgactctgctgagggagaagaattcgtaggaagaaactggtggaatttgtttctttgttctttattactaggttgcagttctgtgaaaggaaggtgtctctgatcgttctttttatgtactagttatctaaacaaaaacttcagatttctccctagattaccatacatatttagtatcaatcagtatatatatatgaatatatgagtcatatattggtgttggtttaggttttgcgaggagaagaaggcgagaaagaaagaagtaggttgtgacgaaggaaaccgcagaagccgcagccatggcgccatctcctgcggcagcggctggccccactttcgaggaccttgagcgcgacctgcaggcagtattgatggaccagaaccactcggcaaccgccgatgagctcagcatgttccgcagtggcagtgctcctcccactgttcagggtgctcgcactgccgttggttccctcttctctgctgcgcctgttcacgtcgacagctttgttgatcccagcaatggtggtgttggtgatgtgctctctgacgaggagataaggtctcacccagcctacctgtcgtactactattccaatgagcacctcaatccaaggttgccaccaccaatggtgtcgaaggaggattggcgtgtcgctcagcgagtacaggctgtttcaggaggggtaggggataggaggaggaggccctcggatgtggggggtggaagctcgctgttttcggtgcagccgggggcacggcatggtaatggagaggatttactggtgaatgataggatgggcggaggagaaagaaacgggctcacgcgtcagcaatcatcagagtggcttgggagtggtgcagatgggctcattgggctatcggattccagtggtcttgggtcccgtcgcaagagctttgctgatgccttgcaggtcaggaaaatctcctcgaattgattttttatcttttcttaaatcaccgtatatttaaacctcgactagaacatatgctctattctatttttcatgaatctccatgagtacaaacagacagctattgctaaattgatttatggtatacctatcatgttgtgttctttagatcactcagacagctctcatttatgtttggtaaccttgggaatgagaaccaccatagatatgcctatacctgaattgcattcatgacatgttgattgtatttttcactcgataattcagtgtggaacttctttcagagatactgttatgccactactacagtgcatcaccattctcctattgcagcatagttttctgtcacattgtttttcttatcatttggaatgttttttcatgacaggaaaatattagtcgtcctgcttctgcggccagtcatctttcacggtctaatagccggaatgctttcgacagcccaaatccaattagacctgattcatcaagagcgcaactgcagagcagatcagaatccatgaatggcttgcgatctggatccacttcacccagtcttgtcagggtccaaagtttaggttcttcaatctctcataactttgcttctgcagtaggctcctctatctcaagaagcaccacccctgacccccagttgattcggaggactccaagtccttgccttcctccagttggagttaggatgggaagtactgataagaaggttgatggctcggctgttgcttcacataatcatgatactgctgacattgcggcggctctatcttctatgaacctttctggtagcaagatggccagtttagaagctgaagttcaaaatcgtgcataccagaactttggtgatcaaacagatgtactctttagcgttccaaaggagcgcagacaattatctcagcagaagttagctcaaaatgctgatgaagaatcgataaatgccttggaatatgcagcttttccaaatggtagcggtaacttcaataattcaaatatgagcaagctgtcagttgatagcaggagcaagtttcctatacaatcaccgcatggtaatgccaataataaaggatctcttgtgagccccactggatctgtgtctctctaccagaaccttaatggtgataactccaacattgatgtatctgtacggaataataagatccgttcaagtagctttggttcatccatgctgaacaatcaactgagtgctggtacctctctcttttctttttctccaatctatcccctcctattattgtttgagttttgacccttttttttcctgtgcagatggtgaatatgttaatcttctttcgaatcaagggggatctggttttcagggccaaccaatggagtcaatgtatgctccatacttgcaggcaaactctgactctccccttggtgcagccacaaatttgaatccattccaaggaagcagcttttctggttcagtgcccctagatagccctggataccaaaaagcttatattgcctcattactcgctcagcagaagctacagtatggcgtgccatacctgggcaagtctggtagtcttagcccgaatatttatggcagtgaccctgcatttggcattgggggaatggcatatttatcgagtccaacatctaccccttttatctcatctcctcagggccatgttaggcaaggagataggctagctcgtatctcatctgtgggtaagaccactactggagggcctatgggatcttggaattcagataatggtctaattgataatggttatggatcttctctgctggaggaatttaagaccaacaaaaccagatcttttgagctgttagatattgtaggtcatgtggtcgagttcaggtaattttctcatagtatatccatcagagtaaagttgctgttttcagatatgatgcttgatacacccaaacctcctgttgcagctcggaccagtatggaagtcgctttatacaacagaaactagaaacggcttctgctgaagagaaggacaccatttttccagagattcttcctcaagcacgaactctgatgactgatgtttttggaaactatgttatacagaaagtgagcagccctactattccatcagtattcggaaaaaaatgatgtttttttagtgatatgtaaaaatgttatcatttactggttctctctaattacttgtgcttggcagttctttgaatatgggactgaaccacagaagaaacaactggctagcttactcaagggctatgtattgcagctgtctcttcaaatgtatggttgccgggtgattcagaaggtatgtgtattgtcccctcatattatcactagaaatgagttgaaagaccgactctgttcagttagcaacaccttttatctctgaagagactcagatgcacactattctgctgtaggctttagaaatggttgaggtggaacaacaaacccaaatggctttggagcttgatggaaatattatgaaatgtgtccgtgatcagaatggcaaccatgtaatccagaaatgcatagaatgcatccctcaagaaaggatacggttcattatatctgccttttatggacacgtggttgagctttccactcatccatatggttgccgtgttattcaggtgctatgctaatgtatatctagttttgcttgaaatattacttttgcaacttgctaaatgtacttgcctgtaatttgataccaccagcgtgtcttggagcactgtaacgatgaaaatacgcagagcaccatgatggaagagatcatgcagtctgtggttctgttgacactagaccagtatggcaattatgttatccaggtaactgcctattgattttatgttatctgtcgaaacttcaatttcacctgtacttgtttaagcattgggacgtatttcctatgttaagacttctcatctgccaaattgggcagatacgctccatgtgatgtactttctcttgttttcgtttataccattggagttactttacttttgtgtcccatttattcaaagagcttccttgtttatatttgtagcatgtcttgcaacacgggaaaccagatgaacgttctgctattattaagcaactggctgggcagattgtgaagatgagccaacagaaatttgcttccaatgttgttgagaagtgcctttccttcggtagtcctgaggagcgccagattctaattaatgaaatgcttggcacaactgacgagaatgagccattacaggtatgttttgatccagttacgtaagtgtatcgtttccgttcgtagaattttcatgagttttaggctttgctgtgataatatattaatatggttagtgtttcttgaaacatactgcttggaataagatattgcttttctaaaatgataccggtgctgtggtggatatcatggctcacattcctctaaaatgattaaagcaaatgtttcttctccaggcaatgatgaaagaccagtttgctaactacgtggtgcagaaggttttggagacttgtgatgaccagaaccgtgaattgatcctttcacgtatcaaagtacatttgaatgcactaaagagatacacctatgggaaacatattgttgcacgggttgagaagcttattgctgcaggaggtgaatttcgcagtccatgttcatgcatagtacagttcatccactctcttttacatgtttcctggttattactgactcgtttgtttgttgcttctgtaaatatatttcagaaaggcgcagtggagtgtcttcgtcatcttcgtgagattgcaatggttagtttgacagaataacacctgtacagacaaatagcgaggctagccttacctgtagtcttgttgggttaaatcggaaaagctaagctttgaaagcctttgatgtaaataaaggagggcctctggaaataaaaaggagagagtgtgcttgttcttaagaaagaagctgtatatttgtacgtttttcccctcttcgagtaagataaaaagaaggaagaaaggcaaagcatggaagaaattagtgcaaagatttaggatagatgatgggaagcaaggacacctgtagatccttttgccttgaatttcatcagtgtataaggtttcatgaggtttcatctctgtaaaggttttctacttaactcacattttgcagaaatcaaatgcatgtctctgtttatcagaattgtcttcagctctaaaagtatgaatatttgtgttcactgcgttccccttctcatttctcttcttataaaattcgtggatataaaattcatggtcccaccgattggcacgcctggtgggaccacgaattttatatccacatgtctgaagaagtcaatgccaagatcattcaatcttggctcggggggcaagcacatcagtatcagctcatgaaagctgattacaagatcagacagaagagaattttggagcatgagtcctcatactccaaaactgggggggcatgtgttaacagtgaaatttggtaatttagtaatcggcaaagacgtcatcggcttagaatcattatcggctgcagcatctcggaatcagccgatgggagttattaagtcgccaattagtcggattcctgctatattcggttaatgaaatcaatctactaaagaaaacttatccctaagtgaccgagtttaaagaggatgcggcatggcagtttatctattaattagaaatagtttgttagtttccttttatctttaggaaagtgtgtttagtgtccgataaggactttatatttttccttttatctttaggttagtttctttcttgtccaataaggacttgtatcaacccatgggtataaatatgtacacccggggtctatgtaatctatcttcacgatcaatacaattcggcgcatcgccaccctttttacttctacttttgtttttacgttccggtgagacttggcacccgacgcggggctgcatcgtcttcgatctccggcgaagggataagtccaatgttccgccggtccaggcaattgtatcgtctacatcggcgtcgttcaggctgcatcagtacattcgacctcttggattgctctggtttggatgatatatttgcctacctatttatgatatgtttatgttaatctagtcttagcatgtcaatttagctctatcggctgcttctcgttttagggtttctgccggtatcggctaaatcacgttgctagattagattagcttagacatctaccaccctgaaaactcagtcaacggcttgattgtctaggtattatgtttcttttcatacttagtgttgcatcagttaagtttgatctactaagtcatgcttagaaccataatctctagcctgcttcttgattgccaataagggtttcatcggggtttcagccggtgagttatctggatgttgcatcggctcataatgattgcatatacatataagttggatttagccgatgacaataaaggtttcattgtttaatctaatcttgtggatttcatgatatcggacctccagctgatgtgtgctttaaccctcggatcggtgcttatttatcatatcattgctagccgattggtttatacaggactatattgttattttattatatcatcatcagccgattgcctttatatcattatctacattggatatatagccgattgcttaaaccctatcgctatcggcatcggctgttatcggctatcggctggaactactccatcggcttgttagccgatcggctgttttgatctgctatttgcatatcttgtcagttgcaagatcaaactgactggcacgcccgtatctcatcaatctttggatctgcacaggagctaagcagatctcccaggccggtgtgttcgatttttttcgtcaacagatatatatttttatttactgagaaatacgtaatatatagttcacaagttattaaaccatatggatttttacaaattaataataaaaaatagcacacttagaataaactaatttaaaacggaggggagggagcattatcttttgtatgatgatggttgctgaattgttgggtttttagcacgatagatttgaaagcatatataatgtccacatttatttacactaccatttttttcccttcttgagaagatgttctatttctataccactgtggtttagtgacttgtgatgtgaataaggtggtggcaccaccatacccacgaagatgtacagacaaaactagcgaaaaccttaaaagagtttctcccggatgcaatctccaactttgtatcaaactatttattcaccctttattatttcatcttttcaagagttattggattacacggattctaagtgatctgtattgcttagacaagcagcagatcctctcttacagttacagtcatggaggtaagctcatcaggatacataacaaccgagttcagagcacatctggaccaacaacagttgctttgacaccggaggcactatgcacacggcagttctgtggcggctactttcttggacatcttcaggaagaaggccagattgtggtgaaacctgtcattgcaactgccttcatcatcaacaacatcaccatcagctgctccatggatgttcttctcct

SEQ ID NO: 4607 - DNA, 5945 bp, Oryza sativa
ccgccgccgccgttcgacggagctcaggcgaagcagttccggggaggccatggaccacgaaaggcaagcaaaccttctccgcgttggaacctcttcctcctcccccaagtccccatccccctcctttcagtttcaatatctagtttggttttagtggcaagagatttgggcaaacggattattgattagtgattacatggcgatgctggcctaacatatgttcttctttcatgtatggtgattttcctgattgaaggttgaactccccgagcacgtccgcgatttcgctggagttgctgggccatcggctgcacatttctcaggtaagagaagcaaacacttcatcttgttctgtaatgctatgtgggaaggagtggtgatgctgaatgctagcctgatttttctttttgcttctattgctgcatattatttgtaggatcctaactcgaagcacctcggaaccacggtctgggatgcatccatggtgttcgtcaagttcttggtaatctcttctctttggactactgagctatcctgtacaagttgaagcagataaatgtgataatcatgcaaattgctggaactattcggtgatgctccctcaaatccaacatatatagaatctcgcagttcctacactttggaagctttatttcctagcattggtgtgattttcagattttgatttcagtaactttacttgtttgggactttgagtcctatactcctattactgtcagtacacttgacatttaaggttttactcccatcctgtccaggaaaagaatagcagaaaaggtagattttctccatctaaactgaaaggaaaaagggtgattgagctaggagctggttgtggtctagctgggcttggtaagatgggtcgaattaccttcagagatactatctgaatcttgatggtgctcgcccaataacaaaattgcgcttctccccaggaatggctttgctgggttgtgacgtggttacaacagaccaagttgaggtgctcccgctgcttttgaggaatgttgaacgcaacaaatcttggatttcacagtcaaactctgactcaggtctgttatctaagtacaaaaatgaatgtccactcattaccattgtctttatacatgaaacatgccatagccatagtttgaaagagttaagaacttaagatgtggtcatcgcaatggtcattgcaaatgcatagatcttatgcgacaataagtggtgcctagtggttagttaagtttgtggaagtttctcataacaattggacgttgctagttctcctaacaattgattttacgtggcaaacaggctccatcggctctgtcaccgttgcagaattggactggggtaacaaagatcatataagagctgttgatcctccattcgattacatcattggaactgatgttgtaagttttctgcgctggcagcttgagtttggtgcctcaaatagcttatcctacttactgatatgctaaatttcatgcgtcatgatatttcagttgttctttaagaacagagtctggagagactttagtgtagctagcaatcgacattgcacatggtcacttgctgtaataataagttgccaatttttacatgaggaatctctcagatattaacctaaatgaagttttcctcaaagtcactaaacttttcttcttggttatgttacaaacgtgcgggagcacttgcttctctagattttgtaagttataggcatgccttacggattgaaatttaagtgcagaggatagccttttagcagaaatgcagaatagccaaaaataattgataacagcactggtagtccagagacaatgcaatggcttactgctcttttgtctgtgtgtttttgaaggtttattcagaacatctgttgcaacctctaatggagacaatcattgcattatctggtcctaaaacaaaaataatggtaattgctttcaccaccattcaaacagttctgtttttgttattgacaatatatgaggtaaatattgttgctttctacccagctaggatacgagatccgttctaccactgtccatgaacagatgatgcaaatgtggaaaagcaattttaatgtgaaaaccgtctcgaaatcgaaggtacacacacttcagagttcatcttatcagaactcccttcccttgtcatttatctgtttctgcatcagtgcaaaaggtattctctaccatcacgctgttcttgaattctaacacagatggatgtgaaataccaacatcctagtattcatctttacataatggaccccaaagcgacattgatccctgaggtcagcgataacggcaacaacgaggaggaggaggttgtctccaatccaggagatgatgaagatcctggagctgagagtggtggaccttgtactggctcagtggattcagcagaagccaaaactgcaggctacttggacgacgactgggaaatcagaagatgcggggctatggctgcaagacttcttaaggatgtcaaacttgcatgaaatttgatccatactagtattgcccagttgatgttgtactccaccttttcttcttatgagtagtattccctccacattcatccttagaattggacttttttgggacagggggagtactgtacaagctaatttgtactatgcttcactgtcattgttcatgtgaaggtgaagatatacacagagtgctagtacattttttgagatgttgagtgcatatgatcgccggcggcttgcaagaggagtgagccgccgccgtgccatcaccggggagctcattgacttctcgtcggtggattgtaggactattttactctggaaaatctgctcgatcggcaacaatggtagtgaccatagtctcaacctggaggggctcgccatcccctctgctccgcttccgtcgtccccgtcgtccccgtcgtcccctacgcctcgttcgcgcatttcgtcgaacaccgtgacggcgccgaattcgcactgtccgcacatctcctcctcctcccccgtcctctccaaaccccaaaccctatctcccgtcctctccaaaccccaaaccctatctccacccccgaggcaggcgcccccatgcacttgtaagtcgattggatgtcctgtcccagaagacatatcgagcgaggaggcggaggaggacgaagggaagcggatcctagggcttcaaccatggatcggcatcccccatttcaaggtactatactactccattatagtagtagtgcttttgcatcttagaaaaaaaaatctgttcattagccattgagagcttctgaacttgttgattccgttccaactccaactgtgagtttctgttcaggtcatcccctgattttcactatgccaattctctgaaacaactttaccactgtcaaatgaacacactgaaacagtttgcaattattggccattactagttatgcaaggtagaagtgttctgaggtactgtatcatttttatgtactaattaattaagtttaataaaaactttcattatctaaaaataaatgactattactagctcagtattcccttcattttatattataagacgttttgatttttttcacatacaactttatttaagtttgattatacttattaaaaaattagcaaacatatataattttcatatatatattttttacactaatagtgcaaagtgagcacgtttaaatgcattgtacttcataaaaaaacatctaacttttacagacgaatctggataaatgcatatctaaattcatcctcaataattgattcttttgggaggagtgagtacaatgggttggtgcgctttgtccttggaccctacaataatgatgattgtttctttaacacatgggctatgtttatcccttcctgagcactgactaccgaggcaccgagtgtgagaggcaacggcggtcagggagcaggcgtggttcgtcggcgagcagctgcgggcaacggtgccttggcgtcacgcatccgccgtcactcacctcaagcttgcgggctctgcgaccaccctctcatagtcataggccacagaaggtgtagtagtacttcatacatttcgagcagtttctttcagattgtttgtttttgagcttctaattttgggatgcattagatagtgatgaaagcctaagagtcggtaatatgacttattggaattttagtgttggtactcacagtcagaacatactcctattttgcatcacatttgccttgtgcgtgctgctggtctgttccactcgtgaacatcagacgcgaagattatagatccacccctgatttgaaggtgttcacagattcaggtactgccaattgcctggatgaacaccagcccatttgctccttttccccttgcgttattttccctgtattttactagctgccgtagctggaacacaattccctttcaagatgtcatatttatggaatataattcatttttaagatgccgaaatggaagacatgtgagactcaaaatctcgtgctaaaagagcatggaggttcgagttctctctagagcataatatggagaatgtgtatccaatgagcattcattcttatcatacgctagaaaggtaaaaaacaagaagacaaaattttccttcttttgtcatttagcacccgtatgatatgaaagtcacatgcatggttttgcatgagagaaagaaacgatggaatcttttttttttgtacgcgcaaaaacattgcatgtcattctatttgaagaagcaaagaggcatggggcacggcaaggccaccgcacgaactccagataggaggggtgaggggaggaagagggggaagaagcgaggagggatggagaaggggagagtccgaccctggaggccaggctctcctccctatagcggtggtgcgcggcaaggagcgggccatgatgatgggccagagagacatttgtgtgggaataagtccactttccctccctcaactcatggctgtgtgtgaatagcatccctcaaccgcaaaatcgggtataacccatcccccaacttcgaaaaccgttgcaaatcaactccccgggcggttttggaggtggttttgtcctacgtggcatctttgatcctgttgacttcctgagtcagcaggtgggacccacctgttagtgacaatgataaaagaaaaacggtggggcccactgtcaaccacacttctcttcttctctcgctcctccggccgatcccggcggtgacgtgccgcctcaccccgccgccagccgtcgaggccgcgcccccgctcttgctcgcccgcccctcggtgccacgctccgctccagcttgcatgcctgccggtccactctccaccctacccccttcaccgctgccgccatccccctcctcagatccggagcagaggagggcaaacgagatgagggagctggccggcaaccctgggacgtggaacggcctctcctgcaggtgggccagcccgtcttctccgccgcgtccatgtgcgcgacggccttcccccttggcttcgccgcctacactggtgcgtgccatatgggtttgcaaatcgattggggattctctggtgacagtgttttgcgtgcttgggcagagtgattgagtgctgatcataggcatcatagtatcatacacgcttgaaaaatcacaatacagtcgaccaaattgctgatcgatagcttagtaaatttggtcagcatggtatgccacccggcaattttctgattgatactattgttggggtacctggctatctgcagctttgttgctggataatcattgatctcgcattgttttatatctgactgcttgcttcctggagccgtttgtagatgtaactggagatggaatttttgcagcaattggtcttgccaccgccgtcgcacgcgctgcccccaccaagtctcccccgaggccggccgcacgaatcacgctat

SEQ ID NO: 4608 - DNA, 6980 bp, Oryza sativa
gcggcggcggcggcacagcatcgacgtccccaccggaagccacccggcaattggccgcccaggtcttgacgaagtgcatgaagctggaatcgtcgcaggccacatggtggatggacacgccgacggcgagccccttcccggggaaaaccgtcacctgcaccgccgcgagctcggagctcccctcctccgggcgcgggagccgcggcaccagagagtacagcctcccaacatccatcgggccgccgccggcgagctcctcgaagtcgtcgccgctctcggcgacggtgagctcgacgcggtcggcatccccacccgtggagcagaactcgtaccctccgcctccgccgccgctagaacacggccggacgcggccaagaagcgggtagaagcggtgcagcgcggcggagagcgaggaggcgagggaggggaggaggtgggcggcgaggtgttcgacggcgtgcgggtaggtgtagaggaagacgcgctccaccgggccggtgaagatccacggcacgtcgaagaaggtcagcgggagcacgccgccgtccgccggaggggaggccgccaccgtcagcttgtcgacaaccttggtcgccatgacaatttgccgctgcttcttcttcccctgcagagaattcttggtagaagagatcaagaggagaggtgggcgaagatgagaattcgtgagatttggggaggaatcaggattttttttttcagatccaccaaacgcatggcactggtggttgcaagtgtggcagaaaaatgctctctttgtcactctctattctttattgccatcatgttagatccttttcctttcctactgctttctgatcgaagttggaggaggttcctactactatccaatagcacaagaaaacattgtcagtgaatactgcagaaacagttaaagaagcattatttatcagtaaaaagcattatttgatccagtgaagaaaaagtgatggcaatctggagcctgtgtacactggaaatgagctcatcagatgaaatcaatgacaaaatgttaatctttatactctgactttgcagttgtaacttgcaagtcttttttttttcaaggttccacttaatcacatcggtagtataactgattatccggactgggatccacacaaaagcaggaaaattaggaagagttaggtatgcgattaaaaaaaagttggcaaattagtgtcggcgcatctgcctaccaagtattatcaagggatgatatctttggcattggaagtcacctctttgattctctaatctggaccgcgcacaaaagtttcaagaaaaacaagtatctcaaacttgtctgctgatcacataatattgaagaagtaagacggatggaaatactagctcttaaccttgactgcacactgaaaacctgtaagaaaatactaccagatgggcgtatatgatagcaaccaactgattcagtcaatggccatcagttcctcggagtgaaaaaatgcaatgtttagtcaactgcctaatggaaattcaggcaataaccatgttcataaacagtatgatcagacaactagccaaacagcaacaacaggtataataataagcttataacatcaaaacgcaatttttaccttctgctttccttgataacagatgcagcaataaagatgatttaagctgacataagaacttatttttccgccttaaagtgggcttgcacgttttaggcctaatccgattacatttgggccttaatggtctttcacttcttggaccaaagcctattacatttttgcttacaccacggcaaggcattctcttttttagggcttaaacgttttatacaacacttcagtaaagtactccgtactccaatattatttgcagtcaataaaactattattccaattaacaacatagcaagctcttcaagtggagttaaattaatttttaaaaaagattgaactgaaatgatggagaggcgccacaagcacaatttccaaggcatctgcttgatcagattccatttcattcctctcttttacaactttttttttgtgtgtccaagcacaacagacattggcttgggagatgatggatagggccaaagtttagcatattttgactcctccaattgctacatcttcatgccaaagaccatcctaatcctcttttcatccaagactgcaagtctgcaacaaagcaactcaacacacaatgcaagcactagttttcccttttcattttggtttctttatggttagggattagtgctaaagcagctgcttgattagtggggtctaatctaattactctcaagtgccataattggcatgctttagttttatgcacaactttgtttgaccaatgaccagcttcttgaccagttcaatcaaacaaacacaacaatgcttatggagtacatatatatatgtgatggaaagactacaaaaaacacaaaggaccaaggcaaagaaaaataatgaaatttccttcaactttaacagacaacccttgcatatttaaatgtctgtttctcgggccattgaccaataaaccaggcaattaaatatggcaaacattttgttttctctggtttgcaaagaacacaaagaaacaagaactgaacttgtgaggtgaagctagtgattccaaggcactgataagaacaaaacttgagctagtgctagggccatctaatcgctgattactgaccagtacttagtatcctaggctacctaaccatgtgtgtgtagatcatcttatacattacccacattaatcacgcgttaaatctacggctttgctccaatcgataaagacgagtgatcacaaaagtcactggcctataccaattattaattcaactgcgtttgcttgcatttgtgttcagtcagatgcattcttcttcaggttgtagcagcgccctaaattaactaaacaatgagcttctatatgtgcagggttttgtttgcttgcagcagtatttgatgaccttttcttagataattttaagtgtttgatgacctgacaggttagctgctcattggctagatattgctattagcttctagtatcttctgaccttaactttttagccttttgtaatggattcagtgaacatgtctgaattaaattgcagagtcccaagatgctagtacttctacaaacctactagtagtactgttcttatctgatcactaaattaaacaaacatgtactattaatatactagtgtatttctgtctcaattattgcaatgggattgccatcccacaggattactggtactatactggaattaacatttcttcagttctttcaaaatggcagtgtgattagtgctaagttctatttgatttaacctatctagcatagcaacatggatgtattatagcaggattaactagttgcatgcagtagttaactttggtcaaccatcaaagcacactcaattttgcaaagtaattaatcaaccattgggatcaggacctttcaccgtgtatctgttcatgtgcatgcgtgctaaggtcaacatttaagtagaacatactccagtaattaaaattggaacggaaagtaaacggtggtagctgcggctgatgagttcatacttgcccttaatcaaggggacaatccttatgcatggcatgaaaaaaaactaggattatcagcagcagtctaggacatatatatatatatatacaaaatgattttagggtctctagagaagaaaaacttggtggcaactcaaagttatgtgataaatgtttcttcaactttcggcactctcaagttatattactaacttctagtagcatagtttctcataaaaaaaaaacaaaatttataattattttcagtttacttcgaccgttacaatagtaatatttctccttaaaagaaggcgattgttgatgggagtgtttctgcaacaagggacatgaacacctttttgcacatcaaccatggctgagaaacattttaaatcttatcaagaacatgttggacaggacatgaagtagtgagaatctgcttccataacaagaacaatataggacttgagaagtttctggctcatgcagtagtaacaataatgtctcttaaaaaaagacacttgctgatgctggctgcacatatatgtttctgcagcaagacacatgatcgccttttatactgaaatcaggagaatgtctctaaatcttatatgaaacaagttgaactggaaattattataaaaactagggatagatcagaaaatttttaatgcagttttacactagttcatcgcctgagacacatatgaaatgacacacatagatactgaattcagaaccttgtttcatctgtctcgatttaacctagctaaacactcaaacaaattttggaaataagaagattgcaccaactaggtcagcaagattatacttggacatgcatgcatggccagggtccagtgatgtgtgatgtcattaccaagaccttgttgcaagaagctattagtgttatttagtagtactacgtactaatcatcatcatgaagcagactaattgcttcactatgacgttgcactgataaaaaagttcagtagtacacaggctaaatttttgcttgtccactctctaactcctgcatgcaaagcgttgcattgtttgatttttctttctactgagagtagttggaggttgatctcatcatcgcctgggccagatactggagctcgccggcgtccaccgccttggagcaatgctgctgcatctgcacggcggcgacgtcgtccttgaagccggccgccatgagctccggcagcagcgcgccgccgccgccgaagcagtcgtcgagggcgccgccgggcggccttctcgccatgtcctgccggagtagcgcgctgatgctgccgctgtccggccagctcaccggagagtgcgagctgctctggatgccgcacgccagctgcgccctcgcctgcatcagctgcgcttgcaggatcgcgacctgtatgtagcatcgatcgaatcagtcacaaatccgagaggcgatcgatcgatcgatcgagcagcgacgagatcatctcattctcatccatgaaatgaaatagtacctgctgctggagggcgaagatttgggcgacgcagccatagacggggtcgcggagcctggcctgggcctcgtaggtgatggtgacgacggcctcgcagcggtcggcgacggggaggtgggagaggagcttggaggcgttgctggcgccgaacaccttgtggatcgccgcgaacctcgccgccccttgctccgagctgaagtagggcgcgaacacgcactccggcacgcaccgccgccgcaagaacttgcacgcgccgcacggcgacccggctcccgtccccgccgcggcagcggcagcgccggcagccgtagcaccagccataccgatcaagatcgagcaagaaaatgaatcgatcactctagctacgtgtgcttctctccaagtgtagtgtgtggtgtagtgtagtgtaggtaggttagctgctagtagcggtgcaacttgagatggaggaggtggatttataagaggaggaaggagaggagaggaggaagaagagaggaggacaggtagggtagggtgtctggttcgaggggagcaaacgtgttaatgctgcgttgaataagaaggccaacgtcctctgccttactacgactcacttgctaattaacctgcagcttaaactaatcaattctactactgtatatatatcaccttcagaaaaaagaaagaaatattagtgtacaacatggccatgtgatttgtatagtcttccttaattgatcagttgtcatggagcagataatgactatatatataaataatattggtacgtatgtactagtaatataatctgatcttcattgaaaatatgcagaaacggtccagtttaatttctacactttgcttaccaccaacatcttcatgaacattgaagtttaatttgcaggtgaaagataatcactagaatgaacatatcctatatatgccctcagaaaggatactagctagctagattaattgccgtggaatacttatactgaaccttgataatttttcagtagtactgttggatttgtccagtacaagaatgagaaggaaataaaaaacttactccctttgttctgttataattgtagagcctgttcactttgatgtcaaaaaaaaaccttatcaaatttttgcattaccaaaattttggcatagcaggatttcttatatagttaccaaaatttgacagcaaactaaatgtagccactttttttgcgactttacctaaatttgataagattgaaaatggcatcaaagtgaacaggcccgtagtttagttgtgggtttctatgttatacgtttgactattcgttttatttaatttattttatgaatagtattttattgttattagataaaaaatgaatagtactttatgcgtaatttatatttttaatttttttaaataagatggacggttaaatgttatataccgaaacccacagggagcctgagagggagcaatacattttggatttggttcaggtgcagtccctagtgtgactgcaacttaattagtcacactaggaccatccaagttgcatctaagggctgagatccttagagcactgttcacgcgtaaaaaatatttcacagctactgtagcgatggtactatagcagttgatctacacccttgatctaaaaaatgaatggatgagataatgtgccgtcactgacttgcagttctagcagtgactgcatttgatctcaatccgtacattttgtttgcagagaaactacattttcagtagaggagatccagtcaagagtgaggcatgaaccaatcaatcaatgcagctaaattaaaattatactatcaattgaagtgagttgagtgtgcacgtacgtaggcgggctgcataaagaaaccatttcgcgccgaacagccgcaccttgcacggtc

SEQ ID NO: 4609 - DNA, 7998 bp, Oryza sativa
  unsure (1)..(7998): unsure at all n locations
cttgtgaacaacatggaagcctgaaaggaagaagactggactttagactgatgacctgatgagtgatgacgagcaaagcagaaaattaaactcgattgtttctaaatacagttttttatttttagtatatttctctgttttccaagcattagtttaaattgatcacaattctgtttattttagaattagaaaaacaataactagctttttcgtcggttggtgaggattaggaaagcaaagaagttgcctggctcaccaaacaactaccccaactataataactgcgttttggtgtgcccctttgtccaaaaactcactggagtatacataccgctttaaggttgatatgactagcttcattttttttctcaaaaaaagtgcgcatggtatggcccctatggttctgcttattcgtggaataaaccaaacgatatatctacaaacaaaaaataatttgtgaataaaacttatatatatatatattcttagcgatttaaaagtaaaaactgaaaataaactttgatgaaaaaaaccccaaaatcaacttcaaatataacgttgaaaatttaaattttggctgataagcataagcatgtctcctggcttagaaaaaaaagagaacatgtaaatttcatgatattttcatagaaggaaatttagttcctgtataaacgagcaaactgcatttcaaagagtgctcagtagtaaaaattacagatatttgctactgataaaagaaaaaaagacactcgtgtggatataagaaaaagggaaagcaaaaggggtagagaagaatttaatgggagggagttacgtggcaggtcaggtggttaagaccaatgatgtgttatgcaagagctcacaggcttaacacactttatgttagtatcgtcattttgtagtcacatgcaagataagaccagtatgatgatttcctagataactcttgaacgaacttaatctcctggatcagtgagcatgtgagtgtgacagtgagcatttaactaacctgacactgcatttgcatccatcataggcggttattgtatacttttccgttaaagctgtgtttagttcacgttaaaattagaagtttaattaaaattggaacgatgtgatagaagagttgaaagtttgtgtgtgtagaaaagttttgacgtgatagaaaagttaaaagtttgaagaaaaagttggtaactaaatcaggcctaagaaaaaaacaagaagaaacgaatgacgaggagtaaaatattactggctgtgttgatccgagacattaattcaagagatcaagatgatcaaagcatccatgtgttggtgaagagatgataattgtatatgatcttgttgaatcatgacagatgttggagacttggagtgtaccccactatccgtaatctctgcagtaccttcgcatcatgctgtttctgtaattctgttagcactaattaaactagagattcagagcgcagttgcttatgattgatttaggtcatgttctttttatattatctatcaaattattgtcgtagattatttgttaattccatgcttttaaaaatatatcttcttgaaaaatatttttttatttgtttggtttattatgcataacattgaaccgattcctataatcaactagatcatcgaacactaactaccttaatcttggagggatcgagttgtatagggtatgaagataaccagcatgtggcaaacaagactgtcagattgtgcaattacattgatgatgaaacgtgggtgctaggtacgacccatgcacggtctagttgttaaaatcaaagaaaaatagtaatgatccaacctggctgcccaccgaccatcgtataatcgtagcaacttgcctagcatgttattacgtcgtacgtagtacggactacggagtactacatttgttatattaattccatgaagaaaatgatttcgtagagtacaatgaacagttaactcttaactgtaactgtaactgatgccgttctcttttgtagaaatcagtaatcactcatgatactgaaatggcaagtattcccctcattttttaatatataccatcaacaacattttaacgaaagtttaatcatccgttttattcactcttttttacaaatataaaaaagtttgtcatacttaaataacacttatcacttatcgataaatcaaatcacaataaaataagtaataattatataatattttaataaaataaatggtcaaatatttatcgaaaggtaaatgatagtcgtatattgaaaaacgccgtatattgaaagcgaaggtgttgataacgtagatggtatggaattgagagttgccccttggtggacggcatgcagcttgcaataatcaggtggagatgcatttgaaatgtacagtactccatctattcctaaatataaggtttttttttattggatataacacctgtttgttttagtttaagattattgcaatctaaattattgaggcagaatatcatgagctggattataataaaccaacatagaataagcagtcagctgttgtttctctggattattaattgtttgttagatgttaatcacccaattatcttaaaaagtacatttagagtggattaccagattatagtaatgctatctgtttgttttaacttacttctaataatttagattataataatcctaacctgaattaaaccgggtcttagtataacgaagtaccgtctaaattccgttgtattagaatgtgtcacgtttgggcaaaatcttttatattttaggacgaatagagtataataaataatagtcgtacatgcccctgttttgtgtcaccatctggctgcagttgcagatgatgatccatcatcgtcatccatcagttttgatggcagtgtggaagcggaccatgattaatttgatttattgatcaccaattcgccgtagtgagacggatggcttgactttgacttggactttgacctcatcctcgaagtcggcaagcccatatatgggcccactccatattggtcaatgtctcaatgggccgggcagtctctccacagagccgaagaatccatccaaccatccacgtgtcccttcaaaacatcaggaccgtctacgttgttcactgtgagatttgcagctcttcctttccagtagcaaacttctcgtactttcaggtcaaattgcaggtaacacgactacatagtacagtatgtatacagatgagaaacattcccataataactactccatctgtcccaaaatataagcatttttagacttaaacacggtctccgagatgctactttgaccaacaatatctataaaagtaatatgttttaaataaaaagacttacatattatgataatttgtttaatgataagtctagtaacatcaattttacatgattgatctttttttattaatagttaaagttgaaaatgtttaacttatcactatgctaaaaatgcttatattttgggacagagggagtagtagtttggtcaagagcatcacagaacatgaaactatgacacaaaacctagtacagaatcaggttgtccaccacaatataaaactactagcgtgatatgtggacttagcctcaatgtagtgactttcttgtttcaaagaaaaaagttgtgactttcagcaaggccagtacactgcaatcgcatcataagttcataatcataactaacaagtgtaaaaagttggactacaccttgacaagcgatgacattgagcaaatcgcatcataagttcataatcataactaacaagtgtaaaaagttggactactccaccttgacaagcgatgacattgagcaaaaaacttgtgaacttctgtgagatggaatgtacaatagagcctcttccgttatgccacaggtaatgtacttgagagcagattctttaatatcatatcaagcaactgataatacatatagaggcaccatcagtttcagactagctgataatacataccaaaagaaacatctcgagtttcacttgttgcctcagcgtgaggttgtaaaaagtgaatatcagattacttgttggttcttccctgtgagatttgcatctctttccagtaaacatttcatactttgaaatcaaatggtacttcctccagtaaacatttcccgtaagactttctagcattgtccatattcatttagatgttaataaatctaaacacatatatatgtctagattcattaacagctatatgtatgtgggcaatgctagaaagtcttacattgtgaaacggagggagtagctaacatgacaatatagtgattcaaagggaaacatttccataattagttttgttacttttgtcaagaacatcacaaaactatgacacacagcctagtacataatcgggtcgtgtccactacaataaatttaccaaagccacacggtggacttagccacaaggttgagaattgacaattacactgcaataacatcagaactaacaagtgcaaaaagttggactactccaccttgagaagtcatgatatcgagtaaaaaacttgtggatttccttaggagttaaccttttttaagttgtcttgacccaaagccatactgaagagaaatctattttttatcagaagggcccttatcattagcctgagacccaaccaagtcctcaagagtgaagttaagagtatctgttgagcctttcttcacctcctctccttgttcggctagaaagtcttcgatgcttcctggctccccaaaccagccaagcctatccgcgatcaggtggaaattattgcagccgccgcaacgagcgaccaccactcctttctcatatgattccttgctcgccatcttcatagacctggtctcgcaaaccttgcacgtaaagatcatggcgaggtcgtgtcnnnnnnnnnnnnnnnnnnnnnatgtatctctaactttgaagccggaatccgatgaagggaccgtagctggcacggtgtcggttttggaatcctctatgtcctggttacggtcatctgaagcattattgcttgcttccatgatagtttgcagagatcttatgccagcagtcacaggtgcaggaaacaagaatcctgcaataacagattttcattagttgactgtttaattaattcctattgcaaagatgtaagtaaattcttgtcatacgtaatgatttgaatggtaaatgctttagatatttgccaatctggcaggaactgacaactagcaacaaacagacacaattgactctataatcttatctttattattactactatagttgccaccaagttttttcttcagttcttcaaccatatcaccttaattttaccaaaatcaatcccaaaacaagggaatccccttgtttccatatttcaatcttctcatacccccaaacacaagggaaaagggcgcagacgcagtgtaaacaaaatttgactgtagtggcagcagcaaccccggattcgagcctccaaccaccggcctctccaagtaaaacacacatccgcgagagtcatcaccaatatcgactagatttatccatgccgaaccaaaagagggagctaaagcaaaaaaaagtttgggggaatcacctcgggtggacgcgggcgcgggcgattgattcaggacgccggcaaggccgcggcgcaccagaggcagaaaccgagtggccatggcggcgaactgtcgaagcaggagaaggggaagggctggtcgccgccgccgccgcagccgcggggagccttcttcttcttgtcggcgaagaaacggtcgaagagaagaataagagagagaggcaacaagacaaggggagcgtgtgggccttgcttttataattgggccctagttttactttagttgagatgaggcccaatacagcccatccagatttggatctaccaattgttcctcaaactgggccgagcacaaggcagttgtgggccgaccggactatgggcctaggccggattcatagcccaagaggttcttgtcataattgggcctaatgtaacttgaatggaaatttagcccaatatctgatggcgaaccaattcggcccaaactaggatcgctaccattggttactgggcctaggcggtgactggatgactcgctcgttttgcggctcaaattgggccgtaagatctgtaaatggctgcgatcgatagccgtccgttagagagcgaacggcccagatttgtgacatattttgctctcccttcgctgccggagacgtcgtcttctccggcgacagcctccgccgccggccgacatcatcggcaaagaaaacgaggcagaggacgtcgagaaaaaaactttggtagaagcaacggaaaccgatccagcacacgccgaatcgatcgcttcttgcttgatttcatcctgatttgcttctgcgttttccttcatccgtgtgagaactgagaagtcatgcatggaatctgagactggacagcatcaactgcatcacgccattatttgatgcatcttcattaatcgaggaacataaagcaaacagatgctggacatgcagatcttgagcaaagctggaacagctagatcaagaaccaagctgcacatgcatggatcgcatccaaaattcatccatccattcaggccatgccaatcatactgaaccttctagtagtactgcattaatctttttgctagtatttgggtttaatgcagtactactagtactatgcaaattcattttcttttccttcggaatcagttaatatgtttattctatagaaatgaaataagattcagacattcagaatatcaggcaaagcactttgccaccagaaattaacccaaatgctagcaaaaagattattacaagtctttgtagcaaactctgaatgaacttttgtgtagtgatgaagcaagagagaatgagcctggcaagttccttaatttgtacaagtttctctgccacattttttgactgttcacttcagacagtatattggtccttgtaggcgtcctgctgttagtcctccatactaaaccatttgagttgtgtttttgtgcacgtttttgtttgtggattgttgttgactgagatgtattgtagacatttcactctcaattttttttgatcgagcagcacgagacagtgttcactctcagattcgatagtattctagtattatactatgaatagatgacatcttttcagtttcagataacaaattgttcattttctgatgaaatgactgtgaacaatcttagtagaattgtgcaaaattaagagccaggtcctaattaactagctgactccgagaggcggctaagatgaggttgagcaaagcagcacgcaatgttttagagagagtaatcttgcactaccagttcaacataaaaacctgcctctgatgcgtcattgcgtctgtattattttgacctgtgaattactcctaccagctagagtagcatgcttttgttggtgcatccttcggacgaattggccaacatttacatacgaaatggaggatcaaaattaacataattacagagacatcttaatcggatgatcatcactacacggtccaagtgtgaatgctgatgctgtaggagtatcattcacattatgcagaggctggacacagcagagcatgacgaaagaggcgtcgctgtcatatggtggcttaagctgccttctttcctttgtttccatcctgtgacgaggcgaattaaggaggcagaatcatctactctcggagacaaaatcaaagcagaaaagaattgttaattcttctccgctgttctgcttggagtcgtctagtagtagctaattacgcagcacgcatcatcatttgtttgtttaatcaatcgatcttggctcgtggacgatactacatgcagtcacgtcgctgtacaccatgcctgttgtctatagctcgcatgctgtttaattgcatttaccagcacaattaattatcccgatggagtcaaccgatcgatcctttcttaattttctctctattt

SEQ ID NO: 4610 - DNA, 12575 bp, Oryza sativa
gccagggagcgcgcgcacctgctgttctcggtggaatgccgccgccgcctgaccccgccggtgccgcaggagtacctcggcaactgcctccgcccttgcttcgtggaggtcgacacggccggcctgctcggcagcggcgccgacggcgtggtgacggcggcggtggccatcggcgcggccatcagggggctcgacgacggcgtgctggacggcgccgacgggtggttccagaagatcgtgtcgctgatgccgcaccggccgatgtccatcggcggctcgccgcggtacggcgtgtacgacaccgacttcgggctgggccggccggcgaaggtggagctcctgtccatcgacaagacgcccggcacggtgtccatggcggaggcgcgcgacggccacggcggcatcgagattggcgtggcgctgccggaggccgacatggcgcggttcagctcatgcttcgccgacggactgaagcagctgtgagtgacgaacagcttgttgcatttcttgctttcttgctgctacgaattgttgcagagttcagaatttgttcagtttggatgtgattctgtaatgctagctgttggattgcaatcgttgatcgatcacataagcgattgtgaatttgcaattgtcaatctatgaaataatcagataagctgtaatctattctacatttttttcagagatggagcaggataaggcctgcttcgatcaacttctgttataaaaaagacactgaatattcggctgtatactgcatctgaatctcctttttgcttttaagcattaatagtgagcttgtgctgaatttaccgacggcgatggagacacgagagaaacgatggtttggtgaggaatgtgtattgtttaaccgagtaaatctggtgctgaaatgaaaattctcagaatgttcttcggtattgagtattgacctttgatcgattcggcagagtttgctttgtccacttcatcggttagttcaaccatccatttcctgatactaatgttcacaactcacaaccatatatcagtttgttcaggttaaatttcagcagcgtgtaaaatggcatccagcccattatcattggatgtaaaatgacattatcttttttgcttaatattgctactccaatttagcaactagttgcagtggccagtgagccatggacagatggtcgttgttgtcaatagagcacgtcatgttcaggttaggcaaccacaattggctggaaaggttgtgtttttgtcaaagttcgttcgcttcagccttcacgtacgcatcatcatgcatgacttcgagctttcagtggtgctgcccagctaagagatgccaatatcatcacatctcattttctccttccatcgcagatatttttaataacatagaagtacaagttaccatctatagaaaaacagcatagaaaaatagaaaataataaaacaagagtagagaaaaaaaatatttttttgaaaaatgaaaggagagaagtactctcacagtctcactggtctcctggctagcagagtgggtaagcccagcccaacaagcatcccactagatcatcacggcctctttcggttgggcctagatttaggccaatccacgcctccgaacaagtagcccaaaaacccccactagatcatcaaggcctcatatagttgggccggaatttaggcccatataactaaacctaaggcccatcaaatctccaacccttcacactctcctctcatccacgtaaaccaccctctccctccctcgccgccggtagccgccaccaccgccgccgccgcgaacttccaatagatcgccggctcgccatggctctacgccgagccgcctccctcctcctccggccacggctccgagctcccgttccgatccccacacccaaaaccccaaaccctctcctcctcccgccccgccgccacttctcccagctcccgccgcctccagtccccgcctccgcggccgccgccgccgcggccgttgcggaggaggcggaggaggccttcgaggcggcgaaggggaccaaggacctgctcgccgccttctcccgcctcgaggccgtcatgccgccctccgacaagcgcctcgccctcgcctgcatcaagctcggccagcacctcgaggcctccggcgctgccgacccctcccgcgtcctcgccctcgccctccgatccctcggcatcctcgaggccacccctaactccgccacctcgacgacggcctcccactccgatgccgtctcgctcgccatggccctccacctcgccggctccgcctccttcgacctctcccgcttccacgacgcactctccttcctcacccgctccctccgcctcgtctccccactcctcccctcctcctcctccgccgccgccgcctctggtgacgacgacgctcaagggttcgacgtgaggcccgtggcgcacgcggtgcgcctgcagctggccaacgtgaagacggcgctggggcggcgggaggaggccctagctgacatgcgtgcgtgccttgacctcaaggagtccatcctgccgccgggtagccgggagctcggcgccgcgtaccgggaccttgcggaggcgtactccaccgtgctagatttcaaagaggcgctcccattgtgcgagaaggcgctcgaactgcatcagtcgacgctaggcaaaaattcggtggaggttgcgcatgataggcggctgcttggggtgatatacaccggcctggagcagcatgagcaggccctgcagcagaatgagatgtcacagaaggtgatgaagagctggggcgtggctggcgacgagctcctgcacgcggagattgatgcggcgaacatcaagatcgctttgggcaagtgcgacgaggccgttactgtgttgaggaatgtctctaagcaggtggagaaggatagcgagatacgagctctagtgtttatatctatggcaaaggctcttgctaaccaggagaaggccggtgatacaaagaggtgcttggagattgcttgtgacatactggagaagaaggaattggctgcaccagacaaggtggccgaagcatatgtggaggtatcctcactgtatgagatggtgaatgagtttgacaaagcgatatcattgctgaagaggagcttggggatgcttgagaggatacctcaggcacaacacatggaagggaatgttgcggctcggattgggtggctattgcttctgacagggaaggtgtcggaggctgtcccatacttggaggatgcagtggagaggatgaaggacagctttggaccaaagcattacggggtagggtatgtgtataacaatttgggggctgcatatatggagatcggccgaccacagtctgctgcgcagatgtttgcgcttgcaaaggaagtcatggatgtttccttggggccgcaccattcagataccatagaggcctgccagagccttgccaatgcatacaacgcaatgggaaggtatgatttcacaacttcattccattcattcaaagacacataaaaaatgttacaaaaaaaatactgaacagacaaattttggatgaaacaattctgatatttgctagtatcatgtctaatataaccaggcagaagattaaatgagctacaataatctgcatgttacctatcaagctagtttgtttttgcaatgcttgttctttagctagttttcaggatgaccatatgttgcatttttgcaattattgcaagaaatgctttttatacatggtatgctactgcgtttgaaattacagagtatgtaattgtgctccctgcatactgttgcatactcgcattacatcattagagggaaagggaaattactgattgctttgtttcatatgcattaagtacgcacgcaacataatggctggctgatattgtaagcacactattcagatctgcttctccaaaatagactagattgatattttttgaatgggaaaaattaaggaaactaagaaagctctttccacatgctgtattaatgtatgaagtactatgcgcttctctctaatgaaaaaaaaatcattttgcctcaaatgcagctatgctctggctatggagttccaaaagcgagtggtggattcttggcgaaaccatggtcccagtgctagggacgagctcaaggaagctattcgtctctatgagcagataaagataaaggctctttcatgcctatcgcctgaaaattcagcaattgcattgcctgaacctctggaaaaggaggttgattctgattctaccagagttgctcaacaataatttcaaagtattgtacgcatcagtttttctatcaatatatgattatgatatgttgtttagtagtacaagaaattttggctgtgaaactacctattgtatgatccttattgacttgttacgcactgacatccttttgtgccacttagaagacctaacagtatatcaaaagtaatcagaaacacaccttttcagcatgacaggaaccttttagagatatataatatgaccttttcaatggttggtgaactgacattttcctgcgacaaggaaaatctgatttgtcaagctatgatgtcatctaagacacagatttcaatgttagattattataagaaggttttggtgagacattggattacagagttttgaaaggtgtctacctttccccattcagttcatgtttttattttcttttgttttgcctgactgcctgaagttacaccttctaggattggtaacacatttatcctgtcatcagctgattcgctttcttctgagtactttcactagttatttaacaattcaaaacttgatttatttatttatatatttatttggcatattctcgctccttccctttctcattgttgaatttgactcaccatatcgtatatgatcatttggggatcacatgcatgtatcagtgcctgaagaggaagcttgggcagattcagaggagctggaaaatacagtagcagtaggagcaacttacattgttttgcacgaatgtttcacagaaagaacttgccattctactgtctgaagtctggaatttcggacacacacaaaccatgttataggtgtccattagagaaaaattgacatgtaatattgcattttgcagaaaaagaaaagaaaaattggtgaacaagaccaccaaaagaattcgcatagaacatggccatagaatgtgcaggcatagtaatccctacaatgttccagtgctgctgctgctgctgtcactgatatccctgtggaagtgggtgctcctctgcagaatattctgaatctgcaaatgcacctctccagcaccacccagtgagtccatggagaaggacctcctcaatggaagaacatttctgtccctcctcactgcaatgcactcatctcccttactgatgctgacatgccatgcattctggttcttcgtcttcttactactgacctgttgatttgtactagtagcatctactgcaggatcagaagctgccgtattggcctcctgctgtggtgcttgtgcaccttcttcttccgcgccagtgatcacctgaatgactaccacctcaggtctcacgaactgatccaatggaagctggctgtcgttggtggctatggctgccctgcagagtggacagttggcgttgccctggagccaagtgtcgatgcagtcaacatggaagacatggaggcagctgggcaggagcctgaccctctcctcttcttggaactcactgatacacactgcacactcgctggaatcagcagtagtgtccttgatggccttcctgtacctgaacgccggcaatgattggatggccgcctcctccagcccacgcggctcggccactgccgggaggctgctggaggcggcaccgcgtcgacggcgggagatgaggccagccgtccgcgtgtcggaggagctgctgctgttccagttgaggcagcagcggatgacaaagatgtagtaggtgagcaggaggacggaggtggtgaggatgcccaggacggtgagcaccagtattgggaagctcgtgatggatggatggtgaggcacaaaagaagaagatgctgaagaagtggagtcgagtgccaatggccgtggcggcggtggcgggaacagcagtgatggcatctgttgcaccgggaagatggggtccctgtctgcatccatggtttgctgcaaacacgagcttaagcacacaagcaggtgagctactgagctagatagaccaggtttgatgatgctgctgatgcaacatatatactggttttcaggtatgaatggtgagaccaaatggtgatgctcaatgtagtggccaacgaggtaggagggaagaatgaaaaggcagcacccgatcaggttggaaaatgcagtggagttgtgaaagaaattgaggaaggaaagaaacccaacctgcagagcaagagcaagagcaggacagcagcagtaggagcaatagttgcttgcacaacagcacaacacaaggaaaatgaactgtcagcacacagctatccttaatttgcagcagcttgcaggtttgcacacactccctgcagagatggagatgctgtgtatgatgatcacggcactggtggtgatggcggcttgatgttttggatgcgattgaagtgtggccgagtgacaggaacgcggctttggaggtgagcttttgcttcccccttttttttcatgtgcgagtgcgacggatgccgcacgccgccggtgttcccggccggcctacgcttgctgcttccttgtactgttaggctttagtagtggtaatttctttcttggtctgtttcttgtctaacctgtactaggagtagcttgctagtcaactaatctgacgcttgcttgcttttggtcttgtcagtacgtgcattccttttcgtctggggcacggtgactgactgactgaaggactgacttaacatcccctgtctgctgctgctttacataagaatctgtacatttcaggccaccttcgttcaattatgtgtgactcaatacttcaattatggtgtgtactccatgtctccatttaggttaagacccagataaggtctaattatgcataaatgaaccagacacaagtccaacaagcactagtaatcaacaagatgctgccaaatatgtactacaccctctgatgcctgaactttgtttgcatcaggaaacggacgaacagatgatgcaggaattcaggcttcgatgatataaactgagatgttgttttcagactgcgagttccggtgcacatcgcgatcgctgatttacagatttgtaggatgcgtggccgggagattttggttctgattcagctgaaggtacaatatgcttgtgcagtagtggtccacctgttgctcttgctgttgttcggacgttgctgtcttccagttcatcatcactagagtagtactcttgcaacacgacatttgcagctccaagaatgggaagcaggagagcttgagggcactacgtctctccagtactagagaactgaagcttctcttgtcttgctcgtggaaccttcttgctgtcggtggagtagagcgccatggttgatagtctgcaggtggtcagaaactgtttttaccaagggatattggtggcaatgtagtctgaggattgatggtccgcatttcctgcttcttcatttgtaataaacgtttattatgtgtgtttgtgtgcatcagttatgcacctcagttatgcagaggctataagagatctcagcacggttctatcatattgatgtaattgtctgagtttttttttaagaaaaagcttccttatctaaaagaatggttgatagtaaagcagtctgcacttcatgttgcgccagttgctacggatgatcagaatcaggatcaagcaagaatgaatatattcatgaattgatgcgtgatgctcaattggagttcaaattcagacaagcaacctttgattttgcatccaagaaggatcaggagaaataatggccagttcatgatattagttgaaactggttgcgtataatctccttcagatcatcggacagtgactagcactaaaaccaagttactgaagatctaagatcagacgcacctgaaagaaaccaacccaactccctccggccttgcctccattgaccattaattttgccgggcaatcttgtcgttgtcttccaattttggctatgtttagatccacgacaaaattggaagtttgaaaaaattagaacgatgtgatagaaaagttagaagtttgtgtgtatgaaagttcgatgtgacggaaaagttagaagttcgaagaaaaaagttggaaactaaatagggcctttgccgggcaatcttgccgtcgtcttcctctccactgagatcaacttctgccattgccgccgctgccttgcatctgccttgcatggatcgcagagaagactacatggcagcttgtgctatgtgaagatgaagcattcgccaagctactgattggtggttgcttatattggacagagtttctgccatctcctgatcagcttcctccagcttagcttgggatgttttgtcgatctctgaattttatttgcgacagtgagcagatgcatctttcagttcggggactttgaagtacagctggaaaatatccacttttttgtcgtggtattgagaacatgtgtgatctcacatcatactctgacttctattttgtcttaaaaaaatatcgattcttgatttgttcagtgggctcaatggtattgcaggcaaagtagtatactacttttcggtggcattagtcatgaatttcatattctccaaggaaaataaaactatatttttacactatggtttattcgatacgtatagtttttctgatctgattctggatgatggtatatttttcttcagatttgggacttggcctggtcactttgcttaaacaatcaaatacgctacaagattttgccttcttcagaagaagaggtagatgcacatataattttccttcgatccactcatgcatgatgcatccattaatctatttggacgatttacttcttgccacgatcatatatattctgcttacattttgcagagcagggtcactaatataatgaggactcaacattattataagaatatgaagagaatccagatagaatcatgcatatatatagccagttggttgtcaccaacaacgaagggattagtaaaatgtcagagcagcgaattgggattaagcatctgggccggaagcaatatacatgcgtgcagatcagccagctactccttaactgcagaaaattatattagcagatgcatcctctaaactccttgaaatctacagaaaccacgctgtctcagcacacagtaataaactaaaaatcacattactttcgcgttctgctcgtgtttctgaagaatgaaacccgtgtcaatgaccttcgcatgattagtatgcatagatatcgtctgaatccatgcgaagacaggagaagactcttctgaaattgagcagccagctttgacgacgctggtgccgctaatctcaactattttttcactagattatttgttgtacgcttaaactctcttctactacgttgttaatacttaataatccatccgtttcacgttataaaacgttttgactttaatcaaagtcaaactgcttcaaacttaactaagtttgtagaaaataataataatattttcaacacaagacaaatttattatgaaaatatattcaattattgatttaatgaaactaatttgatattataaatattactatatttgtctataagtttagttaaatttaaagttatttgactttaaccaaagtcaaaacatcttataactacggagggagtaccacttactccctccttccctaaatgtttgacaccgttgacttttttaaacatgtttgaccgttcattttattcaaaaacttttatgatatgtgtaaaactatatgtatacataaaagtatatttaacaataaattaaatgatagaaaaaaattaataattacttaaattttttgaataagacgaacggtcaaatattttttaaaaagtcaacagcgtcaaacattttggaatggaggtagtattttagacctatttgttaagttcttttttaaaaaaaaaggtttaatttatctctatacctaagtagataattcacgcaataatccggtacataataccctgggcctccttaattaaaaaaaaaaggtttaaccattcagttcactgcagccaatgatcagtgggggccattcactgacaggacttttccatggcaagctgatcgtcctcttgtctgaaagattccaaaggaagggtggatgacaaggaggaagccgccatccaccacccaaaattctattggattctacctatgcatattgtgcgccatgatcagtaagcacctacttgttgttgaaagcaccaagagattaggtaaatcaaaagtgtccaaagacaacatcaggaagcatggaaacccaaagcttgcatcactgaaagagtgatttggttcactcatcactgggttagcgacatagtaacaaatgtcactacttactaggattggataagtgcaaatgtgagctaatttaatcactgtgttcactgtggtaggtagaaaacaacagttgattcacagtttagcagtattataatgctagctcgcctactagtttaaggaaagatcctataatttgacactctataaagtgagcttcgattatttgttggtacatgttgtatttatttgactctagttttttttcttaatcgccacacgttgtcttgtggaaacaaattttgtactatgcgcgtattttctcgatgaatatccaggagcgtagaaataagttcatttgttggtacatgttgtatttatcttttgaagataaacatgttgtttttatgatcttcaacaattagtacggtagaaaacacacagtcatgaattttgtaccaatccgtgtgaagctcacgccattattacggttacaatcaccatttttgatatgacaaatgcagtgaaaggaagtaagaaaaagtctccccaactcataaatacttccaatgctatttttttctacaactacaaatatcagcattgcacttactctgccctttggccatcttccatccatccaaaaacatccacacttttcatacaaacaaacaaaattcagagtgcataaaaacaacaacaaaaaagagtcagatgtacaagggagaaaatgaaaggaaagagaaatagaagtaaccccacaaaaatgttcctaaaatctccaaccaaggagcaaggacccatacatagtatgtctaatactcagggggtttgatacaaaaaaagcttatgcttttattccaaagtccaatacaagtctttggggaattggcacaggcaggagagagaaagagagagagacccataccaatgccaagaacaagaaatcagagagcccaagcaaaaaatccaatccgaatcccctccaaaaacccaccaaacaatctcctccatctccaagaacaagaacaagagagcatcctagaacattaggggataaaggaggaggagaagaagaccaagaaaaggtactacctttcatctctccctcccccccaaatacacactggtcgcaaaacgagaggccgcctcagccttctccaatcccctcttacggagagcaaagcaagcaagatttttcttcgatctctgctcgagtttcttgctgtgaagtctgttcttttttcttaactgttactgctcgtgcgtttttgagaagtttcgagaggagagggaggagagttcaagaacttggagagaaggggatggatccggtgttgctggacgacatcatccggaggcttatcgaggtgaagaatctgaagccggggaagaacgcgcagctttcggagtcggagattaagcagctctgcgcaacctccaaggagatcttcctgaatcagcccaacctgctcgagctcgaggcccccatcaaaatctgcggtaatttccctgtttcttgtcacgcgtgagcaatatctttgatgttggctgccctcgaaaatgtcatcttggggatttgcttggttggtcaacgggtagcaagtgactgcgtcgtgctgtttggatgcacttgcttaatgtactatacccgatcttttgattgatagccagatattatccagctttttaggtgttttgtcgcttgatgatccggttatcgactcgaacagaggtttaccacatacttcctaatgaatcatgtgattcagtatttccgactatatgtttgctcatagaaagcttatactccgtgaggcagacgatggttatatctagatttctcagtggttcagtacaactgaaccataccgactatatttgctgattgaaagctgctattttgtgaggcgatttgttgatagaaagatcaaagatagactttcaagctgctactaggaaacttttgaccgctatagtttatggtgaattgatcatacctgatacaatcacatttaatgtatctcaatatctggcggtctgggtacaccagcctgatat

SEQ ID NO: 4611 - DNA, 49826 bp, Oryza sativa
  unsure (1)..(49826): unsure at all n locations
aggcggcgaattttcgcttgccaacgctccataggagtattgacctcatcaaccccagaccaaactttttttaccatatcaacaaatccatcacgttacaaccaaccaagttcaaacttaaaactatgttgagcgttactaaaagaggaagattttgtatttaggagcaaaggagtatggtctgaaatatctctattgagagcaacaaaagaggataaagggtatttttgctcccattccgttgacactaaaactctatccagtttctcataggttgggtgtgccagattatttgtccaagtaaaattcctaccagtcattcgtatctccctaaggcacaacccatcaataatagcattaaataagaagggccatctatcatcataattatcattatttattaattattattattattattattattattattattattattcaactttgagacaatagccgtcacgtgcagagtggcatggcatctccaggcacaagagaacatcgcatgacgcatcggcatcacatgcatgagcacatgacgtgtggtgtcacagaatctttgggttctcctgaaaataaaaataaaaagctcaatatttcgaaagctactctctgcatcataaatatgttttctttcttccaaaatataataagttttagttagataagacatatcatagtattacgaatctggacataataataggatgtgtattatccaaccatatccaaatttttagaactacgaatctaaacatcgtactaggatgtgttttatctaattatatccagattcatagtgttataaatttaggatgtgtcttatccaatcaatttttttttatattttgaaacgaagaagtaacaactatctactatatagattaatcatagaacaatttgtacgctggtgtccagtccgacgagatgagcatgagctttctgtacgtggcagaaaaaaatccatggctggctgacattgcaccgtgccggacggtggcggcggccgcgtcgccttctcccttcctggcgctgtcagcttgtggggtcgggatgtcatccagcgtagcggaatctactcgcccgcccgcggatcgctctcgcgctgccgaatctcaaaaggtgggagcgaaacctttttcttctgtcaccccagcttttccttacccccacacagccagcgcacctacggtacccgtatggcccacctgtcatacaccacctgacatatccccctcggcttcccaccgcctgcaatcgggccccaccacgctccgtccaatcccagtgacaggtgggccccggacagatcggtccacctgtccgtgacacgtgctcaacacgtgcgactcgcaggtagtagtagagctgaaaatacgcaacgcatccgcgcgacacctagcccttctcgatctctctctcgctgcagatccaaaccaacctcaccgtcgacgaggaagaaggcggcggcggcggcggaggcgaaggcggcgaagatgcagtacaagaacctggggaggtcggggctgcgggtgagccagctgtcgtacggggcgtgggtgacgttcggcaaccagctggacgtgaaggaggcgaaggcgctgctccaggcgtgccgcgacgccggcgtgaacttcttcgacaacgccgaggtgtacgcgaacgggcgcgccgaggagatcatggggcaggcgatgcgggacctcgggtggcgccgctccgacgtcgtcgtctccaccaagctcttctggggagggcagggccccaacgacaagggcctctcccggaagcacatcgtcgagggcctccgcggctcgctcaagcgcctcgacatggactacgtcgacgtcgtctactgccaccgccccgacgccaccacccccgtcgaggagaccgtgcgcgccatgaactgggtcatcgaccacggcatggccttctactggggcacctccgagtggtccgcccagcagatcaccgaggcgtggagcgtcgccaaccgcctcgacctcgtcggacccatcgtcgaacagcctgagtacaacctcttctcgcgccacaaggtcactgatcccttatccctatccttccttccttccccccaactggatctcatcttccaaaacccatagcaatttcaatttggttgggcgatacgcgcggattgaatttgaattgatggcggttcacggatttcatgtgtaccaattgatgagcacttgccgatgtttccaccgcccagaacgagagctcgtttaaaatcgaaagcgaatatgtttaatgctggtattctagtactccaactgctgatgcgtagtactgtacgtaggtttggtgagttgggattaggatcagatccttctctttttcacatttattattgtctctttgatgagctcctagatcctgtagacactagtaccgttagtattccacctgcacggatgagtaagtagtataccaattacatgagaattttggctacacatgatagagcatcggttcgattcgcgatggtgacatctccgcattttcacctaaactttgaaaattaagcacaggtgagcagtcagggaggatgagtagtatagatctcatcctcctcgatgtgacctgtagcactacatggctccagcgatagtatttttctttagcttcagaactggagtagtaggcagtaatgtcggccatgcattgctttacattctcttgtgtcattacgccaggcaaaagacagagcaatgctgataatgaaagctcaagtataacaatattgtggagattacttagacaacaatgctcctttcatacttacaattggaagctttatttgatatttagtctttatcaggttgacaccttgatattcggtcataatcaaatgagatggcttacgtaaatatgtgagatctcaaaaagtttcagtttgggctcccaaaaatttttctatttggcagcttcagcacgcttaaaacagaaaagacagcatgagcttaagtagtcaaggtggagctttctatgactggtagaggaaaaacagaaatggttgtcattctctatgactagtgctacgaataaattagtccagagatttctcttgttgtctactgggaggatgatacaacctagcaggaaatgtacttagttatttatttttgctatgcacaatgcagatttctttttgccgggtcggctgaaaatcgaccaaccgaattgtattaagaagagagagaaatgaaccaggtacagaacgacattgtactgtcgcagggcataagcccccccaaaaaaaagaaaaagctcctagggatcaaggaacccaggagaagactcccacacactactctctatgcttaaacactccagcttccctccaaatcagcacttcatctctaatggctctgtaaacttgcgctgaagtgcaatctttgtgttcaaagattctcgagttgcgctctttccataacatccaacaaaccaacatacatagagtgtcaaaggccggcctgtagctcggctgaaaaagttgccgcacttgtcgtcaccattccatgaagtgttccccttcatcccccggcaaggaaaaggagactccgagccagctccttaacattcttcacactctgtttgtgaattgacagtccactaacaagtgacaatgcagatttctttatgcgatgctttccagaatcttgctgtaagatatttcagaatccagtaagtctaaaggagaacaatgttgaacttgaagaatttgagttgctagttcagtatagccaatgcaatgaattggacttggctacgagtcatgactgatccatctatcagcagatccattgctgatacagaactttttgatataaccataaaaggcatgtacactgtactgttctgtgctgacaaacttctgccattcaactgagtgtgtaggatcactgctttttctcaccaatgcattgtagcaagtccttttgaagattaagatggcaaaaagtttattgctgtgtgtaattgtgtaacaagaagtaacgatcttgtacttctgcaggtggaatctgagttcttacctctttacagcacgtatggcctgggtttgactacatggagccctctagcttcgggagttctcactggaaagtatgccaaaggaaatatacctgctgatagtaggtttgccctagaaaattacaaggtaatattggtaactttgtccctgtactagatacgtgcattcctgcttttctttttctgaattctgatattaaaatgttcatgcttattctcagctgccttgtgccatcattttttctatcgacaatactacgctgtaactatgctttttaaagtatcatgctacctgagtacctgactattaattactccctccatctacttttgatagtcatatttccaaatctgaaaattttatttttgataggcatatttcaatccaacaacctatcatcttaacgactttcttggatttaatgtgtgactctccattcttccacacaagattggctacatgagcatcgagaaatgtaaatattaatgaatcgtttgtttacgaggaatgactagtagcatgtttaaatagatgataagtagaattacttatccttggtctgtgtatcaagatgaaatatgactatcaaaagtagatggagggagtacctttgtccatgcatgaagatcacaatgtcatgttaagataccaaggataaaactcaactattactactatatcaattgcattaatcattggattgtagttcatggtggattcaatgctgcatgatcagtgttccagaacatagcgtgtcattgttgtgacttaggccctgtttgattcagcttaggattattataatctggattattaggagtaagctgaaacaaacagatagcttattgtgatagcttattataatctataagccagattactataatctggtaatccactctaaaggtgcttttttagattattgggtggctaacagctaacaaacaactaataatccggagaaacaaacagctaatagcttattctatgtcggctttattataatccaacttatagtaatctggctcaataatctagattacaataatcttaagctgaaacaaacagggccttaataacttatgtagcagctgctagcatgacttctgcttgttctgaacgttgactaaacgcttgtgtacatcatggtttttcattttctgaatgggcttatgaaacttgcccctaacaaatacatcgatgctacttcagttttccttgtcagatgtgtttgtcttttttctctttcagaatctgagctgttctaaacaaggcaacttttttctctttcagaacctggccaacagatctctggttgacgacacactgagaaaggtgaatgggctaaaaccaattgcttctgagcttggtgtttcgttagcccaacttgctatcgcgtggtgcgcatcgaacccaaacgtctcatctgtgatcactggagccacaaaagaaaaccaggtacgttccacacgcccgcgtgcttcacaagatatgtttcttttgccaagtaagacgccaattaatggtttttctgaaactaagaatactaatccatcatttggtaactaaaaatgagcagattgttgaaaacatgaaggccctcgatgtcattccgctgctaaccccagaagtcgtcgacaagatcgaagcggtggtccaaagcaagccgaagcgcaccgagtcatacagatgaagcggtacagggggtgtgcagagtgtgctccagggatttcaggatttacccggtgggattcttttagacgatattattatcttccattgtcttatgtttggaagctgctttatgtgcctgggtttgtgtagttgggaaatggtgtccagtggtactctgctctatatacattttgtcatgtggaccactcacttgttgctgtcggtgatatatataccttggtcttttccgtgtgcatctatccatccattccctgcgtttcttgctggcatcttttctgattctttggtgtcttgtgcttggactgtccctgcatcctccttcctggtgaccttgttctcgtgccattgtctgcctgccagcatcaaagattcagccgagcgagtgagagtgccaaggaatcaggagtgtttttatcatggtccttgctgatttttctcgctggcaagatttcaatggcaggctggccaccatgtctcatggcatgctgtgctgaggaatcaatctgtttctgttcaccttggggaagatgatagtactaccactacattgtgtcattgtgtcagtcacatctcatctggtagtgagtgatgagtagtagttgtagcatgcgcatgtgctgttgcttgcaggaatcctctgcattcacaggtgctaaaattggaggcaaaaatgaagcaggggaggtggtctggttgctttgctgcttggccggcagaggcaacggaggctggcacgctttcgtgcggatccgggaacggatcaggaatccaggggggtcgctgttcagtgtggctggcaacacgaaaacagccaagacagcaaacaaagtgtgagctatcagcattcaagcaaagcacacacacaaacaagcctctttcactctacattttttctgtctccggatgatgctgaatagatgatgatgccacatggcccagtacagcaactgcgataaggtccttttctcttagcaacacaagacttttttttttcatcacacatattaggaattttggaggtggattaatcaatgaaactccagggctaattcatagagatttgtgaggctgtgcaagagtcagtagtaatcaggtaggcacaaggatcatcatcaaacaccataaaaactactagaaagacatacttgtacatgcaagcagagcaaggcgaccatatgctcttgcagatcgacagtgcaaacaaaaacaggcaccacaaaggcaaaaatataacagaaccgggtgagccctgtggctctttcttactagccttctgctattttaactggacaagtaattaaccatcaagcacgctccaagcttcaccagcggtatagctcttttccttgtcacacgctctcaggatctgcctcttgttgaagcaatggttctgtgaattccctggtatcgctgacctgcaacggattgtcggtaaaatgagcgcaaatcaggttagaacctaaacgggtgcgttttagctgattaaagtgctaaaatcctactagtggcaaaacaagctatttcaagttatcctctagattcagttcaacaggttatacatacaacaataatcgattccattcagacgactgactagcatcaaatgtaataggtggtagaaaagaatctaaccaagaccattcgcatctgatgtcctcatgatcctcaacctcttcacagagctgacaaacattctgcgcacaagaacaaggcaacaccgtaataataagtcacctgaatagctattcgaagtcgccttgaaaattagaactataaaaatttctagtgcccaggttctaatagctacatagtgcaacgacttactcccaaggaacatctccaacgagcatccagtcaccatccctgtcctcgtaggtgagctggtattcggcagagttgtctagtagtttcagcgagtttgtattatctgaaaatgcgaagataaccataattcaggttcatggacaagatgaatcaacctatcatgaaaaaagcttgcgacttactaggtacaatatgaagcatggctattattttaatttgcaaaactatctcattgtcctacactattattatgtattgtgcgcagcaaagcttgattccacttaacttgatgtgatttgaaaatatgtgaaactgtgagctacttaaagtgacagttcagactcgagcttacgagaagcgcaaaggccaatggacggcttcgtgaacatgagttcaagggctaatgcaagggtcttgtatgagcggtgcgcattgagatccaccttccttccaatgacctctccatccatgttcaccttcacccatccagcaacccgtcctttcttttcgccctcctccttgtccttctgcacatcagattcattggtggcggtcttcttggtgtcggtttcagatgtgttttctttagcctgattgaacaggctgttcatcctgaactgtcggatcggtggccatcccaccactccaaagctgctgccaaaccaggaaatgcagttgggattagttgaaatgtattgaaaagtctacatgtgtaggtgtagctcagcaactctggtgctgatatatatctggtcctcatttcagagaaaatcttactagcgccacaagtcaaacaaaagtgtttgtagttacatattagagtgcagatcaagcaccaaacttgtcattttttgtccttgaatttggaaggataagaagcttatgcacagcacaggtgtggagtgtagataataataggttttggaggttgttgctgatgtgagttctatgcacaactacaggagaagccatatgcaaatatcctatgatgctaaccagtgagcagaacaagtggcaaccaatcttgcagacaaatttattactgctactcttactacttcagagaatcataaaagaaactgtttttgtatcgagtaataaatatagtgctatatatgaaattatgaggcagagaagaagcaagaaccctgaaggtgttgtgttctgctctgctctgctcagctcacctgtgtggatggccggaagcaaccgtcccaggcgaggtggtggcggtggggccctcagccctcttcccccccgccgccgccgccgccgcgggggatgacgacgacacggaggagtccggtgacagcgccgccgccggctgcaggtccctggccgtcaggattcggcacggcgcatgctgctgctgctgctgtttcttggagccaaggctgagcccgagctccagctcctcgtcgtccccagctgagctctcctccacctcctccgcctccgcctccgtccccggcggctcgccggcggtgggcccagctactcctcctctcatcggcgccgctgcttgctgcttggcttgtgcgtgtgcgtgtgtggagtggagaagaggacacggacgaacacctgggcctcgagagggaggaaaggaggaggaggaaggctataattaagctgaggcagcagcattaagcggcagttgtgggtagtagtgcagcaaagggctacctgggccccacctgtcctcctggcatgtggggcccacaatgctggcctggggtttgggggttttgtagctgctagagagcacccaaccattttgtagcaagcacaattcacttgggtttttcttggtgttggggtggattgtggtaatgtataggagtgctgcattttatttgtttggtagtagtggtagtagatccgttttgcctttttttgtttttttttctaaattggcatatgcgaaagaagacgatattatgataggaattgcatgacggtgtttttctataaaaaaaatagtgatattatgtttgtgttttatattttcacgctaatcaaagaagatggagttggtagccaagaaaatatacatgggagaacttactgagtgatcaagatgtaagatgatagaaatcatagagttacgattcatctgtctagggtaatatggtccttcctaatactaacaaatcatatgtggacaataagctttggctttttacttggccgtgatgtttgatttgtgctcgctcctagtcgtgcatgcaatagtttttgcaacaaccaaattactactaatgttttgattgctccaatcttagagtgcttactcaatcaatggttacttagttctagctctactgacacggggttgtgcatcactttttatctctatctcatatatacctcttggcttttagattgcgcttcattgttcgcatgccatatccaatggagttgacaagtactaattaatttgcatcatgcaattataaatccatattcaagccgttcaggagccattaggctgtatgattgacgtgttcactttttctgatttgtgaataattcttggtacctattactttgaattttacaacaaaaatgtgtgtgtgtgtatatatatataggtaaattaactggtgctacatggaatatgggctccaagattcaaattgagtatatacccaatttgaatgagtatgaaattttttttaaatgttagatatgaacattaacttctttactaacaagttcaaacaagtttgaactgagtttgaacttttttttttgctagattttggttctaggtatataacatccaaacatataattcgttaggtatgtaataatgaattgtgaaataaagttgagtttgagttgttttgttgttaggtatttgtatgaatcaaattcatatacctaggtatatactcacaatttattttttttaaaaaaaaattgagagaatttgtgtgttttataccttggagcccgggcaccatggagtcctatatgtgtatcatatatatatatatatatatatatatatatatatatatatatatgtatgtatgcatatgtatatatatgcttttattatccgtgtgggatggtttggaaactagtaacatatcagttatgttttttcacggtaactattacttactcctcacgtctaaatcatggatccgtaaccgatcacaattgtgcatattaactctaatctataggtttttctaagtttatacacttgcttaacagctggtgtggggacagaaaaagggggagacagagcaatttgcctctttgtgggatggttgccctttgggcagtgggccccggtatttgccttttgttggtgtacaaaatgcaagagacaagggaaagagaggagatgaaaacggagaaatgggaaggaggggaggggaaagggttggtcacgtgagtcctcacatgtcctttgcatcctttgcgatgatgcagcactgctctgcattctgtttagctacctacgatactaatagtacagtgtacacttgtacatgaacacagtacccaaagggctatgctcaaggttgtcagtatcctaattcgtatcctagtatcttacgatactacgatcctatcaagccgaaacgatactaatcccatctagtatcctaattttcatagtatctcgatcctactattcattactacacgttcctacgaaatcttaggtggtatcccgattctacgatccctacgatactacaaaatattatttaaaataatatggtttgaaaataatgtaactaaatatgctcaaatttatataaaaatcagttaaatatatcaaaaccaacgtggtttctcttgataaatgtctatatttgcatgatatatatcattactatatttttttatatagaatggctatatataattaatataaatattaattaaactttaaaaaataaaatcttatagtatcccgatactacgatatgatcctacgatacgatattacttcgagcaaaatgatactacctagtatcccgatgctgacaaccttggctatgcctgttcatggtctatagtggagtaaaaaattaatgtatcgaaactgatctgggtgaaatgtagttgtaacacttgaattaagctcttgcaaaccgtaccatagttaggttaatttacacttaaaaccttcccctttgtttgttttttttataaaatggaaagttcaattttttattgacgaggagatgaaattttcaataactagagaaacgaaattatgtgataaaagaaccaataaaataacatggtgataaaatagtactactaccgcttcctagctagagcaatgcatactcctgtatgtactctctctccgtaaaaaaaaacgaacatcatatttccagatttgtaatactaggatgtgatgtgtaacatctcatacgtggttggttttattttagtaccgatggagtactctggtagtgctcctatgtagcagtagtgatgtagtggtattcgatctggttgtgtgctggctagcaatgtcatttgttctaaggggtactccccgttcaaaaaaaaaaggtcaaattctagagatgaatctggatacgtgtgtctaaagactttttttttacggagggagtaggagcaaacctcggttattgtagcgttagagcacttacaataaattagtgtaaatgggttttacatgttaccatattatattttgcgcttatgtgaaagagaataaaagtgaactacagatttgtagtcagatgtaaaacgagctccaataaactatgtgagagggaaatgtgggggtatatattaacggtgcatgtatttattgttaactattgtatgatgagtatgcaattgagttaattatagataatgtgttaatttttgaagctagtagttatctatattaggccctatttagattccaattttttttcttcaaactttcaacttttccgtcacatcaaatttctctacatacataaacttccaacttttccgtcacatcatttcaatttcttcaaacttccaattttagtgtggaactaaacacatccttattaaacttgctcttacggacttaaaataccaacttagcacaatccgtttaaattcgtaatactaaaatataatcatttttggtttttttaagacagaggaaatactccgtagaatatacggagcaggagtcgcagctagggtgtagcagtagcagttcttttacagtagtactagggggtagcagtagtagccaggtttcccaaactgccggggccggggttaccgcgccccggcggtaagcacgtttaccgcacggtaaccacggtaactgtaaaagaccgtacgaaaccgtgcaaaatttattaaaaatttaaattattttttaaatttatttgaatttaaagaggttaccgcagtttttttattaccgtacccgcgctacggtaagtggaacctggtagtagtagtagtagggaaaggtagctgcacatgacatattgccgggcgggcaggccaaaacggtttggttgttgacctcgcatcgcagtggacaactctacagtacgttggatgggggtagacaagctcgtgtgcgcgtactagtatgcgataaagagatagaggtgggggggacaagccgacaaagaaggcgcgccaactgttgaccccgtgtgccccgctccgacacccctcgcttttccccctcccatcctctctctcctgtcgcctcctctctcctcatcacactagctatgccattgccacccccacttccactgctccactaccactgctataccatcgctccaatgtactacgggtgtgtttagttccacactaagattaaaagtttaaaaaaaaatttagaagtttatatgtgatggaaaagtttgaaggttgaagaaaaagttgagaactaaaccaggcctaccttcagttttaactttttctattatctaaaaaatagtttactccttccgtcctagaatatagcaacctaggatcggatgtgatgcatcatagtactacgaatctagacagggggctgttcagatttttagtactagagtacatcccatccggttctaggttgttacattctagaatggagggagtattttttaaataattattatattgaagttcgtaaaaatatattgagattagatagaataatcttctatcacactatccttcgtgatcgtcacagatactctcttctggttgataatacttatctttttgtcaagagtacggtctcaaaaaaacaattttgacaattattttctattataatattataatatgtataaaaatgttaacagatatatgattttattaaagtatttttttaagactaatctatatatgtagtcaccatatttaaaagacattttaaaaatgattcataatcaaatattttaaagtttgacctcacccttatctaaaaaaaggacaagtattatcagcccgaagaaaatataaatataatgatttctggttatacatctagacacacattcttatagtagtattaaggaacgaatatacagcatcatatatataccatcatagtgcaaataagatgtgagcagtattttggggccaaacagaattccgaactctttgggctaaggaatgggctaaacatctccgatctagcccacttcattatttcactagaacaatgttttgaccaataagaaatatgatttttgagacaaaattaatgtcattagatttacattcaaaagtaatgagtgctattagatttatattcacaaatgctttcctgtaattatacttctgtgtcacataaatataatatattaataaagcagttggtgattaaagcattgtcctaacaagcaaaataaattgttttatactgtattatttttttacagagaaagtagtactaagtattttggacaacgatcaggccaggccagatttgatttgggccaaattatccatgatcaggcctacccttatcaggcccttcaacatttgcaaccactgtgctcctctcagtgtttcgtgtggaacacttgacaaaacaaacattgagcatgcatgccccttattcgcataaattattattagtgcaaaatgttacatgaaaagatcttcaatatactgttacacctttcaccggagaagattacgtgtttcctgcatttagttttcggtatagatcttactgccagagtatgctccattggactgaccaccatgatgattttgcaccactgctttgctttgcatttctcttagaaaactgccgctaatggtggcgcacgtttgagaattggtcgaccgagtcaccccgctcaaacacagctgctgcccccatgccagatcctgcaaccaattcatgcatagttacatactagtacacaagatgtcatggaagtttaacaacgagggctacttgcatgcattctcctgcacacagagaaatccagagaaaaagaactcaccaatgcacatggtgacaacaccgaatctgcagtccctgccccggcgcttcatttcattcagaagagttgcgacgcaccgggcacctgaccaacagaggaacaatcaccccatttagaagacatgcttggatgatctgtagcaggtactaacagacagcaatgctacttccattgacacctgcacattctaaagccagaatgacgatctcccatacaagtatttgattacctgttgcaccaagaggatgtcctagggcgattgcgcctccattcacgtttacttttgacctgtccagtcccagcttgttgcagcaatacacgaactgcgaagcgaaggcctatacaagaatacagatggcatgggtatcaaccattgtagctaggtacgagtaaacgagtgagctaatattgtaaaaagtaacaaacctcattcaattcaaacagatcaatgtcttcaatctggagtccagcagacttcactgcagctggtattgctactgcaggaccaacacccataacagcaggatctactccaacagcagcaaagctcctaaatgatgattggaggcaacatatggatggatcagttaaaagaaaatgtgataatatattaggtcccaacagcaatagcaataacaatgatgatcacaaactccgttcacacctaacaataagatacactccctccattccataatataaggcacaaccacttttcttagatgttccataatataaggtatacatgcaaacatgcaattaactatgacatcttctccattaaattattacttttttaaatcctccactctcatgctatctaatcctattggatgcatgcattatatttattaggatgatccaaactacaagatgataataattatttcttggtctttgggttaagggtggttgtgccttatattttggaatagagggagtatctcatacagcattcaggaacacatgttaagactgaaccaaatgctgtatatacaaggaaatgcaaaatgcagcacctgaaaacaccaagaataggaagtcccttcttcatcgctacgtccctcctcatgagaagaacagctccagcaccatcgctcacttgactagagttgcctacatagattcgttaaattaaaaaaaaaaaacacatacacaatgtaacaagcaatggacaaacaaagcctggttgcaatagtagtgtcagcagaaaaaaaagctaagagtgctgcaatacctgcagttgtggtaccatccttccggaaaactggtttaagctttgccaatccagatgctgtggtccctggcctaattccatcatcaactgatatcacaactttcttttcctctccagtcttggggtcaacaatctgcacaggaaagaatatcagtgaaccttgcacaggtcctgattagcaaaagaaaaatccagtgacaacaaccattcatgagtcaacaataaccatgaacaataaactaggttacatcacatgaactaaatcccagagcctcttacctttgtaggcaccggaacaatctcatctttgaatttcccagcagctgtggctgcagcagccctcctatgagactcagcctgttaaaaacaaaaatttcgacagtgttttgagtaaaaggaagcagtgggaagaaaaaacacaaacagaatgtatgcaagtgactcacagcagcctgatcctgctcttgtcttgttacaccatatcggtgcgcaacattttcggacgttatccccatgggcaaaagacaatcctgtgctttctggacttcatttacctacaaagtacgtggtgttacaaggcatcaccagagaacaacagaaatacagaggatgctctggtgctcatagaattcatactttagggtttacttgtccttcccaacccatagcatttactgacatggattccaggcctgcaccaatccctgtttttgatggaaaaagacaaattagcacctttaaatgaagcaaccagtagcagagttagcataaccatattgtctagaacgagtaactagttaattacctatgtcgtagaacccagctttaatggccgcggcaacatcagccactgcctgtaatccagaggaacattgccggttgacagttctaacaggaacgttttctgcatcgacagaaaagtaaaatcaagcaaatgaaaccagtgtccataataaagaagccctgtcttcatatggtgatataaccgcaaacacagtattaccgggaactccagcatagaaagccgcagccctgcactcgattgcacgctgcgagcctggacctagcaccgtgccaactacaatgtcaccaatttcaccagggttgatcttagtgttgtccagaacagcctagaaaatacatagaaaaaaaaggagcaaacgattgattgagaacgcatagtctctaaattcgaagtaaccactgaatcacagcatacatgaagggcaatattagcaggcgcaaacctttagaacaacagtaagaaggtcctctgggtatgtatccttgaaacctcctcgcttggccttgcatatgggtgtcctgtaggcactgcaggtggataaacatggaataaagtggttagaagagtatctatcacatccgttgatcgattcagatacgtggtggcatattcacatggctaagcacacaaaacatgctacagccaaaaaagaaacactaaaaaaaaaacaaagcttagaacttgtagtttgtaatacactttgggtgataggtggtgaagagatagaattgacttgtagagtttgcgatcttttatcttgttgcaaaatagcagtaacaaactcttcttttttttttgcgggggtaacaaactcttgatttagtatgatttcagctactagtacaaggtttatcctaaaactaaagaggttaacttcaacaaaacgcatttgacttggatgggcgtacatcgcgataccaagcacctacagtaatcctgattcgtaagaaaagtcaatcagcgcagttgcttgaatttactactattcctcaaacatggcagcaactagtggtagtcaaacatccgccattaacaggtgaccttaattggtgttccgtgtaagtaataacaggtagtagtaggaaaaaaaaagggattagggatgtaaaagcttacgcgacgacgacgacgtcgtccccgtaggcggaagtcctctggtaggcggcgctgtccccggcggcgcacgccgacgcctgaaccaatcaaccaacaatcgaattgaattgagtccagtgagagagagagagagagatggagattacaaagagaattgcgagagagaggaagaggaattgactcacggagaggagcgattggtcggaggaggaggaggggaggaggtgggcgaggaggacgcgctggcgatcgatcgccttctccatggctgagatccgagcgcgcgagctggtcgtcttcttccttccgatggggtggggaagcccgccgcggtgtctggagaagattttctcttgttcgtatcgctctctctcgcgaaagcgccgattacttgacgcaaccaacgttgcttctgctttgcttatgtaggcgccactaccggataagctgcccactttttttttatttcctttcgtactgcttccagattttcttttctttctttctttttttctttcacacaggtagtactagtagtccagtagcagcacgtcgcttgcacgtaacggattactattttttttttgctctccgtattttgcctggtattcctacattcttgtgtgtaacagtattgttgtctgaccgtattgtacagtattctcgtatctctgcctggtaagactacgacgtgggtaagtgagcagttacaataacaagctataaacaggctataaccacgtaccgagaagaaaaaaaaaagagaaaaaagaaaacgggctacagatttatagccagctgcaacacgaactctaaaacgttatatctaaaacgttatatgtatatgagaggtaggacctgttattaatggtgcagtatatttttatagataactattgtatgaataaactattatattagttatagatgatttagagccaacggttggctattctattgaacttgctctaattgtgatgatacgagtgcacatgctaatcgagaatccgcgccgaatggtgatggtctgatggagctaaacgtggagttcgtctgcttccatgcttgtgctgacgtcaggcctgacggcagctggccggttggtgttagttgcagttggataagaaaggccaggccggtagataaagacaacagcagccgtaacagccaaggtctgcttcccacgatgacaaagcccatcttgtttcatgggcttgggcctcacctcatcatcacaacggcccagccaggatcacgtccaagcaaatgcaaaaaccagctcaacttgtccaaaacgacttgcatttttgcaaagacagtaaactctgctgaaatttacaaataagcttcttcttcttcttcttcttcttcttcctcctcctgttaacgaaccaacagtaggaaggaccaagttgtgagttttcaactgtcgacaaatttcaatcaaacgtcaaccaaccaatcccttctgaacaatttttacaccgatttgtacacgagggccattcttgccttctccatcaatcatcatcaggatcaggtagggcagatttcaggaacagggggatcgccatggagctttgcctgctgctccgaccagtaggcctgtgcggcgagcacacggtccaggagttcctgtggaactggagctccccttctttgctgcggcgctatgctcgccgtgtgcaccagggtcttccacttgtcctggttcatcaaatattgtttcacaggttttcagatagtgcatcctgatcctgatagaaagaggcagatctgaagaaaaaacgagatagatttaggcttaccttcagatcaacataggtcctatgatgaacattttcaaatgcgcggaatttgacgtccctccacctagacaaccagatcaagaggtccacatgagacacgcgaactgcggtgatgatctcgtgcctataggaataaaactactggggcattgaagccacaaaccttcctgttccaaggtgctcgacggcttccaccagcaactccacttcagcaacagtgaaaggcctccttatccgtctttgcccaaaatctggtcgctttgacctagaaagcggcacattggccagcgccagtgagtttggatctgcaaaagggacgatggcttgggagcttgctgatgtttcttgtgtgctccattccacgggataatcaacagaaccaggatcactcaagctgcagcctggaaaatcttgcataagctgctggttctcagcaggttcttcgcatttcaccctggaaatggaatattaaaacccttagatgaccacatacagcaaaaatctatggtcgtgtagtttccgaaacttctgcaaaacaacaacgttgacataaactatcagatgcatcctgacaatgttttctaatcatcacatgtaaatccaagcctcctgtctaataatgcaaggagaagatgctttcttgtaacctacgtagcagacttgtccacaacagatgcaccaacaaaatccatttcttctggcactattacaccagggtgagaatcttgcccagcttcacattccagagtaaagcctatgtcatttagttttttaccacggcaaatcccagcctgacgaagcgtcttgttgtcattttgaatattttttccttgaagaagtataccgacacggagaccgcgttcaattatagtagtaacagcatctgacacagttttctgaagacaaatagaaagaaataatgtggttcataagaaagccaatgtctatgcacagagataaatatttaagtgtaaagcactgacaggcagaaatattcaacatatataagattaaaataagtgtaacgaaaaggcaccaccttttcactatgtataagtacgttgcatcactaaaactagaaaactagatcagtcaaatacacattagcatggatcacagagcagcaaatacttgatatatttgagtttccaaaacagctgacacaggataacactaacgatactaagattattgacagcaaatggaaagagtatcaggatgcacacatgaatacatggttgccaactaataaatatatgttacagccaataacttttactgagaagatacacatatggtgttttaccttcaatgaaccaactgttgcattttcagggatctcaattagtagttcagggatgttgaaagatttgatggttaacttgactgaaaagagagaaaaaagtaagtcattgtgtttataaattaagcaatgattcttttaagtcaaccccaaaactaaaataaacatccaggacgccatcatagccctcagatgcacatgcggatttggatcacccatacaaaatggagttccactggcagaaatggcatgcccgtgtatttttaggaagtgtatcaaagcaggggttcagaatatccaatgctgtgtgtaagaaggattaagtcgtaccaactatgtgcaatgttacatcctggagcaatctaaataatttgtgacctttagatacaataagggaaacggacaacacaatacatactttcagttaggatctgagtttttaataaagcttccattatcaaaaaatactttcagttaggataccttcatcagatgatttttcggagtaaagttgagcaagtcttttcctcttcaaagttgtttgttgcactcttcggcgcgtagtgggcatcttcttttcacacaaactcagcttgttacctagttaaatgataaaaaacttggtcaatataaagtccaaatcctgctaactagctgaaaaataaaattaagtaggaaaagaaagtatcctctcttttcacaagctatggagctgtagaagagatgatattagcttgaaatacctttacaagacatctctccacatatcctgttgcgagctgccttccttaacctggaggcaaacaatctccttatcctgcggtcacctatataatgtggaatataaccacggttatttcctgaggtgcttggatgtacacacccagaagaattttcgtcatcatctctgtctgcagcatgctgcactttagccaaacacgagggatgggagttatgccccctgtcagggccgcagatgtgcactcctgagttactaccagagctagcctcagcaagaggtttggtgtccaaatccatggtctcgaccaaagcacatagagctgcagcatcactatcttcttgacttctgattgctgttggtctcgcccgatgcacttgtttaacctctgctgatcttgtggaccaaggttggcatactccaacagatccatactccggaattgtgccaagaccaaaacccaatcgacatgattttttactgctaacaaatgagtccttagccaacacatcaggctttgctgttagtgactctagtactgaatcagctagattttgagtcgacgagttttcagccaagcacatattagcttgtctgagaaagccacagatgcctgcacagcctactgtacaacctttgcagtcatcttttttcacagccacgcttctcaacggaaacgcttcatcaaactgttctgctttaactggtttcatgcttgtaacataaccttctggtgtttcatttatgttaggtccactagataaattgtcttgatcagccaacaatttttctgcagctgtcgcaagcaaatcaagtgcatacatctgctttttccttattcttgtggagcgtttaacctgaattacaatcgatcattaaaacttaccaaattatgtgggtagcacacttaacataagaacataacaaaaatgtaccggcgccaatgttgcgacacgtggcttaatgggagcacgatggccatgggatccatagtccaacctcttctgcaacaccatgtcttgtccttgactttaggaaatgtgttcagtgacagcaaggggaagtaaataaaacatgcgccatatttttctgcgtcgaataagcaagatttagcgaacattgatccaataccgaaagacatcctaatacagctcacaactaaaagaaaatgctgaattctatgcttctgaaatggaaagaattcatcattggtgagccccatcaaaaccgataatatctggcaagatgacattcgctgaaaccacagtctacttgtagtagtatatctttgctcttaaaaaggacaaattggggttgatggtgtgctctacaccccaccccgacatctgagatgatgttgtctggctagatctgtgtatacacaaaccgaatcaaacatgtttcggctcggcaattattcggttcacacctagagcataaaccccatcccgaaatgcaatcgagcatctcgcgtaactgacgagagggaagaatccgcattacccgtcgacgccgacgaagaggagggcctcgccgccagcgttgagatcgccgcagctcggctagggttttgcagctgcgtgttccgacagccgaccaaccggagcgggaggcgcagatcggggagcaccggagcacggcggaggggagcagatggcgcgcgccgccgcagcgctcgtcgcctaggattggttgacgacgacgacgacgatgcccatctgctgcttctgctgtgcatacaagaaacgaattttgcatataagtttccatttttttctccttttcttgaaaacatacaggagataatcagagcaggaaataaaatgaaataatcaggcaggttgtccgatcaagaagggtaaccttgtgggggatgggggaaggttccagaaggttcgagaagagcgggcggggaggaggaatcgctgcaagtggaaggcgcagggaggaggaggaggaggagagggagaggggaaaggattggaggagaaaaaccccgtggaagagaagaagcgaggattttccttgtgtttcttgctgttttttcttttcttttttttcttttttttttgatgatgggaagaaatggttttggggcagagtggttggttggaggtgggcttgcgcatgatgcatcacggcccattggatgatggatcggttgggcttaatttttgtttttggagcaaagcaatatgggccggcctggttatggcctggttatattcgaagatgggctgctctataactggaggcccaacctgtattatgggatgagatcccaaatgcaaaaatcacacaagtttgtcatgattttgtcgtaagatctgtccttttacgagtggaaatgaatagattcacgggccatggacttttctaacaatagattaacgccagcgcacacttcctgggctcctaaacaagtgcatttttttgcaaaaagaaaaagaaaaactttatatatatgaacttacttgtataatccattttccagctttacaatagttaattcattcgtttatacccttaatagttatcacaaatcattcggctattcaacaattaattaattaagcacaaacattcagggcggtgacaagatggggtctaccctgagaattatcctaagaacttggaagttcagggacccatgcacaagcaactttgagtttacgctacagttaattaatataaatcggaaaatatctctcaagaaattagaagtcaactaacacaaatcatattccccttatgatgcagttcttttctcccgttccattgtaggagtagtagctttcacttgatgcatctagcactgaatctacagcaaacggccaagctcgactgcaagttcagcaagcaacttggcagatgcatacacagcatcgaagcatccaagatcgatcgcccacctaacacggcgagctatctgttttccagcggcgaaagaaaccacgggcacggcgagtcggctcaccggccggccggtcggtactcagtaccaaaccaaaggtcaggatgatccggcttatccactgccacgtgacctgggcccaagagaatcccgccagccaatcgccgcgcgccacgtcgcccgctctgtccctgtagaacacacaatcatgtccgaattccacgtcagtccacatccaaacttggagaaatctgagagaattactcacactaacctgacttcttcactgatgaatgcaacccatcgtacttggtagtagtagtacatatccatataaccatatcctgtttcaggccttgtcagtgacaccttggttaaaaccacccatgcaccattctgctgctctcaaatcactatcctgaatacactaatctcaatctaattactaagtttcagccaaacctcagaatatgcaaaatagtcatcttcagcttgcaatttgcagatccataagttttgccatatgcatggactatgataaatgccacctctgaatctctgatagcagaaacaaatgatgatgagatactaacaagcactaatggagtattaaaaaagatctgagcatggatgaggtcaaagtccaccaataggatctgagcagtagcagtcattggtgggccagcacctcccatgcattcctatccacctcagctccctgacaatagacgcaagtatccagttcactataaatgaaggcctccggctacgatctgcaggagaaaaaacagtcagaagctaaggaagaaaaagtatagacacagtgatacaatggcctgcatcaacacattccagagctgctccgtcctcaagggagcaaagatcaatggtaccaagatcggaggagggaggggatcaccaaccttccggtgccgggcatcgacgttcatggacgggagcctccggctagagatcgacgagaaccctgaagccatcatctccggtgagtggccggagaacttctccctgctcagctacgacgatctccgcgcctacctccagtcacaggaggccgctgctcaagccgacaaccaggtgcactgatcacaccatatatacatagattcttcttcttcagatcaccaactgtcgatcttcttcttaagatcttgctaaactctgaactggttgcatggttggtgaattgaccagcgtgtggcgctcctgagtgaagccatgtcggcgcctgtgctggtagccactgccgagcagacgctggaggaggttgagtgccactttgagacggtctcaggtctcccagttatagatgccagcctcagatgtgttggagtgatcgtcaagagtgaccgggccagggcttctcatggggtcagctctctttctcctctcacacacacatacatgatacatatccctctcactcacgcacatactcaacaacaaaaataagtgctgatctattgcttcttgtaacagtcaaagacgaagattgcagaagtgatgacctctccagccatcactctaccatctgacaaaacagtaatgggtaatccatcgttgttttcgcccttattttttttggttattttccacttagctaccagttaagctaacaaggcatatgcaatgtctacagatgcggcagctctgatgctaaagaagaagatccacagattaccaattgtaaatcaggacagacaagtgataggtgagttttgagcagtggccaatacagaaaaaaaaagggctttcattttttccccttgattttataccatccttaacattgataattcagagtatgttgcatgctaaatggagttccaaacactattaacaggtatagttacccgtgctgacgttcttcgcgagttggaagccctgctggaggtttagacgtgcagtggtccatatgcttcggccttgttgtatatatgtaaatatatgccatggtgtttttgaatagcaggcatctctaatctgtaagagtgttgtagcgcgaatcaccaagataagcctgagaaaataaccggagagcttttctttgtacaataagcacactatgagacctccagtgttgtatgcctgtgaaaaaatttacgttagtgaatggtctccacaacaacatagatgaatgaatatgcctagttatctttcagaacaaaaccaccaaggtgcttcaaagatggatataaaagtgaccttattgaagtttcattgtcagaggatgcatagaacaataggacttaacagaagaaaataggaatgccgatgcaagagatatgcctattcggctattcctttgccacttctgagcactaacaggaaagatggaaatgtgttatacccagaaccacaacaggtcaatcaagatagatggaaaaaaaaaaatcaacaaacaccaatatcgaatgtgacaaatctttagataaaaaatgaacctaatattataagctgaaggaaccgtagctatttcaatctcaggaagacccaaggagaaagaacatactcaatctgtatgtcgtggcaatgctgaggctgtcataactcagattcgagttgctgagacttgcccttgttgatcttctcctgaagcaatactagcagcagaaacgggcattgatgtagtagtactcatgttttctggtgaatcagaaatgactttcatctctaggtttgggattacaggtggctttgtcctccgagtaacagtcattttcaacccctcagttgtgtgaatcgttgctccagttgtcatctcaacctatcatattgatacttcacagtgattatctgtatgttgataactatgaagaaccaggaagcagacagaaattataccggaggagctcctggagccatttgaaaatcaaagcgcctgacaagcattgcagttgccaccacagtctgcatacaagttccggcatatccatgttattagagttggaatcttgcatgctcaatagttattgtactacattatttatcatggcatgagatataatgtccttatggtagacaacagaaggctcaaggcaacaaggttcagtaagactggaccatacataagtttgctatgtttccttaaaatgacattttgaaattaaaagaagaaatccttcaaaaactaaaacaaattacctcgaaagtggcaaacatgtcacctacacatttccttggtccgccaccaaatggcaagtaactgagaattcaacagaacacgtgagtcccatttagctatgtagattcatcaaatatattaaattagccagtgaggcagtgacagctaacagatgctagccgcaatacacagaatgaaagctaccacagcctaaaattggagcttaaaaagtttgacatgccaactgaaaatcaataatttggatgttgtcttgaaagaaagatgtgttccgcagtgagttcaatctaagctgacaaaataatgggacatgtcatgtgccaagtaaatgcagattaccatttttaagtttcagtgtgatgcctaggagacttgctgtacattatagttgatgatacgttggttgtttttcaattaacatgatttgcaggtcacaggttttatgccgtgcatcaactccctgcaagactgcaacacggaagaagtttgtagtccagtcggaagtcttcattaactcaggatggcacgaattgttacgtcttctaatcaagtaaggattttgttcaaagcacctctgatgtttgttgatccatacaaagggttctgctgttgacatacttgctacaggtaaggaactcatacgacatactatcagtttatacaaaattactattccaagtactgtttctgcgtaaccagttaacagttctggcgatgtggtaaagttgaaaagtactttcaagcactatcagtttgaaagtacaatagcattttggcacatgttgcttatagccatatgaatatcattttaacatgattgtcataaactgtggtttagctcccaaaaccataaatttaggaatcaagtcatcacagttatctcatctttactgcttcaaaagaaaaaggtcccatttttctttatgttgttgtgactgccttatgcactttctaagattgtggctatgcacatgccagcattagcactaaattaatacgaatcacatgaagaaaatttgatgatttgcatcaaagaagaaaacgaaaatcagctagagtttttgtttttgttatctctagaataattacaacaggtgcatcgcatgaccaaataacttagtgttagtagatgtaaaaacgcaaacttctcgtcaaacaagaacacaactataccgagcataatcaaatgtctactgatttttgtagtagaaagcagaaactaataaaatgggggaattagagtgataaggtgcatccaaataaagagctaatgcatttcatagcattaatagagatggaacctgaaattttggtttgtttcatttggatttggtccatccaaaggccatctttctggattaaaaacatctgcaccatcccaatgctttgggcaatgatgtaggttccacacggatatgaaaatgtcttctcccctgggaaacaaagggaaaaaatatcttatcagaattataggtgaagttcaaatttgtactgaaatttttaaaaaggaacaattcagacaattaaatactctagagctacgaccagaaatggtatacaagcagaagacaaaaatatatcacacaagattgggaagatattctctaaaaaaagattggttagataacttatacttgcacatatcttaggccctctttgtttaggcttataagccagcttatgagctgaaaagtctaagcctaaacaaacaaacagcttttcgcatgttttttttaaaagccataaaccactattacactattaaggctcagcgaactgttacactattaagacaaaagctaggttggaaaaggttttttggcttatgtgagatagaggtatgactccaccattaaacttaggactttaaatccattggcttataaatcatataagccaaaaaaactgacttaaaatactaaaccaataaacttaagcctaaataaagaggcccttagactcagtttcaccagaactttactggtgtgatactaggcatgatctttctgttttcctattccaattgtaacaacagtcaacaggactacaggagagatttcctacacttgagaaataagttctgctagagttttctttaccggccaattgggtaccctcccagcatatcctcctcaatagagcgacgaattaaaactggtggctgtggatagagtctcaatgactgcaaaagtggtgattgaatgacatattcattcagtgatcatactcattgtttaatgaggtagcactgtttatcacttacttcgttaattactctagtagtatacttcaatttcttcacatcctcaattgttggtaaacggtcacctagaacagtatcagcctgtccataagtgagtgaaacaagtcatttgcaacttgtaagatgtagaagcacgtgcctctaaaaataacaatcctaaatgtaaaagcgaatttacctcatcttggagtttggccattacatttggatactgcaagttaccaatgccaagaaaggtaaaacatgagtggtttgacgtatacaatattcatcattacatattgctacattaatacatcaatgatttgagttgctgaacatattttcttttgggaacagctacggaacatattgataccttagatagaagataaaatgtccatgtcaagactgctgcagaggtctcatggccagcaatgagcattgtcatcagatcatcacggagttgcttgctggagacctaatgaagacaaattgaagcaatgtgaggaccagaatgtttggagatctataatattttaaactgcaggtacaccatacatcatctccagatgccaaaagaaagtggaggatactggggtcttgctcattcatgtattcttcatgaaactgcagatcttcttcctcgaccaatctctgcaagagtaacagcagccaatctaaaagccttgatttttttaaaaaataaataataaggtcagaacataagaaaagaagttcaccttgcagatgtcaattagttcatcaagagtcttatttatcagcgcaagagcttcattgaccttcttctgccgcggggaaatatctttccatatgggtatttcccaagttggtataggagaagtgctccgcatttctgcttctcgcagtgtcacatacactgcctgatcatcaatccaaaaaaaggtaaaattttaagaaaacaaacatgaacaaatagaatgtataatgaattccaaaattacagtacaagactgaatactaacctcaactattccattatcgtaagacaatgagtcgaaatcataattgaagactgccttcccaatgacatccagtgttagtcgagagaacaaagattccatctccacatcctccccatccgttgctgccttgtccaacttctggcagagccgatctgaagcatatccgaagagacttatcattgcggtaacgtactgcaaagcgaaattcagatcagttcaatcacaacccgaagatcaaatcatgctaaacctggtacagaaatgatgtagaaccttctggtgcattgctggtacaatggcgcgcctcctaacacgccaaatctccccatcagcagggatcaaacccgtacccatcacaaactctaaaatttctgccagaataccctgcacccaccacaatcaaaatgcaggccgttaatttctagagcacagcctagaacacgtctacatccaaaattgacaacacaaaaccttggaataagccttggagttgtccctcaggatgtgcttagctatagctggatcagagacaatgaggaaagactggggaaaacaagaaaagaacaaagtttaggccatcaataataacacaaaattgggagttgccgagttggagagcaaattggtctgattgtgcatcaccttagggccgaaattgaggcgaaagatgccgccataggtaaggaagagatcatagagcgggatgaagaaagcctgccctgtcaccgcactcatagaccccaccgcctgcggtatctccggtccgccgccaccggcgaccttggtgagcagcgcggcggcgagctcccccggtgggccgagcttggcaagccccaccgcgaggggagcaatccacctgaaaaagagagagggagctctccatcagatcatcaaaggaggaaggaaaggcggccgcaacgtgagagagagagagagagagaatgagcactgacgcggggccttgggcggtgaactcgccggacgcaatgcgcgccgccagctcagcctggcgccgccgccgccgctcctcaagaaccgggtcggagccggagccgtcgccaccaccgcctttcccgttgccgcccgaggcggcgcagcggaggagcaggcggcgacgagctgaagcagcagcagcagcagcagaaggaggaaggcgcaggtgtgcctgaccggagccgagtaagcggcacggaggtggagcagcggcggccgcagaggaggtagccgccatggcaaaggcactcactgacgtcgctgagctcatcgcgagaactcctcagtggtggagtggagtgatgaagtgagtggagtggcgcgaggaaatcaatggtggaggtggaggatgaggtggtggtggacgtggggcctgctcctccgtttgttgagctgcctttcccgcgcgcgcgcgactcccggccggccaaccagacagacaagacaaccaagccttcctccagagatgctactggagtgtgtaacggaatctttgcagcatcctcctcttcttctccgttgctacaattgaattggcagctaggatcagtctcaactgataaaacatactccctccgtctctagatatttaacactggtgatttttttaaacatatttgactgtttatcttattcaaatttttttataaatattattcaaaaacttgagtagtaatagtatatttaagaacgaatcaaatgataggaaaagaattaacttttgaataagacgaacggtcaaacatgtttaaaaaaaaatcaacggcatcaaatatttagggatagagggagtactacatggaatagaagttatatcttatacttcatccatcctaaaatatactctatccgttttaggttataaaacgttttaactttggtcaaaatcatattgttttaagtttaactaagtttatagataaatataataatatttatagtactaaattaaatttatcaaatcaataattgaatatatttatttttttctacaaacttagttaaacttgaagcagtttgactttgaccaaagtcaaaacgtcttataacctgaaacgaagggagtagaagattttagataaatgtggcatatccttgaactataaatctatacaagttaagaaaaatgaatctagacaaggtaggatatgtaatatttaccaaaaaccacttatattttgggactgactgagcagtaactaggagcaagattttctttgaaaattgcactaccaaaagactgcagtgaagaatgggaaatcagaatatagagataactgcagactaatcatggtaaatttgatataccgacagaaagtgcaggttttcgtgtggcggcagttggggcttcaagataccgtgaattggatggtattggcatttttataccttcaagtgcaaacagcatttgtcctggagttggatgttgttgccagagtataaaattggaacacgctgtagcataacagtgatggcaacgtgtaaaacaatcataagaggttcgcattttaatttttttcattttgagatgatcaaaggaagatcatgtacctggtaggtataacacaggaaacagtctccatatcctatcagctgcagctccaattgaacattcagatgagatgaatccaagtgcagcctcttctagtacaaactgtacaagagcatgggggctctctgaagagatgattccaatgcaactctttgcaagttttcgaaggaagacattgacacgtccatttccatcatccaagtcatcgaatgcagccagaagaaaagtagttttcacaaggctccaactttgcattcttcctactaataaatggagcggaaatagagaggcaattttatgttatcttcaaggtggaatcaatcatgtcgtggagaaaagaaagccatctgtatgtgtttcaccttttttttttaaaaaaaaaaatctaattggtaactgaaggaacacggcgcatgtcgataagcatcctgcagcttggagccttgggcaaatcagctggccttcttcagataatgcttccctcctaggcattggcccattccgttaatcacctgaagaggacatcacctgaaggggacaatagtagttttaggaacaggttaagacttaagacgttcaaaaacttggaaagccaaatgcagtgagtccagatgagccgagctccgaaatatgtaccttcgaatttaaaacagttttcacattgaaattgatattttttttccacattcgcctcatctgattgtggacatgggtagaattggatcccatatccaagtacagaaagtgtgcaacatctgttggtagttacactaaagtgccccccagactgtttttaaagaataataacctctacagagaattggaacagtgaacatcagggaatgtcagtaaaatttaacagttgctgttgcaacagaaacaacatgttcagaagctcaatggctaaaaggatctagcactgcaacattgattcgacacgagtggaactagtgcgcgctagtggtggcgcagaagcttgaagcaaagaaaattcagcatatctcaacatctggtacgcacacgcacatcagctaatggaagaaaagccaaattaatgagcagtcatactgcacaaatcaaaccactcgcacacatttgttaagcaattattaacaattagtattaatttgcccagaatgtgttgttactgatccgaagtgcaaatgcacacagatttttgccgtgatccaaacaatagctaaatcggagcaccaaatcgaccacacccaccagattttgtagcagacacagcaaaagcagtaatgtaggagtaccttggaatgaaggagatcgatccatcgttgaagccctaggatgctattcccttcctcctccaccgcctcctcgctcgaaccgcatcgttgaagtaaatctacaagttcatggggtccgtgggcacctggctcgacggcggttacgtggagagacgccggggcgtcgcgccggaccgtgcagcctgcgggtgggaggagatagggggtttgggattcggagaagacgcaggaggagaaggagatcagttgcagttgcggatgcagcgagctggagcgattggaggaaggattccttcgagcttggtttcgtgggagggcgccatgggtgttcgacgaaatgctcgagcgaatcagaggaggctattttttttttcaaaaaaaatgaattaagaactcattaacgtataattaattaagttaatattgtttgtaaaatgattaatatgaatttaaaaaacaaattttctttatatatatatatattaaaaaaataatgtttaatagtttaaaaaacgtgcgtgagttgagttgggaaagtaaaagaaaacacagcggtcgaacggacttggcagagaacgaatacaatccatatcgctgaacttgtcaaaaaaaataataccgtatgtatatctccagaagaacaatggcaatgtagttcattagtacagcatcggcgtgtaccattcataagaaaaagagcagtattagttcatatccaaatctcatgctatagcttgacatcctagagaagtcttgctgccatagccccacatcttcaagaacaattatttgtgcaaacgttaatgtcgtctttaaaaattacatctacctgctatacaggatgatatcagctaggaatcacaatcctccagcagcagataaatggccatggattgcattgtcatatatgcatatatttacaaaatagcatgaacatggagcacagtcagctttgtcagccactgtaacaccgaaatcttgtgtgaatgaaatgggataataggcatataggattacttaaacgtcgtgggaacgctggaagattaggagcgctacatcagctattttttttataaaaacccttgcgctttcggttaattatgtgccggtccccgctgttgtccaccatccaatttcgccatagggtcgatctggccgtccacgtgtcccgttgtgccggcccttccacgcccgtgcgatcgtcggattatggatggacggcctggatttcgcgaaacggtacaaaccatagccgcccgtcctctcctctccccacgcgcgtcggttcgcccgcctcctccgctcgcgtgcgccgttgccgtcgcagctccctctcctctaccgtgctgccgccgccgctccctcccaatgagccgccggatctcccagtgaggaggctggggccgccggatccggtgaccccggtctcctcgccggcggatccggcgcccagacgcccaccttctccgtcgctgccacagctcccttctcctctaccgtgctgctccagccgccgccgtgtcactctgcggccgccacccttgctcccgatgccacacgacaaaagtggtggctccttcgccttcgcctcctccgctctgttcctctcctctctccaactctcctcaccctcttctcctcactttttctacacctttgttgacgagaaaatcgaacacatcggcctgggagatctacttagctcctgtgcaggtccaaagattaatgagatgcgggcgtgccagtcagtttgatcctgcaactgacaagatttgcaaataatagatcaaacagccgatcagctgacaagccgatggagtagttccagccgatagccgataatagatgatgccgataccagccgatggcgatagggtttaagcaatcggctatatgtccaatgtagataatgatataaaggcaatcggctgatgataatataatatagcaatataatctagtataaaccaatcggctaacaatatgaaatagtagaacaaatattgatctgtaggttaaagcacacatcggctgcaggtccgatgtcataagatccacaagattagattaaacagtgaaacctttgttgccatcggctaaatccaacttatatgtatatgcaatccctacaagccaatgcaacgtccagataacttatcggctagcaccccgataaaacattagcatgaacctatcagcttaacaagacttatattatcaacaacaatctagtagatcgaacctaaccgatgcagcatgagattgtatatgataatctaatactcgatgagccgatagatctgtctaatatgatggatataacaaatctatttagaaaaacattatgattgtagagatatatcggctaagacaggagatcaaacctaaccgagacagtcccaactaaaccgatgcgtctctaaacacaatgcaattagagatagaattgagatatcaggtaggcaaatatatcaaccaaaccagagcgatccaagagatcgaatcgatgcagccttgaacaacaccaacatagccgacagattcacagggcccgacagaacgtaggacttaccccttcgctggagatcgaaagccaatgcagccctgcgtcaggtgcccaagttccgccggaagacaagtaaaaacctcagggaagagggtggcgatgtgccgagagtattattgatcgatagattgatagattacaatgaccccgggtgtacatatttatacccatagggagatactagtccttgtcggacaagaaagaaactaaaaaggaaaagataaagtccttatcgaacactaaacacactttcctaaagataaaaggaaactaacaaactatgcctaattaataaataactgtcatgtcgcatccttcttgaactcgaactcttctagataagcttcctttgattgatccgactccaccaagaacacgacatcgtggcgacttgactcccatcggctgattctagaactttgaagccgatactgactctaaatcgatggtaactttgggcttaccaaatttcactattaacaaccttcaacgttggctcgtcccgcatcctgtcgcctcgccccaccctttcacgctctccgccaccgccgccctctattcctctattccaccgccgtcgctgccctctcctccgatgtcgatcccgatgtcaccacctccgtccaaactgcctttgactgtgtgccaggcgtcggcacaagccgccggtggtacttgccgccgtcgatcctcaatcccactcttcccctccacaggttagccctaaactcccttgctccccatcctccatgtccctcttctctcttttccattggaggcaggtgcaaggagcatttgtttttgtttttttctcttcgcaattttgtaacatagaagataggatgactaaaccattgtggatcccataatattaaacatgccagttctattgaactttttatatcttgatgaatgtgtatgatgatttacttgatactactttgatcaaacacacatattgctatcatggtcttcttggatgctatattgctattggccaacttaagatgcttgaattaggtctttttaagacttcatcagaatagttgcacctaacaaagtaaaaaccagcaactttgatggtccctaaagatgtcgaatagccgtatccctaattcgtcacattaaatctgaatgcaataaaatttgtgaagagaacttgtggattaaggaagttgcgcttcattttgatccactatcgtggcctacccactcatgagtggactatatatatgtgtacatgatctaatttattatccttgtgattggctgctgtcattgtgctccatatggataacacaaaaacacacacacacacacacacacacacacacacacacacaaaacagaagcatcgccttgcagttgcacttgccaattattgtatcttctatttggaggtttcgatgctcttttgttgtaaatgtttaatactaagttgccaactattatagcttctatttggatgtttggacaacgaggttgacgctggcaaggccgtgctcgcggcgtcgcttcctggtacctccaatttcttctctggcccttacctcatctctgttgccaaagatttccttccaatcggcaacccttctttcgcagtgctaacaaggacgcccccatgtggttccccgcttgcagttgggcctttcctccatttaataaagcctaggatacctttcaaatgtatgcaatgattctctttgcttgccaaggtaaagttcctttttagactgctttgagattaatatttgtgcttcttcttttttgccagcataagatgtacacttagaaacacaaatagtgtggatccatctcaaagcctttaggatcataatataaatgccctactgtttttttattactgcttattaagcttctggtatccctccactgcatatgaagtgtgacatgtctatgtgagttctgtttttccaacatataaaattataaagtcatcatgacctatttaaaactgaaattttagctatcattgacctatgctgaagccatgtgactttttttggtttacaccaccttacatgaggtgcatattaaagtctgtgtaccttaatttggttcttcctcttagctagaggtatactaagacatactagctaggagggcctacaatccattgataatgtctcactgaatgcaaattaaaagagtcttaagtatctatacagatgtctccagattttaactatattgtgcaaagatagaattaactaatagaacaacaaattgatgtggagaaaatctctgtaataatcaatgtctgctgcaattgcttattataattcatgctctgtacttgcgcgtgatgatttaaatttcagaataagtgtacagaaaataagttgcggtgaactgtgatttaaccatgaccagtgcccgaagaacagcatggagattggagagatgactggtcagacaagagcctttataggaacaaaatgcaacaccgtttattgttgattgggtcatatacaaataatgcaatccgcttatggacaaaaatcaacaaggaagatgcagtacatactacattctggagaacttgatagaaacaagcaagcattttaggtcatcaacaccaccaacaacaacactactccagcacgtcgcagcagcagataacggctaacttgcaaaatgaatacccttatactatacttcctccgtttcacaatgtaaaactttctagcattgcccatatttatttagatgttaatgaatctagacatatttgtttagattcattaacatctatatacatatgggcaatgctagaaagtcttacattatgaaacggagtgagtactatactacctatgtatactacccatgctataagttcattagtatagagttaatctgaattgttggatcgatagtacaatccactataatatactccctccgtttctaaatcttttaacaccgttgactttttagcacatgtttgaccgttcgtcttattcaaaaaaaacttttgtgaaatatataaaactatatgtatacatataagtatatttaacaatgaatcaaatgattggaaaagaattaataattatttaaattttttgaataagataagtggtcaaacatatttaaaaaattcaacggcgtcaaatatttagaaacggagggagtgcgatggtatagagcaccgcaaagtaactctaagggagctcagttaggccatttacaatgcagtgatgtgtcattctccctcgccattccacgtcggcaaagcaggagggcacacgccacgtctgcttctaggcccaccagaatgaggttcgagtgtccaaagatggccactggttcttggcgaaaaagaggacgaatgaagctgggagacgacgctgcttccgcgttgtggagtgagtggcatcgccctccttcccatgccagccgtcgccctccagccagccgcctagcccaccgtcgctgtccgcagccatcgagctcgttctcgtccctgccatcggagctcgccggccacaccgcccccgatccgctcaacccgaagctcgccggccactccgtcgctcgattcacgccggtcggaggagagccagaggagaggggtcgccgccgtgggagccgaggtcgccggccgcgccggccttgcagggccggaagaggaggaggaggggaggcgctcgagcctccggttgcgagtggcattggagtgagaggcgccaacggtcgtgggggacaggaagggcgtgtcaccgccgcgtcgcccggagctcgccggccgctccgaggtcgccctgtaccgccagatctgcgttgccggcctggggaggagggcagcgcggcgacgaccatggtggcggcaacgaaactacggccgcaaccatcctcgcgccgcgcccggacgagccgtcgccactggatctggcaagctgccacgccgtcgtcgagactcgtcgctgccacgccatcttcgagactcgtccccgccatgcgagagcaggggaggccaagaagttcgccgccgtcgagcgccaagctcgccgccctgccaagaccgccgccgtcgtcgcctccttgctgccgagcgagtggcctccatgccaagaccgccgccatcgtctcctccttgccgccaccgccgtcgtccccagatccaccgacgctccgcccggccaccccagcgccgtctccgctcgccactgctccgcccggccccgtcgccgtcgaggccgccgctccgctcgaacgcctcagtgccggctccgctcgagcgtgagagaagggaaggagcaacgttgggctcgaggaaagggagagagagagagagagcggaaaggtggagaaaaaaaaaggaaaactacatttttgtggaccccacttgaggtactgcattgtgcagcttgtgcctctcagtgttcctcagcatatgtggcagctcaggtccggcattttaggtgacgcattgctattgcccttaaaataaaataggttggtttggattccgagcaagctgttcccggattttcttcttcagttcaccttccttgcgccttgcttcctgttcctcttccgcccgggcagtctcataatcagcgcccgccgcgcgcgctgctcttatccttttctcatcgaagtgaaactcaaatctgagctggacttcgttgatgtttaggagaaactctagcccagaaaacccaatttcattttttattagcccttcgacctgcagccgctcaagtttgagcattgttccttcctcaaacttcactgatttggtgccccataaatctgcaagcttgagcaccttgaggcttccaaaagcagttccagtctgtggaggcttgaaatgaaattcttcaccctgaaacggtgaaatcactagaatttccagcttcggtagtttcccaaggaattccatagcaacatcgtgctccaatagcctagcgcccactagttttagcttcacgagatgctggagctccttgatccattccggcaacgttttcagattgccgtatagcttgaggctctgcaggttttccggaggcgaggatatatcatccaagcaaccacacaaacccgacatccctgctgaactcacagacagtgattccagcttgccgaggttggaaatggccaacctaaacgctcgtccattcttcttgttgatgccagccactcctaacttgtgtaatcctgtgagcattccgatgtctcgtaggatggcatttccccttccgatattcacgtcccttagtgtgtacaagtctttcagatttctgatcccctttggcaccatagtgccattttcttcatatactcccctcatgagagatgggaatttcacgcagcaagcgaaagtgcatgcatcacgcctggtaagggccttatggagagggccatcaatgtcccgaagaagaggaaggcaacatgttgcacatagataccccactttacaacgcctctccattaaatcatcctttatccccgttacagtctcttttgagcccaacatggatgtactgtagcttctgcagcttgatgatagtttttggcaaagcctctacatatgtacctctgatgtctagcatctggagttgcctcaggttgcccaaaaaatctggcagtagatcaataccagcgcatcctcggagagaaaggaattttaggtgaataagcttccaaatctgatcaaggtgatgatagtttaggcctctagtcccttcaaagtcgagcactcgtataaacctcatcttgctagaaaccaaaaatggctcccaatacccaaacagagatagcgatcgtattcgggacaggtccactatgcccttgaattaatccttatctcccttccagttgctacttatagcaagatgacgaattgcgccatggatgtacgagctgcagccttcctccatcctaaaaacaaggtttccctccattgactttgagatggcgatgtcacggatgagatcatggactttgcaagagtcaattgatttcctgctgcgagctgattgctggaatggtaaaatcatgcttctattcttgagttccatgaagtagtcgtcagctatttctgttagatttaattgggtaattaatccatttaaatcaattaaatcaaataaattccaaggctcattatgctaggaattcatgtgaattcattcttctatgggatatcaatgggatgaagagttttgagaattaatccatttgattaaggaattggtaacttatatcaattagtcctaattgatggatggttgatggttgtgtagtggaggatggttcatggctagttgatgacaattagttgctctattcctcttcctattccattggtaacttacatcaattactcttaattgattgttggttgatggttgtgtagtggaggatggttcatggctagttgatgacaattagttgctccattcctcttcctattccatgactcttactcttcatcttccattcctcttataaaatgagaatggatttgatctcccgcgagaagaagaagacacactttcatccattttcaaaagctgttgctgctacggtaatcccatcccgacgagtgtgtgcacacgcgttgggagagtaggcctccgaaaccacgcgttgctgcgacgtttgcacagacgggcgggcgatcaggtttttggggagcgcaaggcgcgactactcactgttcgtcaacatctacttcatcttcaccaacatgtcgaacactggagacaaggagaaggagactcccgtcaacaccaacggaggcaatactgcctcaaactccagcggaggaccattcttggggtataaccttattacattatttcaattagaagttttactgttaatgttcatcgcaatgtcaacattgtgtcattatgtgattgttgatgcttattcaacgttaagcatgctcatattgattacattcaccactgtcactggatcaaatcctattgtaaatatcatgtttattatcttgttattttggattaaaatatgccgaattatgaccaaatttccaacaatttcaacggcagacttcccatgggccgcagttgagtaaccttctgctgcccaccgatgcaccaaacgccttcgactaatgatctggtcttcaggaaaaatggacagatataaaaaacatgacttgagatggtagggtaaaccatcatagcttttttcaaggacggttcttatcattccaagctctggattcatttccaactcagcactgatattctcgttcaattttctccactcttctggggtctttggtcggtttgccaagaatccacctatgacaactatcgcaagggggagtccatcacacttctttaggatttgttttgcttctttaaccaactcaggattcttctgctcatctaaatatgtagccttctcaaatacctgacattgatacaatttaagctttattgtgctctaagtaaaacaaaaaaataattaagtttagaaatatgtctttactattaaaactagggaatgaagaccaccgtcacataccaaaacaaggtcacatctaacatccatccaatgcaggtcattttaggaagtgcatcgctatggttgtttttttacccaacccgctattgttgtgagaacagattaaattgtatatgcatcatgtgtatgctatttctgtctgcacaaatatcatcttgattggattactcaaatgaataaagaatatcaaaccaagaaaaatggagcacgcctatattaccttctcactcaagaggcacagtgcatcattaggtttaagaactagaaggttgtgcacagttccatttttccctgagcaatgattggcaatattttcttttcttgtagtcacaatgattaggcttgtcttttccaacagggggaataacattggttttatctggtcccattctgaggtatctgagaaatcatccagaacaatcaagcttcttttcttttctaaaagcctttccaattgcttagtcaactggtcaagctccatcgatgctagtgatttcttactgctgactctattttctaccagttcttctttcttagaagatccttcatgtagtcgcccagccaagctcctaaggagctctacaagattgaaaggacgcatgattgtgacaaaaacatacttgtcaaacttgtcgctcagctttgggctttgataaacacctccaactagggtggtttttccaaggccacccattccccacacagagatcacctgaacctgctggctattgtcttttaaaattaagtctattatttcagacatttctttctctcgcccaataagttgcgattcctccgaagcaccaacactcgtcctaatgcgagtaagactctttctaaccaccttcttctcatcagcatccatagattgatcatctataatatcaccatgggccactgtatgatcgtttgtacttgtggtggccacatccgagatagacactggcttcattgaatcctctccattttgggaaccctaaacaaaagagagcaatgattaagaacaacttttagccttaaaattttcatggacaatgtttagccttgttttcagtcatgaaagtatacaaaacaataatgataattcctttcattaatttgcagtatagtataaaccttagttttggatcctaatttgaaaaacttatatctgattgttcaataagatatgtattaatttaactttagaagaatgggataagtacactacatttaatccaaaggatgagaggatacatttgctagattagctcattttacaatcatctctctcagatagaggaaataaatttccgaattaaataaactgtgctaattggatatgaaatcaaatactccatatctaaattatttgtgaaataggagcttcaaaattttaattgtgcaaagaggactcgtgctacatttacatacttgtacaattntgtggannaatctgttagccaatctactacctccattatattctctaatcgaggcgatctntgctatccgatatatttcccttcgataccatcctttctactttcattagcattgaccgttcaaccttggaacataggatggattagaattcaaggtcgctggatatgaaggaatgccagcaattgcagtggcagatgagggagattgttttttatgaggcaaaagggaattttttttttgatgggacatatgagggaatcattatgtttttagtcgccgttttttgcatcgttgtcttacttgtaagcctgtattagaccatttatttttctagcatacatatttgttttgacaaatccaaatacatatatttgtggttgtagtcttaaaatgctgagcacatgcattcccaaaaaggcaaatgagagagagaactggagggggcacttgttagttgcattagctcatgtgcttctaatggaatggtaattcccacgcacttcaactggcctacacaactgaattagaaattacctaaggacataactgaattaaaaatgatatcaagcaaattttttcggggaagcgtctggtcttcgaacaaattttgcaaaatgttcagcgcttccaatccagtgcaatgagacggatctccaaactctccatgatgaattgccatgtcaggtcgcttccttcccttgcacatatctaggattgcctctgtccatcttccgcctgaagaaggaagacttgcagccactggttgacaaaatcgcgcgccgtttgccttcttggatgtctcacttgatgacgcctattggccggactaccatggtgaacgctgtactaagctcaattcccatctacctactcatggccatcaatgcaccgaagtgggttatcaaagggattgacaagatccgtcgcagctttctttgggctggaaaagcttctgcaaacggcggcgtctgttgggtcgcatgggctcgagtttgctcgcccaaggagtatggtggtttggggattcctgatctagagaggttgggaatcgccctgaggtcacgatggctctagcagcaaagaacttcaccggaaaagccgtggcaagggcttagtattccggtctcgcagaaggagcgcaatctagtatcgatttccatggtatgcttggtaggggatgggaattcagtgctgttctgggaggattgctagctgcagggttcctccattcggtcgctagcgccggctgtctatgctgcagtccctgctcgtctccggaatcgtcgcacggtggccgaggcaatgactgacagaagatggatccaggacatcagttccgcgttgggtattcaagcgatcctagagtatttcaagctttgggattgccttcggtcagtgcagctttccgaagagccggactctctatcttggcggtgggagacctcaggagaatactcttcccgctcggcttatcgtgttctcttttttggaagaactcgtctccagcacaagccaatttggcaatctttggcgccccctcgctgtcgctacttcctttggttggtagctcttaaccgttgctggacagcagaccgtctccggagtcgtggtttgtcacacctggatcgatgtgttctgtgtgatcaatgcgaagagacgattgatcatctcttggtcgcatgcccggagtcgtggcaactgtggtgggttgtgctcagagctatcgggcattcggagtgcttaccgctcaatgaacactctttcctctcatggttgtgcgactgtctcggtggattcacctttctggcttcacctttttggctctcgtgactgaaaggatgcatcacccttacccatgcatggcatgggaatctgatttgaacagctgggttctcgtaagctgtcctgattattgttgtttggcccatatcaccacttgttccccagaccgctatcactttaaggtcatgatcctccttgttgattagctggacgagatccactctctgattgtcctgttttgcggcacgccttgcatcatcaatgccgaatatggctgcagcaataacgctagattgctcagctgaggtgatggtggccttggagccggagcccttgatgaggtggtaccgcgcatttctctggctgacatcctcgaccttgttcctgagctccttcatctgcttggccacacggcgccgctcgagcagcgtgcgagggaatcgccaccaggatggcttcttcagatgaacagcaaaatcctggaggctgtcctcaacgtcataggcagtgtcacggacttgcttcacccaagtcttgaccactttgctgttatcttgctcctcgtgcgcctccatcatgaaagacctcatcatctcaagctcatctgcaacaaaggtgtggtctttttggataccaagctgcaaggccacctcctcggcaaatgcagattttgcgtagccaagcgctccattcagcacggatttgcccacactcagcgttgttgcctccattgttctgttgctaaagcatcaaaagcaacaagttttaaaataaaaaagaattatcgagaatttgcgtggctgaagctaaagcaactacttttaagaaagaaaataaatgacgagagtgagggagtcagagtaaagaaaaggacttggtgttgcttcctttgatcctttcagatgaccttcgttttccacctataggctgtagcatacagaaagcgtcgcctgcatcgatgaccactccgttcccggcggcccacctccacctccagcaacctaaggcccttttgccccccccccccccccaacaccaacacacacacacacaaaggaataagtccactatccctccctcaacatggccgtgtatgaataccatccctcaaccacaaaaccaggtataacccgtcccccaactccgaaaaccgttgcaaatcaactccccgggtggttttggaggcggttttgctctacgtggcatctttgaccctgttgacttgctgagtcagcaggtgggacccacctgtcagtggcaaggataaaagaaaaatggtggggcccactatcaaccccacttttttt

SEQ ID NO: 4612 - DNA, 6680 bp, Oryza sativa
ggtagatcggggccgtccgttcggccgcccacgtggctgccgtgtgaccgcagcgtcggcgccacgtcgtgcgccgtcccttccccggtccgtagactcggtccaccgcggattgccacccgtgtcatcgccatgtggggcccgcatgtaggcgccacctctctctctccccgggatttatttattgtgcaataattcaattaaggatttttctgtttatagtaaaatcactgtgaatcttctaaaattcatatctaatccatccgagctccgtttaagcccattcaagtctcagtaaatcaagaaaaatgtgtagaatccattaataatggttttgttctctgtttcagtagtcttatagcctgtttgtattgtttgccttgtatgtcgcttagattccggctctcccgatgctccggtgtactttgaaatagtcgccgaggttcctccaggagcagagcaaggcaagtcatgcttgtcacttgaacatattgatcctatattgcaaatggtctattgttttccttcaaatactgcattgttttgcaataatagtacgggatgtttacctaatgttacagccatgctatttttggtaccatgctcctttgataacttgggatataaacatgattagagattggactagggattgcttagccatgcttaattcaactagcacacaatggggaaaacatactaatgtatagactgtaggttctaatgttaatgctggactagtgccaccgcttcggtgttggttaactaaaatcaatcacatggtgggttgtgggtgcatggttttgaaggtcgcgcccatggcaattaaggatcggttcgcgggatgccctggaagaacttatcgtacttaccacaagccagcgtgggcaacggctgggcttgtagtgtagctttcctctagctgacgcatccaggcaagggtgggcgtgatggagtttggatgggtcctgcgacggcctatgcggcttccggattcacctaggcacgagaggggactacccgctgccttgcgaggaatgggggtgaaacctgaggtgtggtgtgcttggttagagggggttatgcgaagggtcctgtcacggcctctatccggtatatcgtggtggcatgtcggcgcatggaaacgtgtcgtggggctgtgtcttgtgggtacagttgtacatctctgatcagagtaaaactattctaatagcagtgcccgcggttatggcgggccaaacagattcaccgtgattagtctccccctagtgttgtctgatggaactgattagttcaggtggttggttgggcctgttgcaacgtggtgtagcgttgaccagtggatggttaatattgattaattagtacaattgttttaccgctttaaacacctgtttataaatgctcgctttatgcaaaagaacctctctagctatcctttggcaatatcctgcatcataccccgattccggtatgacttgctgagtacagtgggtagtactcagtcttgctctattttcccccaacccaagagtttgagtatgcgtcagatggtggttctccgagaagtaggcttcgtccgtgctgtcgaggatgcctgtggagtggtgttcctgctgccgttcaagtcaaggcttagctccagttatcttttgtttttccgctgcacttatataagactcttataatgtatgtaagacgtggatctgtatgtcaactttgtcgtttgtgtaccccggccagtcctggacagggattttaatgcacactatgcttggaattctattcgggaatttctgggcgtgacaaacaccgaccaagcaacacagcccaagcggcttgttctcatttggttccacttcctttttcaaaaagtatgaattaacccccataaactatcgaggtcgatcgaattgccccctgagctgcaataccggccattcagcaccttaaactcttaaatccggataaataaccccctgcctcaaaccggggtggttttggtcctacatggaaatctagtcagcaattattttttaaaaaaattcggtggaccctacatgtcatactctccccatctatctcttcccttcatcccatccgggtacgcctaatcggcaatcgatcgccggggggatggggtagcgatcagattcgctccccacccctccccctcccttcctccacctgatttccttttttggcaccgcattactttcctattttagtcaatttatgcacctaaagtttgtgcacctcaagtttacacatctccacatttttttaaaaaaaacagaagttagaaaaatttatgtatagaaatactatatataaaaaaatttgaattcaaattcaaatttgaatcgggtatgtaaacttttaacttctaaactttgggtctataaactttagatgtatagaaatactatatatagaaaatatttgaattcaaattcaaatttgaatcagatataattcaaattcaaatttgaatcgggtatataaactttaggtctataaactttaggtatataaactttaggtgtataaactttagatgtatagaaatactatatatgaaaaatatttgaattcaaattcaaatttgaatcggatatttgaattcaaattcaaatttgaatcggatataattcaaattcaaatttgaatcagatatataaacttttaacttataaactttagatctataaactttaggtctataaactttaggtgtataaactttagatgtatagaaatactatatataaaaaatatttgaattcaaattcaaatttgaatcggatatataaacttttggtttctaaactttagatgtgtaaacttgaggtgtataaatttactaaaataggaaagtaatgtggtggcaaaaaaggaaaccaggtggaggggtggagggagggaggggggaggggatcgatcgctgatccatccccagggcgatcgatcgccaaacaggatttccgatcccatcctctctcttttgtcccttcccttccctcacctccatctctctctctctgaactgagctagcgacggtggtgtctatcagcgttgcacagcggtcaatggcaggaggggcttgagcccgtgcaagcagagccacgggcgccgatagaggcagcaggtggcgcacgtctcgcatctcgcggccgacaatggtatacgcgagggacgggtgaggacggctggaaaaagctactgcggcggcagttttttcggcgaggcaggcggcgcttggcagtgagataggtggcaatggcgcccgggacagaggtggtggtcttcgtggtcaacagcgagcgcttcaagctctaccaccacggagccgctgtcgccgaccccaggggcaccctcctcgggttcctctgctcccgcactcgcttcaccagcgccaagcctcaccattgtgctgctatcggcgtcggtcacccggcagcctctccaccacctcccacctcctcctcgcctctctgccaatccggaggagatggtggatgccctccatgagcttgcagagacgtctcccaagcaagctcgacctcctattcgtgggattgatgagccgctgcctcgagcccacctcaccgctgccccgctatctctgacgaccccctcgctagtgcactgccatctccaacccccactgcgccctccccgttacgcccaccatatcctcccagccattggcagccggccgcccactcaccatgtgtgggacagctgagctcgtgcagcccccttccttccctccttgtttggactggccctcgctggcagcactctgtcctctcacggatagagaagcagagaaggtggagagaaaaaccaacgctaacaagcgggtcctattaatttttatttgtttttgctgagatgtatctgctacaggacgcatgtttgcagagttacaatataagaaaaactatctatttaagaagagtatactccctccggtctccttttaatgtatctgctacagtatgcatgtttgcagagttgcaatataagaaaaactatctatttaccttcaagattgttcacgttaatgacttggttagtgcatgaactttgcaacctgcaggtgctgtgttcgagcacagatgaaagcgttaatatcaaatatattaagatgtgcgtgcctatattaatgcttctataaaagcatctcgatattttgtagagatgcaatttacacgtctctagcaacgtcttaaataatataggtacgcgacatctctagcaacgtcttaaataatataggtacgcgacagtgcaaacggagacgttcctacgacgctttataaaagcgtccctacgacgctttataaaagcgtcccagttatctgtgggagacgaaataaaacgtctctatcctacaaataagatgtctctattgggttgttttgttataaagcgtcccagttatctatgggagacgtttcgtctctaacctacaaataagatgtctccattgattgggttgttttgttgtagtggtatctcacggtgaaattagtagagagtaaaaatgatcaaaatatctcatcattattaaaatactaacagtgatagatagataaagtatattaaagagataaaacttgtcattttatgtgctgagaatagttaggatactagaaattgttcttgtggaacaaaatgttgagccttttgcgagcttcacttgttgggcctgaactccatgccctctataacaagaccactcttcttgacatggtcgttctcctcgcggaagtccactatcaccttcttctcaccgagcagcttctcgtcggcagcaaactcggccagcttgagctccatccagccgtctcccctggccacaggataggccacgccggcggccattccgcgcgccgctgcagggacgacgtcgacgctgaccttgccggtggagacggtgatctcgccgtagagcctgagcgatgacctctgcgtctggccacctctcaggccgacggaggtgcccgtcagcttgtacaccaggtacaccgcgtagcgagtacccggcgtcaggtcctccgttgcgatctccccaatcaccgccagccagtacacgtttaggagctccgcgcattcggcaaacctttgtaccaacagaggaaaaataaaacacaaaaaattaatatgtgcatgttttcaggatttggaaattaacaagcctttgtattttaccagcagagaaaacaaaacaaattaatatacatgtgcctgtttcatggatttggaaaatagacctttgttccaacggagaaaataaaccttccgtttcaattcatattgtaagtcatttaactttttttaactcaaagtttctttaattttgaccaaagttatagaaaaaattagcaacatttatgataccaaattagttccgttaaatttagcatcaaatatattttgatacaatgtttgctttatattaaaggtattattatattttactataaacatagggcaaatttaaagtactttcagtaagaaaatagtcaaagacttatagtatgaaatgtagagatttgaaaagtttgctcagtatggaaaccttacctagaatcggggagggtgatccatttccagtgctcggggctttctccccatgtaacctttaataatctcgatgatagcatgtagcacttggcgttgcttgtagcatcaaccaaaaactctacatgcgttcgtcaaccaatataaaaatttggattgttcggtaccaagtataatccacagtagattctgtaaatgtctgtcagtactactccctccgttttacaatataataatttctagtattgtctatatttatataaatgttaataaatcaatttattaatatttatttgggcttttgtttcttcatttaccttatcagctggtctcctgtcccctggctgagaaggcccaggttgcaattgcaacgctttggactcctcacctcgaattgttcgcggttcgggtgaagttacagccattcgctttatgctctccatcaacctggatagcgagcttatctgccacggaagcaaaataaaatctaatcacagaaccattcgaagtaaatgatcggcaatgaaagagcctgttgttagtttttttgtctttctctgttttcagttaagacatccctttcccttatttgcctgtgtctatgcttggtactcccagtgaattacattaattagactcaacaaattcctctcgcgaattattccagagttatgaaatgagttttgtcattagtctatgtttaatcagtgtccaaacatctgatgtgacaggtactaaagattagtcccccatccaaacagccctaagcgtagccatgagtttccgtgtccaacttttatcatccgtcttatttaaaaaaatttatgattagtatttttattgttattagattataaaacatgaatagtattttatacttgacttatgctttttatttttttaaaaaaaataaataagacgaacgattaaagttatatgtggaaactaatggttacgtttattttggtacagagggagtacttatattcagccaaacattcgggctcacggtaattacttttcagtatactcgtcatcatctaaagctttttggatgtacttggtgaatctttgaatgggggatcct

SEQ ID NO: 4613 - DNA, 6637 bp, Oryza sativa
  unsure (1)..(6637): unsure at all n locations
gatgataaaagttggacacggaaactcatggctacgcttagggctgtttggatgggggactaatctttagtacctgtcacatcagatgtttggacactgattaaacatagactaatgacaaaactcatttcataactctggaataattcgcgagaggaatttgttgagtctaattaatgtaattcactgggagtaccaagcatagacacaggcaaataagggaaagggatgtcttaactgaaaacagagaaagacaaaaaaactaacaacaggctctttcattgccgatcatttacttcgaatggttctgtgattagattttattttgcttccgtggcagataagctcgctatccaggttgatggagagcataaagcgaatggctgtaacttcacccgaaccgcgaacaattcgaggtgaggagtccaaagcgttgcaattgcaacctgggccttctcagccaggggacaggagaccagctgataaggtaaatgaagaaacaaaagcccaaataaatattaataaattgatttattaacatttatataaatatagacaatactagaaattattatattgtaaaacggagggagtagtactgacagacatttacagaatctactgtggattatacttggtaccgaacaatccaaatttttatattggttgacgaacgcatgtagagtttttggttggatgctacaagcaacgccaagtgctacatgctatcatcgagattattaaaggttacatggggagaaagcccccagcactgaaaatggatcaccctccccgattctaggtaaggtttccatactgagcaaactttcaaatctctacatttcatactataagtctttgactattttcttactgaaagtactttaaatttgccctatgtttatagtaaaatataataatacctttaatataaagcaaacattgtatcaaaatatatttgatgctaaatttaacggaactaatttggtatcataaatgttgctaattttttctataactttggtcaaaattaaagaaactttgagttaaaaaaagttaaatgacttacaatatgaattgaaacggaaggtttattttctccgttggaacaaaggtctattttccaaatccatgaaacaggcacatgtatattaatttgttttgttttctctgctggtaaaatacaaaggcttgttaatttccaaatcctgaaaacatgcacatattaattttttgtgttttatttttcctctgttggtacaaaggtttgccgaatgcgcggagctcctaaacgtgtactggctggcggtgattggggagatcgcaacggaggacctgacgccgggtactcgctacgcggtgtacctggtgtacaagctgacgggcacctccgtcggctgagaggtggccagacgcagaggtcatcgctcaggctctacggcgagatcaccgtctccaccggcaaggtcagcgtcgacgtcgtccctgcagcggcgcgcggaatggccgccggcgtggcctatcctgtggccaggggagacggctggatggagctcaagctggccgagtttgctgccgacgagaagctgctcggtgagaagaaggtgatagtggacttccgcgaggagaacgaccatgtcaagaagagtggtcttgttatagagggcatggagttcaggcccaacaagtgaagctcgcaaaaggctcaacattttgttccacaagaacaatttctagtatcctaactattctcagcacataaaatgacaagttttatctctttaatatactttatctatctatcactgttagtattttaataatgatgagatattttgatcatttttactctcaactaatttcaccgtgagataccactacaacaaaacaacccaatcaatggagacatcttatttgtaggttagagacgaaacgtctcccatagataactgggacgctttataacaaaacaacccaatagagacatcttatttgtaggatagagacgttttatttcgtctcccacagataactgggacgcttttataaagcgtcgtagggacgcttttataaagcgtcgtaggaacgtctccgtttgcactgtcgcgtacctatattatttaagacgttgctagagatgtcgcgtacctatattatttaagacgttgctagagacgtgtaaattgcatctctacaaaatatcgagatgcttttatagaagcattaatataggcacgcacatcttaatatatttgatattaacgctttcatctgtgctcgaacacagcacctgcaggttgcaaagttcatgcactaaccaagtcattaacgtgaacaatcttgaaggtaaatagatagtttttcttatattgcaactctgcaaacatgcatactgtagcagatacattaaaaggagaccggagggagtatactcttcttaaatagatagtttttcttatattgtaactctgcaaacatgcgtcctgtagcagatacatctcagcaaaaacaaataaaaattaataggacccgcttgttagcgttggtttttctctccaccttctctgcttctctatccgtgagaggacagagtgctgccagcgagggccagtccaaacaaggagggaaggaagggggctgcacgagctcagctgtcccacacatggtgagtgggcggccggctgccaatggctgggaggatatggtgggcgtaacggggagggcgcagtgggggttggagatggcagtgcactagcgagggggtcgtcagagatagcggggcagcggtgaggtgggctcgaggcagcggctcatcaatcccacgaataggaggtcgagcttgcttgggagacgtctctgcaagctcatggagggcatccaccatctcctccggattggcaaaaaagccaggaggaggtgggaggtggtggaaaggcttccgggtgaccgacgccgatagcagcacaatggtgaggcttggcgcttgtgaagcgagtgcgggagcaaaggaacccgaggagggtgcccctggggtcggcgacagcggctccgtggtggtagagcttgaagcgctcgctgttgaccacgaagaccaccacctctgtcccgggcgccattgccacctatctnactgncaagcgccgnctgcctcgccgaaaaaactgccgccgcagtagctttnttcagccgtcctcacccgtccctcgcgtataccattgtcggccgcgagatgcgagacgtgcgccacctgctgcctctatcggcgcccgtggctctgcttgcacgggctcaagcccctcctgccattgaccgctgtgcaacgctgatagacaccaccgcgctagctcagttcanagagagagagatggaggtgagggaagggaagggacaaaagagagaggatgggatcggaaatcctgtttggcgatcgatcgccctggggatggatcagcgatcgatcccctcccccctccctccctccacccctccacctggtttccttttttgccaccacattactttcctattttagtaaatttatacacctcaagtttacacatctaaagtttagaaaccaaaagtttatatatccgattcaaatttgaatttgaattcaaatattttttatatatagtatttctatacatctaaagtttatacacctaaagtttatagacctaaagtttatagatctaaagtttataagttaaaagtttatatatctgattcaaatttgaatttgaattatacccgattcaaatttgaatttgaattcaaatatccgattcaaatttgaatttgaattcaaatattttctatatatagtatttctatacatctaaagtttatagacccaaagtttagaagttaaaagtttacatacccgattcaaatttgaatttgaattcaaatttttttatatatagtatttctatacataaatttttctaacttctgttttttttaaaaaaatgtggagatgtgtaaacttgaggtgcacaaactttaggtgcataaattgactaaaataggaaagtaatgcggtgccaaaaaaggaaatcaggtggaggaagggagggggaggggtggggagcgaatctgatcgctaccccatccccacggcgatcgattgccgattaggcgtacccggatgggatgaagggaagagatagatggggagagtatgacatgtagggtccaccgaatttttttaaaaaataattgctgactagatttccatgtaggaccaaaaccaccccggtttgaggcagggggttatttatccggatttaagagtttaaggtgctgaatggccggtattgcagctcagggggcaattcgatcgacctcgatagtttatgggggttaattcatactttttgaaaaaggaagtggaaccaaatgagaacaagccgcttgggctgtgttgcttggtcggtgtttgtcacgcccagaaattcccgaatagaattccaagcatagtgtgcattaaaatccctgtccaggactggccggggtacacaaacgacaaagttgacatacagatccacgtcttacatacattataagagtcttatataagtgcagcggaaaaacaaaagataactggagctaagccttgacttgaacggcagcaggaacaccactccacaggcatcctcgacagcacggacgaagcctactactcggagaaaccaccatctgacgcatactcaaactctggggttggggaaaaatagagcaagactgagtactacccactgtactcagcaagtcataccggaaccggggtatgctgcaggatattgccaaaggatagctagagaggttcttttgcataaagcgagcatttataaacaggtgtttaaagcggtaaaacaattgtactaattaatcaatattaaccatccactgttcaacgctacaccacattgcaacaggcccaaccaataacctgaactaatcagttccatcagactacactagggtgagactaatcacggtgaatctggttgaccgcccataaccgtgggcatggctatttgaatagttttactctgatcagaggtgtacaactgtacccacaagacacagccccacgacatgtttccgtgcaccgacatggcaccacgacataccggatagaggccgtgacaggatccttcgcataaccccctctaaccaagcacaccacacctcaggtttcacccccactcatcgcaaggcagcgggtagtcccctctcgtgcctaggtgaatccggaagccgcatagaccgtcgcaggacccatccaaactccatcacgcccacccttgcctggatgcgtcagctagaggaaagctacactacaagcccagccgttgcccacgctggcttgtggtaagtacgataagttcttccagggcatcccgcgaaccggtccttaattgccatgggcgcgaccatcaaaaccatgcacccatagcccaccatgtgattgattttagttaaccaacaccgaagcggtggcactagtccagcattaacattagaacctacagtctatacattagtttgtattccccattgtgtgctagttgaactaagcatggctaagcaatccctagtccaatctctaatcatgtttatatcccaagttatcaaaggagcatggtaccaaaaatagcatggctgtaacagaaggtaaacatcccatagtattattgcaaaacaatgcagtatttgaaggaaaacaatagaccatttgcaatataggatcaatatgttcaagtgacaagcatgacttgccttgctctgctcctggaggaacctcggcgactatttcaaagtacaccggagcatcgggagagccggaatctaagcgacatacaaggcaaacaatacaaacaggctataagactactgaaacagagaacaaaaccattattaatggattctacacatttttcttgatttactgagacttgaatgggcttaaacggagctcggatggattagatatgaattttagaagattcacagtgattttactataaacagaaaaatccttaattgaattattgcacaataaataaatcccggggagagagagaggtggcgccgacatgcgggccccacatggcgatgacacgggtggcaatccgcggtggaccgagtctacggaccggggaagggacggcgcacgacgtggcgccgacgcggcggccacacggcagccacgtgggcggccgaacggacggccccgatctaccatccggtagatcgaacggcgggtacggctcgtggccggtgcgtgtgggcatgtctcaagccggcccggcggccatggcgcgcggcggcgtggcgtgcctgcagcggcgacgcgaggcggcgaccggccggcggcggagggcgacagcgtcacggcgacgcgggcggcggagcagcggctaagcggctaagcggctaagcggcgggtaccggcgcgggagagagagaggaaggggaggagggaccctactgacgatgaccgacgacggcaagcgatggagggcaacggcgttagcggaacgagctccgggatcaactaagaaatcaaaagggaggggttagagagggggagagagaccacggatggctagggtgccggccgaaggcg

SEQ ID NO: 4614 - DNA, 5041 bp, Oryza sativa
gaatccgagggagagaaataggggaaagtggggggaaagagggagggaatcacggggagtgatttccccctctttatggcgcgcggggacggcgggatgcggcggattcggcggcggcggtggcgctagggcacgggcgggcggcgggcgcggcgcgaggtaggcgatgacaggtgggccccacccgtcagcgagggtggcgggcgggcccgcctgtcagcggcgcgcgcgcggggaggaggccgatgggccgcggggagaggagagagagggagggaattgggccgagccggcccaagagggaaaaggggggggaaagaagacttttagggactttctttttataaaacctttttaactttgtttatttcttctcaattattatttgtgctctgaaaattccactaaaatttatttacgcattttaggcttttaggaaatatacaaaaatcctccaagccttatttgacttttaaatttgcacattttaattgttggaggctttcacatgaattttaattattctcggcacaatttcgaggatgtattttagagtcgatttgggacgcgacagccaccagcgaccgcgcttcactcccggacagcagggtggacctaccaccatgatcgtccgccagcaccgccctttcaactcgagcagcttccaccagggcgccagtggcagccagaaccaccagggaggtcagcccaactgcagcgcagctccgcgcccaccaacggcaccagcacagtcagctccatcagccgaagccaagaaggagactggaacaaagccagggtcctgcttcaattgtggcgagcatggccactttgctgacaaatgcccgaagcctaggcgtgctgggccaaggtttgtccaggctcatgtcaaccacgcgtccgccgaagaggcgcaaccagcaccagaggttgtactgggtacgtttcctattaactcagtccctgctacagtactttttgattctggcgcaacgcattctttcatttcaaagaagtttgtagggatacatgggttaagaaaagaagagcttagtacaccaatgagggttcataccccgggaaatagttcaaccttggtcagttatagcccttcagtgctcatagaaatacaccgatcacgatttctagccaacctcatccttcttgaatccaaagatctagatgtcatccttgggatggattggatgaccaagttcaagggagttattgattgtgcgaatcgcacagtcaccttgactaatgagaagggagaaaccgtggtgtacaagtcaccagtctcacggaagcaaggaatctccttaaatcagattgaggtggaaaaccctgtagccatcgaggagaagagttcgcggaaattggaagatatctccatagtctgcgagtatccggaagtgttccccgaagacctcactaccatgccacccaagagagagattgaattccggattgatttggcaccggggaccgctccaatttacaagagaccgtacaggatggtagccaacgagctagcagaggtcaagaagcaggttgatgagcaactgcagaaagggtacattcgaccaagtacttcaccttggggtgctccggtcatttttgtgcagaagaaggacaagacgaagagaatgtgtgtcgattatcgcgcactcaatgaggtcacaatcaagaacaaatatcctttaccgcggattgatgatctgttcgaacagctgaaaggagccaaggtgttttccaaaatagacctgcgatcaggctaccaccagttgaggattcgggaagaggatatctccaagacagccttcactactcggtttgggttgtatgagtgcacggttatgtcttttggacttaccaacgcacctgcgttcttcatgaacctgatgaacaaagtgttcatggaatttctggataagtttgttgtggtattcatcgatgacatacttatttattcaaagtctgaagaagaacatgagcaacatctccgtctggtactcgaagagttgaaggagcaacagttatatgccaagttcagcaagtgtgacttttggttgtcggaagacaaatttctgggtcacgtcattacagctcagggcatagcagttgatccagcaaatgtggagtcagttaccaaatggaccccacctaagaccgtgtcacagattcggagttttcttggacttgcgggttattaccgtcggttcattgaaattttctccaggatcgcccgacccatgactcagttgcttaagaaagatgagaaatttaaatggacggccgagtgtgacaagagttttgaggagctcaagaagaaattggtgtctgctccagttctgattctgcccgatcagacgaaagacttccaagtctactgcgatgcgtcccgccacgggcttggatgtgttctaatgcaagagggcagagtggttgcttttgcctcgcggtagttgcgtccacacgaagggaactatccaacacatgatttggaattggcagcggtggttcatgctttgaaaatctcgaggcactatctgatcagcaaccgctgcgaagtatatacagatcacaagagtctgaaatatatcttcacccaaccagatttgaatctccgacaacgaagatggttggagctaatcaaagattatgacatgagcattcactaccatccgggtaaagccaatgtggtggcagatgcattaagcaggaagagctactgcaatgccctatgcaccgagggcatgtgtaaagaattgcagcaggagcttgaacgtctcaacatgggaatcgtagaacacgggttcgtagccgccctagaagcacggcctacgctcgtggatcaagtcagagcagctcaagtgaatgatcctgagatagctgaactaaaaaagaatatgagggtcagaaaagcccgggacatccttgaggatgaacatggcatgatctggatgggagaaagattgtgcgtgcccgatgataaagagctgaacgatctgatacttactgaggctcatcagactcaatattccattcatccgggtagtaccaagatgtatcaagatctcaaagaaaaattttggtgggccagcatgaaaagggagatagctgaattcgtcgcgctctgcgatgtttgtcagcgagttaaagcagaacatcagaggcccgcaggattgctacaacctcttcaaatcccggaatggaaatgggaagaaattggaatggatttcataacaggtctgcccaggacatcatctggtcacgattcaatctgggtagtcgtggaccgacttaccaaagttgctcatttcattccagtgcatactacttatacgggcaaaaggttggcatagctccatctctcgaggatcatgtgtctacatggagtacccaaaaagatagtatctgatcgagggagccaattcacttcaaagttctggcagaaattgcaagaggaattgggaacccggctgaatttcagcacagcctaccgtccgcagaccgatggtcagaccgagcgggtcaatcaaatattggaggacatgttaagggcttgtgcacttgattttggtggagcctgggacaaaatcttgccatatgtggagttctcttacaacaacagctatcaggccagtctacatatggcgccgttcaaagcgttgtacggttggaagtgttaacagaagcattgtacggcctctcttctgggatcaaacgggcgaacgtcaactgttcggaacagaagtgttaacggaagcagaagagaaagtcagaaccgtcagagagaggctaagaattgcccagtctcgacagaagagctacgcagacaaccttcgaagggagctcacttttgaagcaggggattacgtgtaccttcgtgttactccgctccggggagtacaccgttttcaaacgaaaggcaagttggcaccacgcttcgtgggaccatacagaatcttggaacgaagaggagaagttgcttatcagctagaacttccatccaatatgatcggtatccatgacgtgttccacgtgtcccagttaaagaagtgtctgagggtacccgaagaacaagccgattcagagcacatcaatatccaagaagatctgacgtatgtagagaagccagttcgtattcttgagaccagtgaaaggagaaccagaaacaaggtcactaggttctgcagggttcagtggagccaccattcagatgaagaagcaaccttggaaagggaagatgagttgaaggccgcccatccgcacctcttcaccagctcctccgaatctcggggccgagattccgtttaaggggggtaggtttgtcacaccctgaattctctccccaagcctaaattgaatttataaatcaccatgagaaaatatcggtgtcaaagcaagagaaaccctaataaattaatgcaaataataatcggaattgtcatgtgggatttttcttgagttctacacgttgaaatatgctaacaagatttttagtggaattttcagagctctagaaataattttaaccaattaaaattgagcacaagcaatatttaattccctggaaattcttttcctcctttttctttcttttttcctcctttttcttttcagcatgggccgccggcccattctctcttccccccttccttcccgctgggccggcccacaggccgaggcccagctaagccggccgccttcctcctctctcccggggtcgccgacaggtggggcccacctaacgggtccttccctaaccaccagccgccgccaccgcgcccgcaaccgccgccgcgtccacgccccgcctgctccgggccacgtcggccacgcctacgcatgcgcccgcgccttccgcacccactccccctctccctcacccgcgcccgtgctcgagacagccgggattcgattttagaatctcgcctttctctcctccccacctctcctaactccgctggcgaaatcgcggccaccccggccacgatcggcccttctgtgcctatataaagtacccccgttccctcct

SEQ ID NO: 4615 - DNA, 8172 bp, Oryza sativa
ccggcgaactttgcgggactaaatccggacgaatccgagggagagagagaggggaaagtggggggaaagagggagggaatcacggggagtgatttccccctctttatggcgcgcggggacggcgggatgcggcggattcggcggcggcggcggcgctagggcacgggcgggcggcgggcgcggcgcgaggtatgcgatgacaggtgggccccacccgtcagcgagggtggcgggcgggcccgcctgtcagcggcgcgcgcgcggggaggaggccgatgggccgcggggagaggagagagagggagggaattgggccgagccggcccaagagggaaaaggggggggggaaagaagacttttagggactttctttttataaaacctttttaactttgtttatttcttctcaattattatttgtgctctgaaaattccactaaaatttatttacgcattttaggcttttaggaaatatacaaaaatcctccaagccttatttgacttttaaatttgcacattttaattgttggaggctttcacatgaattttaattattctcggcacaatttcgaggatgtattttagagtcgatttgggacgcgacaaacctacccccccttaaacggaatctcgaccccgagattcggaagaactggcgaggagatcgggatgggctgccttcagctcgtcttcacgctcccaggtagcttcttcttcggcatggttgctccactggagcttgcaaaaacggattacccggttcctggtcctgcgctccatggtgtccaggattttcactggcctctccacgtaggtcaaatcttcgcgaacttcaatctgctctgagtcggcctgctcggatggcactcgaaggcatttattgagttgcgacacatggaacacatcatgcacgttgcccaaggaggcgggcagctccaactggtaagcgacttctccgcgtcgagcaacgatacggaaaggacccacataccgaggtgcgagcttcccttttgtctgaaacctgtgtacacctcgcaatggcgtgacccgaaggtacacaaaatcacccactgcgaattccaggtcacggcgacgattatctgcataacttttctgccgggactgtgccacctttagattatcccgaatgattctgactttagcttcagcttctctcaggatatcagtcccgaacacttggctttctccaacttggtcccacaatagcggtgtccggcatttgcgcccgtacaacgcttcataaggtgccaattgtatgctggcttgatagctgttattgtaggagaactcggcataggggagactcttatcccaggtcttcccgaaatctagtacacatgcgcggagcatatcttctaggatctgatttagacgctcggtctgtccatctttctgcgggtgataggcggtgctgaaattcaatcgagtacccagctcttcttggagcttcttccaaaagtgagaggtgaattggcttcccctatcagatacgattttcttgggaacgccatggagactcacgatcctagcgaagtagagctcggctagtttgttccctccataggtggtctttacgggaatgaaccgtgctaccttggttaatcgatccacaactacccatatagaatcatatccaccttgggtttttggaagtccggtgatgaaatccatcccaatttcatcccatttccattctggtacttggagaggttggagaagtccggccggtcgttggtgctctgccttgacacgctggcacacatcacatagggccacaaactctgcaatttcccgcttcatgctaacccaccagtatttctccttcaagtctaggtacatctttgtactgcccgggtgaatggaataagggctctcgtgagcttcctgaagtatcagctgtttaagttctctgttatctggaacgcatacccgctttccgttccatagggttctgtgttcatcctctgtaaaaccagcggctttaccctgtttcatattcttgaggagtccatgcatgtccggatcattcttctgagcctcgcggatttgatcgagcaaggtaggcttggcttctaacgcagccaagaatccgcgactaactatgcttaggttcagggcttccatctgttgactaagttcgggtggaatgccacggacgttaagagtgttgcaatggctctttcgacttagagcgtcggcaaccacgttggccttaccaggatgatagtgaattcccacatcatagtctttgatgagttctaaccatctcctttgccgaagattcagatccgactgggtgaagatgtatttcaaactcctatggtcggtatatatttcacagcgattcccaatgagatagtgccgccagatttttagagcatgaaccaccgcggctaactccaagtcatgtgtagggtagttgccttcatgaggtcgtagctgacgtgaggcataggctactacatgaccgtcctgcatgagcacgcaccccaatccttggcgcgaagcgtcacaatacaccatgaagtccttgcgagtatccggcaagattaacaccggcgaggaaaccagcttttccttgagagtttgaaacgccttctcgcattgcgggctccacacaaatttctcttctttcttcaacaactgtgtcatgggtcgagcgattttggagaagttctcgatgaaccttcggtagtatcctgccaaacctaagaaactgcggacttgagtgactgtcttgggttgcttccaatcagtgacggcggtcactgtttcggggtccacagcaatttgacttcggacaaccagaactcacacttgctaagcttggcatacaattgatgttcccgcaactttcccaacaccagacggagatggtgctgatggtcttcctcggattgtgagtatatcagaatgtcatcaatgaacaccacaacaaacttatccaagtattccatgaacactttgttcattaagttcatgaagaatgcaagagcattggttaaaccgaatgacatcaccgtgaattcatacagtccgtatcgcgtggtgaatgcggtcttcggaatatcttcttcacgaatacgtaattggtgatatccggaacgaagatcaatcttggagaatacagtggcacctttaagctgatcgaatagatcatcgatccggggaagagggtacttgtttttgatggtgacttcattgagagctctgtaatcgacgcacatcctcttcgtcttgtctttcttctctacaaaaatcacaggagcaccccatggggaagtactcggacgtatgtaccccttttctttcaactcttccaactgtttctttacttcggccagttcatttgctgccatacggtagggtcgcttgtgcagaggagtggttcctggagcaagatctatccggaactcaatctctcgcttgggcggcataccgggtagttcttccggaaacacatctccgaactccctgacgatggggatttctgacagtcctatctgatgcaattctgaactcttgatagaggttgggggtgcaaagaaaacaaccggttgttccggccctcggtacagagtaacagtgcgtctcgcgcaatccactactccttggaattgagccaaccaattcatcccaaggatcacatccaagttcttggtgtctagcagaatcagatccgagggaaaaggaatcccctgaatttctatagggacggcagggctataatactttgctgtcataacccctccaggggtggtgatgagcagagggttcctaagcctttctacccccaactgatttctccccacgaatggcacagatataaacgagtgggaagctccagagtcgaacaaaatggtagcagggatggaatgaacgaggaacgtaccaacgatgacgtctggagttgtcagcacgtcctcggccgtcacgtgattcacacgaccccgaatgacatccttcccgccgttgttggagcggggaggcgcttggccttgctgacgccttggctttgggcatttatccgcaaagtgcccgggctcgaagcagttgaagcacagacgctgctgaccttgagcgtccctgcggccttgaccaggctgcaccgttggcgtaggaggacggggcgcacgagtcccttgttgattctgctgttgctgcggctgtgggaagcgcaccacgaattgaggtcggggcgcggggcgaggttgctgctgctgttgttgctgctgcgaggaggatccccctggatagggattggtgtagcggcccctttgattagcaccctgttgattgcggaaattcgccaagcggcgcttgtgcgactccagctccttgtgcttggcttccaagcggatgctcttgtccaccaatcgttgaaaatccggatagtccccagagactagacggacggacagttcagggtccattcctgccaagaacttttcttgcttctcctcatcttcccgcacatcctccggggcgtaacgggctaggttgttgaactcatgcaaatactccatcacggagcggttgccttgcttcaactctcggaattcccttttcttaagggccacgactccggcgggcacatgggttctccggaaagcggcggtgaagcgggcccaagtaataggctgcccctctggctgcgtagcctggaaatggtcccaccatagagatgcgggcccctgcagttggtgggcggcgaagataactttctcctcatcgctgcactgcaccgtgtctagctttttccccacggcatgaaaccaatccaacgcatccacggggttgttggagctagagaaggtaggtgggcggatacggaggaactcggcgagtttagagtgttgtgggggtggtggtggagcattatgttgtggtggattttggaggtggtggaggaaagcagtcatcatgttggcttgctgggcgaggatttgggtgagaatggcgttggtgtctggtggtggtggtggaggcggaggaggaggtggaggtgggttgccctgatggttgtggttgctgccttcgggttggttgccatcaccggtggcagcatttctcctggtcgtcaccatctgaaaaccccacacagaaccagcaaacagagaaagagctaacaattaaaactaaccacccacgactaccataattcttgaatttattactgctattaaattggttcattaatgttcaagttgcttaggcaaataaaataagacaggctccgacacagttatgccacacaccggcataaccatgccccacacgactcaaaaagacaaacgagaaaaaaaaacacacgcgcaagcctactaactgctcgtctactgctgcgacgggccaggacggaaggtgagcaacagcgcaccctccgtgctaccaatgccggaggcttccccctcctggggaaccacgggcgcgggctcggcacgaggggtctcgacgaagcaagtccacgccagggactgacgaacaagctcgggcctggaggtgctcttgcgggcggtgatcttctggctgcggcagacgcggcgacgcttggggcggcagacctctccctgggcgatcttgagctgatgcagctgcgcctccaccgcgtctaggtccttcttgagctgcaggttctcctgacgcagctccaggatcttcagattgttctcgaccatcccgcgacgcaccatctgatggaagtcgatacgagccgcgtcgtacacctccaccatgcgcgccaggtgcacgatggtagcgtcatcctccgagctagcatcccggaaggtggcgtagtcgtgggctcctccgcgacgagggtggtagcggtagggcgagtgctgcaactcgtccgggtagcgctggtgaagagtgccgatggcgaggagagcggcgttctggcaagcggcggggaaggaatctccacccgcggtaactgccagcgaagtccgctcgggagagccagagaggatcactgcggtgacctcccaaccagcgtggggctccgcgtcgtcaccctcctgatccggaagcggcctggcctggtagtccactccatgtggataccccagggccacgcacatgccccgcagctccaagacgaagccagtcatgtccaaaccacgacgggtgacgctgccggccatctacaaacaaaaacaaaaagaaaacaacattttaaaggtcagattttggcgataaatgaagcagcaagacagagagagactagacagtttttacaaataacaaaggatttttatttttgaaaatattgctaaggcttgggatctacggctcgtcctagggtcaagggtagctctgatgccaacttgtcacgaccggaaataacccaacgggcgtccctgacgtgcgtgcattaatccttgtcccaggaggcaaggtacaccaaaacttgatacaattcagagtttaacaagcggaagcgtaaatagttaacttattacatgggcagcgaaggcccagcacacacaaagacaaacgggaaacagcggaagactagggcgacgaccacaggcgcttgacggcaggcacgagctagacaccaaagccttcatcttcaaggagctcctcttctgggcttgggaaaaaattgagcaagactgagtacaaccaccgtactcaacaagacacacccacaaatgcagaataaatgcaagggagtacaagggaattataatataaagggttagagttgcagtaaacagcatttaaagacatttagttgctcaaagctattttgtaaacacgatcctagaactatacaatgttattaatcaaggccgtgaacccacacgaacctgccttaacccaaggcctatgatgattcagaccgatctggcaacccgaccctgggtcccagctcgtcccaagccaacccaggccaaccattccacgttttagttgttaagcaggttttaagaattaaaacactaacttgggtacattgctcggcttgcccataaccgagggcgcggctattcgaatagattatactctgatcagaggtgtacatctttacccacaagacacatcttcctcacgtgcaaccacgtgccacataccaccacggtatacggacggaagacgtgacatagtttccaacccatcctagccatagacaagagtaccgacccaatcccgcctacggccggaacctccgggacaggcaggcaggactgagccccaagcagcagggcaccaaccctctgccacgacatctcgactaccgggccgcagctcgtgtagccttcatttgccctggagaatgtccatcgacccccgacttcatccatccccaatccgtgtacttttgtttataaccagactgagccacaaactaagccttacccactagacatgtggaagtacggtagtgctttgcaacagagacccgaagaccggtccttatatggccgaggtgctactatcaaaaccatgcaccccgagcccagcctaaaaccattttggggattttgaatagaaggagcggtgtgaagccaattccacaagaaccaaaccattctaaagtatccaggtgatatgaatatttcccaaagtctatagttgaaaaaccacctaatgttacctaattaaattgcgaagcatctacctaaaattaaactagtggtaccatgagtagaatgtccactagttgaggttttgtttaatctagggtgaacaaggtaataataataacaataacaataataatatggtcataacaaaggtaaataggcatggctaaataaaacagtgataacgcgggaatttaaataaagcgataatgcaataatttaaatcaacataattttataaactgggattcaatatgctcaaagatgatgtgacttgctttgctcgctttcccaaacgtcggcttcaacttccacgaagagcggatcttccgaagctgcagcgtctacacgaccaacggaaaagaaaaggcttttactctaataaactccacataacagccgaaacaaagcacaaaaatgggttcttgacttcttaaggaaaaattaaagacttgaacggtccaattccgagttcaaatggccaagttatggccatttgaagtttatatgctctttaaatggagatttgcgaatttcttcatttaaattttaatta

SEQ ID NO: 4616 - DNA, 4766 bp, Oryza sativa
tataaacctttttaactttgtttatttcttctcaattattatttgtgctctgaaaattccactaaaatttgagggctcctttttgaccaaggggaatttgacaaaaattctccgggccacatttgaatttttcttgtacgtattttagtgtttgccaatttcttttcgaattttaattaattctattattccttttagagaatgatttttaattcgggatgaatttatcaggacgtgacaaatccaccccccttacaagaatctcgtccccgagattcgaggaggctagcaagaagataggttgggcggtcttctcttcttgtctgacttcttccgctccgtcttctataacaaacttgcctagcacaacttctccactctggactgcttggctcgatctcctgttgcagatggaatcttctcttcacctgacttgtccctggttgaacctttagctgacttcgactgggttgcggcacttgaagatggggcttcagttccagaactttgcatagttcatatctttggagtcaacctcatacaagttacccacttcatgtcatgcgtcgagatcagctcgtcattactaagataccatgcttgtcatttgcttctaactcgccaccaactgcctcatattagctttcctggtctccgggtgatagctacttctgctattcgattcgagggtcgataactttgcctttgaattatgcttcccaagagaaccaacttatcccacttgatatactttgacgtcttcccaaatagttttactgttagacttcttattgtctgatcgttatccggccaaattttgaagcttcgtggttagatgtgattttactctgacgtctgtagactatctgcgaacatatcacttggttcataactgggaatagctcccacgaacaagcaactcagattcactttctttatgttcagtttactttccgctattctcttcatgttgttatcatttagcattcaacgtattcctgtgcaccttcagccttgatgtgttctttcccattggatcatctcccaagacttggcatcacctggcaaccggtgcttgcacttttcactccgtgtagcatctgataccgagttgaagatttcactcctcgtcttcatagaaacacttttacctaggtcatcttgcttacttaatgacaaggtgtctgttgtggggggggcaattactatcaggggtcttccttgagcgatgcagagcatgtttctgtttatcaatcacctttcggcctacttctttgatgctagagaacatctttgccaatctcttttatcaatcatctttcggcttatctctaacaggtggtattctttaatgtggattgcggacgcttctggggacgatgaggtcctttggcttgctgcctttcagtgaaaccttggtggggttcgtcaaaaactatactgactgtctttgcctttgatccgaaaaagacacatctgaaactcttagtccaaacaaatgtctctttggttgatcacttgattttcttttccatcatcaggttgggtattaactcgaggttagaacatagttcctctgaaatgagaccctaggtctcctttgacagtaaccaattatacacataatcccatatcagcatcttccaaaagaacccccatagaacttgtctgtattacacatttctctccttattacatgaatacaaggcactgctttaaacaaaaagggaaggtgcttaacatcggtacattgtttctgctatggattctgattaacacaaggcctcacgggtacggcgtttgctccagtgaccacaaggcgagtgacctgtcttcttcttgcataatggccggagtgatggcgcaggttacgcttcggctgtggacaatctctagagaaatgacctggttctttgcagttgtaacaaatcaacgtcttctttgctgagctgtccatctggggatgatcattgtgacttggagttggaattggtggttggaaatccttgctaacattggcatcagtggtaccatagttgctatcaccattggagtctttctcagcgtcaaaattgctaaggttgtcattctgggttccaacattgatactatcgttgacatcttggtgaatgctactgacattgcacgctttgttcgagtggtcactaatggggcaagaaccatggttgttggtggtatcatcatcattagtattgctagtgttgttgtctgcattgcgttcatcttcttggggcaggaactcttgatgcacaacagaagatccggtgatctgaagtggctcagtgcgctgtctttggttaccacctggaattactgggatgttgacaatccttctcttgcagttcgtcatccgattatgctcactttcaagttgcatggctttgtccacaagtttctcaaaatcttcataatcctctaggagtagttgcactgcgagctcatcttttaacccctggagaaacttctcttgttggtcttcatcattttccacatcttctggtgcatagtgagccaaacgatagaactcatgcaggtactctgtgacggtcaaatctccttgcttcaggtagcgaaactctcgttttcttagtgtgatcattcctgcgggaacatgtgatctcttgaatacagatgaaaactcgttccaggtgatggtatgtccttctggccgtgatgcttcgtagctatcccaccactctgaagccggtccaaccagctgatgagttgcgaagccaacccgctcctggtcggtgcactgaatcaaccctagcttcttctcgattgtgcgcaaccaatcactggcttccataggatcgacggcaatggcaaaggttggaggctcagttttgagaaattctgataacttgcactgttgctggactgtaggcacttgaacgttggttgcccctgctgggttgttccaattctgtaatagttgaaaggctgttgccaacatgttggtttggttaaccacaacttggattagctctggtgaggtttcgttgatgcttctctcattcccattggcttgggttcttgagtcatcggatccatcattcccatagcctttgttaccagtattatccatctgtcacaaggtagaggttgagaggggaagcatacaaggaaagaatagaccagaactagggacaagaccttaaaggaactaactcttcttattgatgtgttgtttgtttcacttattctgcaagttgattaagcaaacaacctagcatggttacatcacaacccactgatgcaaaccacgcgctacacacacaagcaaggaaacacacgacgaacgaaacactagagggtggcttaggttctgcgacgggttctccaagatcttcactcttgcttcacatctggcttcactgcttcctttgcttcgctagcggatcctgcagtcttccggggcttcggcaaacaactgacgatgtcttcttcttcactgacctgaccatctagtactagttgaaatccgaagaaggaagaaggcagtaaaccttttgcaaatagcattaggggaaggagaaaaaggaactttcgcaaatagttttatttataaaatatgtccttaggttttatccatttggcttatcctacagtcgagatggctctgataccatcttgtcgcgaccgggaaaattgccttttcccgaacgctagtgtattaatccccgtcccaggaaaagccggggtacaccacacaaacatgatataaaagacacatctttattataccgataatatttacattattacaaaggcgcttcaggcctgacaatcaaaaataaacagcagcggactagcgggcctacggctccatcttcacaggcgctcaactggggtataagccaagactccacctaagacttcttctccaaagcttctcttactgaagggggaaaagattgagcaagaatgagtacaaccacagtactcagcaagccacaccggagatgcataattaatgcaagggagtacaaggggataataatataggggttaagttttgcagtaacagcctttaaaagtcacttagttgcccaaagccattttataaagacgatcctagagctacacagtattattaaacaaggccgtgaaccctcacgaacctgccttaacccaaggcctacgatgattcagaccgaactggcaacccgaccctgggtcccagctcgtcccaagccaacccaggccaaccattgcacattttagttgtggagcaaattttaagaattagaacactgacttgggtacattgctcggcttgcccataaccgagggcgcggctattcgaatagattatactctgatcagaggtgtacatctttacccacaagacacatcttcctcgcgtgcaaccacgtgccacataccaccacggtatacggacggaagacgtgacatagttcccaacccatcctagccataaacaagagtaccgacccaatcctcctacggccgggacacccgggacaggcaggcaggactgagccccctagcagcagggcaccaaccctctgccatgacatctcgactaccgggccgcagctcgtgtagccttcatttgccctggagaatgtccatcgacccccgacttcatccatctccaatccgtgtacttttgtttatgaccagactgagccacaaactaagccttacccactagacatgtggaagtacggtagtgctttgcaacagaagcccgagcttaattcttatagtggacgggg

SEQ ID NO: 4617 - DNA, 9297 bp, Oryza sativa
atctgtgaagcatttttgtgtgagatgtgaatctgtgatgaatttttataaccctgtgatgtaatttttttaagagtttgtgatgtatttagagatgatttgtttgaggatttgaggatttggagatgttctgtgatatgtgatgatttggatatgggaggggatggtgtgaaatcaatattcaatattaaaaatagaacaaaaaagaaaaaatatctaccgggactaaagatgcccatctttaatccaccaaccgggactaaatatcgatttttagtcccggttattttgaaccgggactaaagatagcgatctttagtcccggattcgtagtcccggttggaaaaccgggactacaggggggttacgaaccgggactaaaaagcacttctccaccagtgtttgatgcgactaattagcccaatttccatgcatagtcatgtacagactgctgagctaagttataataattgtaaaccatatatatgagttattgtggttcaagatacatatatagatctacctgggtgttaacatgtggcatataaccaacataaaatagttatgcagttgcagaaaatcatgcaaatagcagattttagataatccaatttgcaattgtagtaaaataagaaaaatataacttagattgttgctactcacatactgtagatcaaacaacttgtaaatttgaaatctatttcagaactaataagaatagtggacattgtgattttgtgaacttttagtcatgatcgacgtacagggtaatttgtcacatgccaattaagatgaatgtgcttttgtgtaacttgggttacactccagtgttttatgaaatttattctaatacatttatccttgtgacatcatttatgtaattccttttttaaagaagtaaagattattcttgtactattattcttgtacagagggttcttacgaagtaaactattataagcacgccacatagcggcccacattttaatgccaatgagctattttttccatttgcatgtttacgaatactctggcaattttttttctgaaaaggtcgatgtgttaacaaaaacatttgatcaatccttacccccaagtgcataatgtataacattctgtccatggaacatgggacctataacgacataactaaacaaaaattcgcactgaaaacacatacccctgccaatctttccactgctcgagtattcatccagttgtataaaagggaagcaagaaaggtctgacaatgaggatggaacaaagattaattgaggtgttgtgcaagcattagagcactggcaattttttttttacttttttagtgtgtgcatgtgtagctggtgtagatgcgatacttatcttgagaaggttggagtaccatgagaatgagaggtattcagatgagaatgagaagtgagaggcactgaccactggatgtgttactaatcgataaagcttgcatgtagaagagtttctgtgtcaacgtgctttaattttgggagaactcctttgctatatatataattgtattaagcacacatgttctgcctccatggttaattcataatttccacacaaaactattgataaaatagtgggttcatatgtttattagggttaaaggtttagcctatgcctggtgataatcaactttttgttcagatttatgtggatgatatcatctttggttgttcgacccacgctttggttgtagattttgctgagactatacgcagggaatttgagatgagcatgatgggtgagttatcgtactttttgggattgcaaattaagcaaacacctcaaggtacttttgtgcatcaaacgaagtatacgaaggatcttttgagacggttcaagatggagaattgcaagccaatttcaacaccaattggttctacagctgttttggatcctgatgaagatggtgaagctgttgaccaaaaggaatatagaagtatgattggatctttgttgtatctaactgcttctaggccaaacatacaatttgctgtgtgtttgtgtgcacgctttcaagcttctcctcgtgcttcacatcgtcaagcggccaagcgaataatgaggtatttgaatcatacattgagtttggaatttggtattctacttcatcttctatatgcttaagtggatattccgatgctgattttggtggttgtagaatcgataggaaaagtactagtggaacatgtcatttttatggtacatcattgattgcatggtcttctaggaaacaatcttgtgttgctcaattaactgctgaatctgaatatgttgttgctgctagttattattcacagattctttggcttttatctactttgaaagattatggtcttacttttgataaagtacctctcttttgtgataatactagtgctattaatattgctaagaatcatgttcaacactcacgcacaaagcacattgatattcgttttcactttttgagggatcatgttgagaagggagatgttgaattgcagtttttggacacaaagttgcaaattgctgatattttcactaaacctttggattctaatcgatttgcttttcttcgtggtgaattgggaataattcattcttttggcatggtttgagggggagtttgtacctcatagttttatcaagcaataatatgacaatgagaaaaattgataaacgagagctttgttctatacatatggtattttcttgtgcatgctagcaatacttcgaaggtttatttgtctctagcatagcttgtatgtattatagtcttttcatgagatttagatttttgcttttaagggagatgatgcatgacacttaaattttatacttgaattaagcaaatatgcaatgttgatgctagcatatggtttgatttgtaaatgctctatatatatgctttattgacttgttattcctcaaatagctttaattgctcattgtgaaaagagaataaaaaatataaaaaaatgaataccgaatccttgaaaacagtcttgacgacaaggatgtattctatgtgagcaaaataatgggtgccgaatctctggaaacagtcttgacaacagggatgtacccggaatacaagagaaaaatatgagcaaaaaagctcaagaaaaaaaaagttcaaaaaatactcttggttattttgtgctaaaggttatttgagaaagagtgataaatgcaataggtatatgtgtttagtgtttatttttcaacctatgtgcttgttaagatgttgcattataaatcgtatgaaatcatgaattttgattgttgatccaagcttaattgtaaaatatttggttcatggttatactttaatgcatgtttgttatgttctagatgggttcatctcctttttattgcaaatcatgacttgatatgctatatgtatgctaagctcttgaacataattcctatgcttgatgaaatcattgtcaaaagggggagaagagatgaatttttgtgaagcaaggtgaaaatttttgagaagagatgagttttggagttgttgagaagagcatgttgtttttggttcaattgggaatttctttctttcaaaaagggggagaagttttcttttggatttttgagcacgatgtgtacatttgtacgaagtgtgctttttaccatttttgttttttattttttccaaacaccaaaacattttttatgggtttgccaatgtgttcatcaaggggcagattgtaaaatcaaaggtgtttttgattattattctgtgatgaacaattgggcattggagattattagttttgatatttggaatttattcacgaagtgattttggagatgattggatttcacaggtgattgcaggattcgtcattttatgtgaccggtcagactgggctctggtagccggtcagaccggcatgtattgcacggtctgaccggccgacgctgtgttggttgtttgtttggatatccgtgattatttcataattatggcttctagatgtatattatacgtatgtaatactgttgtttgctactaatgagtcaagttggagatagcttggtctcagaatatggtttctttgtttatttcatgtgtaggtgactcgatgcctcgggagagtatttgcggtgatggaccgggagtcggcttggggataagacgacgtccgtggtggtcagagatcatgcgggatacttaggctagagttgatgcacatggttgatggagattccatatggcatacgatggaggtattatatgcgtatgggatgcggagtcgaatttggaaggagtccaaatttgatacgattggttatgtaaagtttctttcttatactagagggtttcctaaggtgtttaggactcttagtatgagtttgattcgtggctttaggctgcctacctcggatataaatagagggggagcgtgaggcttcctggtatcgcttttgagagcaattgagttgagttttgagttagggtttcgagtttagtcgaaatttttgtaaggagtgctgttggtgcactttgtaaacacagagttaatcaataaagtcgtcatccactttaagagttcttcgatttgagttcaccgggtttcagcggtctaaccggcaatataccagcggtcagaccggtggcatacgggcggtccgaccggcggcggcgataggcgtggcaggcatctcggcggttcgaccgatcgatctatatcggtcagaccgacagcatccacttggtcagaccggcagatcaatctcggtcagaccgacttccgtcgaatttgagggtaacttttatttccgctaaaagtttttggtttttgggtataccaaccattcacccccctctgattggcttagttcttgtgtttccatcctacagttaaaaaaatatgacgtttgactttctttattaacttttaaaacatttactatcaaaactagtcaaagcattaaccaatttccattgcgttacgcgcagacagttgagctttcaaaactagtcaaaacatttggtgagtgacccaattttcccattttgatttctttggattatgccaaattcttttttccaagatgaacaaaattttcattagtgtcatgaccggaagaagaaataaggctgctcatttgatttgataatggataaaatccaacatttgcataaaaagatactatagtcatttcttatatcggtttttttaggaaaatccaaagatatgagaagacaaatttaaccaaccagatacatcttattcagatgctgacgtgcctgtaaaaatgctcattcacattcagtccaaccaataaacctgacaaatttaatgaagaataacttcacactgaaaacacacacccatcaaacttcatactaataacaattcatcctcgtctataaaaggatatgaaagaaacatcagacgatgaggatggaacaagataaatcgaggaactgtgcaagcatcacaatatttttgtgtgcatatatagttggagcacatgccagaattatcttaagaaaactggagtgtcatgagaatgagaggtattcagtaaacacatgagaatccaaaaatgtattactgttcaagtatgcttgcaagttcagggttatctgactattctcgtactgattcggcaaacacttgtccaagccagttgtaagtgttcacaactttgtgtgacaagttgacaagcacgatcgcagcacctaaacgctttacggtgatatagagttgccaaccacctcgatctagccaaaaggccaaatcaagatgggttttgtagaaaattagctaaaccgcctagtggagccgatttagagatcaaatatgaagataactacctgtctcgtgggcaaaacggaaggttttcaggacaaacctacaaagaggtgtcgcactctcgcagcggtggcagacagtttacggcgcaaactgacaaagatggactaaaactagggtaaaatagaaaatatagtaaaagaacgattcaagtaaattgtattcgggggattacaatgaaccggccttgtcccttaaataagggttggtcttgccctctacagacccttatccatgtctaactcaggatataaaccaaagtaaacacgaaacatagccttcccgagcaaggaaacccgcgacccgatgaaaacagactcggactcgaccctgacggtcagaccgcccacatacctgaggtcagaccggccctactagccggtcagaccgcccacgtacctgcggtctgaccggtcctgtgaaggaaacctgacactttcaaaactttggcaatttttccctatttcgttcataggtactaaatttgggtgtaaccagtaagaccgataccaaatttagttatcttgtagtattgatgctaactgaattatttttattacgtgtgccatcatatcttcatccaacggcaagggcgaaggaaaaagccagcaaaaacaagcctcgtaggcctcggttgattataaaccgtaacggcgtatcaacgacagacaaaataaattttatgaatagaacttttatatatgtgttaataacttaaaagtccgtgtaaaaaagaagtacattgaaagtaccttgaaatcaacttcaaaataaaattctaaattaaaaatttggcaatggctgtctttttttttgcaaacaacgatggccgtaaaagactgctaatgggtttgttgtatgtttggtttgcttgttaacttgggtccggcttgttgtgcgcgtttcggccttttgggccacctggcatttgtattttggtcttatcttgtggaccacttgtgatgacgtctcaaaggcatttgttttgctaaggcgtgtaagttgggtcggattttgatcattattgtgggccgttttttctcttttgtactaaaatggattgaaatttatggacatcttgtatgggccatctgcactcatgtaatctgcattgtaatgagacaaaacataagggatagccatggacgagatctggggacggcaattttgaccatgagtgtaggtatccgcgggtgcccgacccgatgggcactggtatgggagtaatattttgctcacctgagaatgtagcaggcaacaaccgtgtattttttatccaccagtaacccatgcttgacctggtacctatgcattagctaaatttggtccatctcttaaatctcatatcccatcctcttggcctatttggcccattaaccaatgacatatatatactcaacagagaaaatttgaaaatatcaactaatagaaaccctaacctaattcccaacacccctctcctaccccaatccccacaccgacggcggtggtatgggcgggcaatggagacaggtagggagtggctacacatgatgtcggcgtgggtacgcaagaacggcggtggctcgtgtaggtgacgtaggaagcgacgatgcaggatggcatcgttggccatcagcagttgtggcttagcacgacgtagacgacagcggctcaaggtgacgacggtgatgacagttcagacaggcaacgacaggcaatagtgacggcggccaaggacaataggcggcgacgcagactactctttgagtgacggtgctaggtccttacccggtatccactgggcatgcgtgtgcccgctaggtatgtgcataggcacgaagttttgcctactaacccaattgcatattaccgggccttgggtcgagcatggttttgctctgcccatgcccaacccggcctgtgatcatccctagggagatccaataaaatcacaatgctagcacacgtgtaacttcttgatagtgatagtatagttcaaatgacaaagagatctgtactcaatttatagtactgataataaaaaacagtagtagtcttgaaggttgcacatatttaagttgaagttgcatatatccaattttaactaaatttaaaattgcacttagtagcggcctccctgcacgctacccacagtgaaaaaaaaggaaattggggagaggaagcagcgggttaactgagcgccattagcctgttgcccaaatgtgcacgtcacataggtggtgtttggatcagggacttaactttagtctttatatttatatactaatttaaagtattaaatatagactacttacaaaactaattacataaatgaaagctaattcatgagacaaatttttaaaacctaattaatccataattagaaaatgtttactctagcatcacataggctaatcatagattaattaggctcaatagattcatctcgcgaattagttcaagattatggatgggttttattaatagtctacttttaatatttataattggtgtccaaaactccgatgtgatagggacttaaaagttttagtctcatctaaacagggtcatagcctgataatacgcacgtaacttgcacaagatctactgggaaaaaagaatcgactgatcggaaatgctactgggcgagggcgatcgatccccccctcctccccctccctccctccacctggtttccttttttggcaccgtattactttcctattttagtaaatttatgcacctaaagtttttacacctcaagtttacacatctaaagtttagagaccaaaagtctataagtcaaaagtttatatatccgattcaaatttgaatttgaattcaaatattttttatatatagtatttctgtacatctaaagtttatacacctaaagtttatatactcgattcaaatttgaatttgaattcaaatattttctacatatagtatttctatacatctaaattttatacacctaaagtttatagatccaaagtttataagtcaaaagtttatatacccgattcaaatttaaatttgaatttgaattttttatacataaatttttctaactttttttttaattctttttgtgtactgtaataggaagagaaggggaggaggaatgggagaggggggggggggcagatccgatcgctgggcgacgcccagtaggcccccctcgtctgatagcttaaaatgtttcgaaaatagcaaagctgttcatgttatcgaaaatttccgttttttaaaatttaaattgaggacacgggcacaaaaacgtcccacgcaaccaatcaaccaatttcccgcgcgctgtcacgctcacacagttgagctcccgcgccgagtcccgccacccaaccgcggccctcccgctgtttcccgccaaatttggcacgccgccgctgttgcctctccctctccgtttctcttccatttcctctccatttttagcttcccccgatcgtct

SEQ ID NO: 4618 - DNA, 20568 bp, Oryza sativa
tgacttatgctttttatttttttaaaaaaaataaataagacgaacgattaaagttatatgtggaaactaatggttacgtttattttggtacagagggagtacttatattcagccaaacattcgggctcacggtaattacttttcagtatactcgtcatcatctaaagctttttggatgtacttggtgaatctttgaatgaaagatgtactgttcaagcgacatgatagtatatatgcatactagatgaaatcccttacgctgttgcgaaatttactatgataaaaatgagtaaaaaaaaaagtgtgagatagtttaaacaacataatcttaaataaacataagtttacgtaagttaatgtgaattaaatttaaatagtatatagaatgatgatccaaatataaaagtaagatgatgttactttatgaggaaacaaaagaagataatttagaccatacatctaagtgctaaaaaaattgagataatataactcaatgagagaagaaaagaaaagagataatttgaaccataaattaatcatctaaggactaaaaataattgatgtgctatgacttaatgagaaaagaaaaatatcataaactaaataaggatgaactatataggtatataggatattatagaaaaataatggagagaaatactgaaacattatgcgaattatgtaagatgatttgacaagtttacattttaaatctctaaaactattagattaataaattataataatatagcatgcatgttgcatgatgtttaaatgttgttatccttagtatgtagtaataatatcttgggggtttgcaatgaaaactcggtatatcgactataattattataattattagttgatgatgatatgatatgtttgcatgttaaattttaggaattagtgatctataaaataattttatagtaagagatgatttatttatacccaatctacaactggagtaactgggacgatagaccaattccctgcttcctctttctcaagccgacgaaggatatcccctgtggttggcctcttatctggtttacccgctatgcatgtctctgatatctcaatgcacgcttctattatttgccggtaacgcatttcgattggcgtctgcctcatctttgatgaatcctgttccaacctatgcctccagatttctagtacctgacaagcaattcaatttcattagcaaaaagttacacacgtagtagtattaactcaaacaatctaaaatgtagtactgattattaattatttcttcttgaatatacattttctgtcgttgttccttcattattaggacccatcaccatctctctgattatcaaacccaagctgtatatatctgacttgactgtgatatctccattaactaagtattcgggtgccatgtatctcctgcatcaatggacacctgtaatctcaggtccaaggaaagcggatccacgggaaaactcatttgcaaagatatatgaaactctctctctctctctctctctctctctctctctctatatatatatatatatatatatatatatatatatatatatatatgggactacatagtgcccggactccaaggtatatgaaacacacaaattctcttaaattttttaaaattttcaaattgtgagtatatacctagatataagaatttgattcatacctatacctatcaacgaaaacaactcaaactcaactttatattcacaattcattattacatacctaactaataatatgtttggatgttatatacctagaactaaaatctaacaaaaattgttcaaactcagttcaaacttgtttgaacttgttagtaaggaagttaatattcatacctaaacatataaaaaaaattcaaactcatttaaattaggtatatattcaatttgaattttagagcccgtgcaccgtgcaccatggagcctgagttaattttactctctctatatatatatgtgtatatatatacatatgtatacatgtatacgtatatacgtatgtatatatatacgtgtatacatatacatgtatacatatgtatataaacacacatatatatatatacacacacacatacttgactaaccttgttccaaaaattctctcagtgaccatgcggcttttttcttcactcaagagccttgacaaaccaaaatccgcaattttaggcaccatactgtcatcgagcagtacgttatctggtttgagatctagatgaattatcttcctctcatgcagatagtgcaaacccaggcaaatacctttgattatttggtaacaaatctgccattgaagcacacaagatccggctgtacgacaaataaatagtacatcatagccttgtagtataaattgcaaaattattcataatgccttttattttggcacaccattgccatgcacttcgaatatatgaccattacaatatatagtggtggctggccatgtagataccataattttgcccgcaactcaaatttggagttaattatatttgcacaattttaggtcaacaaacctcttattactatgttgtatttaccgatacactagtggttttctattactttttccacaatgtaaatatttttactcagaatgaacatcataaatggagcaaatggatcacatatagttataccagtatcaagatgactgcgaaggcttccattacgtagatactcgaagcaaagcaacttttctttcgaatccacaaacatattttcccttccttttcgtaccacatttgtagatgtttcagcacagtacccaacaaaccatactatattgcagtgcctaatcctcatgagacaatcaacctcgcgttgaaatggttcgtctttaattgcatgaaatgagtaaagcttcttcaccgcaacaagctcatctccaagcactccctgtgaattttcaactctatatgttaattgctacaccataccaggtcaaacatgacggtctcatcaactcgtcatctctaacgggttcggtgttcgtcagagttaaagtgaccagtgatgacaaaataccatctttgatgggtgaacacccatcacaggtgagtcatctctgacgagtagtaactttcaacccatcagtgttgagtcatctctgacgtgtcacaacttctcacccgtcactgatgactcatctctgatgggtagtaacttacgaaccatcattgatgttaaatcacgagtcatgattttgaactttaaatgcgcattcaaaaaaaattaaaaaaatttgaatttcactagctatccattctatacatgatgacatgtcactacccacaattccacatttttttagaaacgtagatatgcttgcatttgttgtgtttagtactcaagacctccctctctaaaaagagcacccttacaaactcatcaactatagagcacatgttgatttgatttctctttcaatattattgttttagttattcctctccaaagcatgtaacatatatttaacactctaaatgatttcaaatgaaaacatcatcaactaaaatgttttagatctcatcgtgtttaatattatatatggaatatcttcgtctgagatcatttgaagaatttaaaattttgtttttcaaaatagatctcaccttagggcatgtaaactatcccaaataaaactattgtcaattataatgttgtagatctggttgagctctacgacgactttgatccataccatgttttcatccgaggtcatttgaaaaagtcaatttttcatttttaaaaatagatctcatcactttaatgcatatttggggatgtatacgatctctaatgaaaatattgtcagttataaagttatattgagatctacaacttttatatagggcatttctccaaccgaggttttttagaaaattcgaaatttggaacttttactcattagtgaattttttatccgtgaattttttaaaaaatgagtgatctcatctatgatggttcataacattatctatgatgtcatagatgacatagatcattttgtgacgggttacaattatggcccgtcacagatgacctgacatgtgtgacgggtcctccccggtagccatatcttaaacgagatactttttggcccaccaaagatgactcatctatgacgagccatgttaatccatcatagacaatcgtaataatttctaagtcaatttctgtttttcctgaaatttttcagcccgtgttctcatgaattatcatgtgactttggaggaccctccaatcagtataaaaatatggtatactggttcagttgtacggttccagttggacatttatatattcagttggtaaggtaacatggacttcctgttcgaaattagcaagatggtaggttttgaaatgctcctataactgataaaatcaagaattagtcagacataccttataaactattccgaagccaccacttccaataatctgctcttccgagaagtcatttgtgatgctttgcagtactgatagcttaataggcaatgggtctcctatgtcatcgaatagcaaatcttctagagtgttgcactgtttaccttgcgttgccatttattacctgcctctaccatttgagagcaaaatcaaaatgcttcttttataagactataaatataaaaaatgattataatttgtagtgacaaaattgtggcctaccaggaagatgtatcaaaatcaacccaatctctaaggtcacaaatgacaaaaagatcactgccttgagcacttatttccgaacagctctgttaacaatttttaaatttatgatgttacataagtattactgatgcaacaaaaatatttgaacaacctggaaatatttgtcattgcatcatttagaaatagtaaaatactactcccttcctgtccaattctgtatggagataattatactattcatggagcataatgcagaaatcagtgcaagaatgaattcgccatggttatccatggtgggacattcatcttggattatagaacagctagaatccttgtagcatcaatttttgttttttttttcttttctgcttttcagttccttgactcctccgaactctgtttttatttcaacttattaataatataaaactagtaggatttcactgaactctgttcttatttgtttaaacgtattaatatatactcagtaggaattgatctattgtttcataaagagtaaaatacatagccgatacttaaagttgagcgcgggtgtcacttaggtttataatattgtaaattgcacatatatgtccaccatcttgtttaagtgacttattgaggtccaaaccccactttaccggctctgactgccgacgtggcacgccacacaagcaccaattttacaaacaagcccctccgcaacagtagtgccatggacagcacaaaaatccccaaatccttcgttgtagtcatgccgcgccaccgccgctaccgacggtgccgcgagcgccagtagcaagcaacacactagcacgacacacacgcgcgagtggctgcggctggtagagcagcggtgggcgagagcacgggggcaggcatcacggcaacgccgggatccataacatcgcggcagcgtcgggatcctgctgccacgccgcccctcactagctcaccagcacgacggcattgagaatggcgacggaggagtggaggacgacgacgaggacgacgctcgggcgctagtagcggcagcggaggcggaggttgctcgggcggccgtcggcggagcagagaaggaggtagcgcgagcggccagtgggagaggcggggctcgctcgggcgccggtggcgcgcttgtgtagtcggcagcggaggcggaggcaaaggcatgtagccgcgcgcgggggcgggccagcagtcggcccacacggtgcggcaatggcggagaagcggaagcatcggcgaggcgggcgtggcggagaggcgcagcacccagcgcacgtcactggggccgacgtcggccaccggatctccctgccaccgacgcctcctctctcactgctcaccaccgacgcctcctctcccgcccccaccgacgcctcctctctcgccgctcgccaccgacgcctcctctcccacccgacaccgacgcctcctctcttgccgcccgccatcaacgccatcctccgcacccccaggttgaagacgacagcgacgagctaggcgcggtggcagcgatggagtctcgtagcctcggagcggaagggcagagtcagcgacgccacgtgggagggcagcggggccgtccccgtgcgccgccgtccgatgcccgcccctccacgtcgccgttcgccgctcgccaccgacgcgtgagagagagatttaggaagaggggaagcaaaatggggggcaaaatgcaaatatgttgtcacgctggatcgccacgtaagccagtcaacccggtcaaaggtcctttggacttcaatgagtcacttaaacaagatggttgatctagatgtgcaatttacaagattgtggacctaagtgacacccgcgctcaactttaaggaccggccgtgtattttactctttcataaaaataaagaatccaattctgccatctttaagtatatcgcgaaacccactgcatattcatcttatggaaatatggaagttctctaatatgattcaaaaggatggtacatgtaatactgcataacacacacatcttagcagtaaagctatgagctgattcaataacttcatcagattagacaaccacactttcctgatacctaacccaactactttgactgagaaacatgtgaatatataagttccccttcttggatcacgtacaataacaaatcaggaacacttctatggctgtgtttatggctgtgtttagattcaaaattttttctttaaactttcaacatttccgtcatatcaaatgtttggacatatatatggagcactaaatgtggacgaaaaaaaccaattgcacagtttgcatgtaaatcgcgagatgaatcttttgagcctaattacgccatgatttgacaatatgatgcaacagtaaacatttgctaataacggattaattaggcttaaaaaatttatctcgcagtttatgggcggaatctgtaatttattttgttattaatgtacgtttaatacttcaaatatgtgtccgtatacttaaaaaaaatttggcacacgaattaaacacagcctatgttcattacaaaaggaacaagcctggaggctagagggttgctcgatcattaactgaacgacatgcaagaacacacgaacaaacgcagaaaaactcaaattaatgatagacgacatgggagccaaattatcacatggtataacagccgagatgaatacaaaacaaaaataggtggcattcacaaagtgaagaaaattaaagaaaatattaaatattgcttggcattttctaatttgcagaagagaagttgtgtgtcgtataaaatctgagaaaagctttctcagatgtagggaatgtttgccgcataaaattagtaagcgtcactagcgagagagagagagagagagagaaaaggtaagcaggagctgaactaggatcaactaaccttctatggtgaagcaagtgtagaaaggaagtggcgatcttggatttttgggcgcaatttatgctgggatcaagcatgggagagccatataaattaatatcacttggggagtactaccgagtctacgaccgggtcatgtccagctataccatgaacaattataaggcgcgaaatcagtcgtcttttcaattgattcttttttttctaattgattcatatgactaaaatgacatgactttagatttgcgtgtccattgtaccaatgcacacccatcacccatgtggtatcagacaaacattgtcagatatacggagtcaaacttggcgacataggtcgcctcttggcctaccacacatgcatgcatgagaccaaaagttaagctcgtggattgcagcgatttgtagttatgaaaatgacaactaggaaactaaagaatcatccatccccacccggaaagggagaggagtgaggttgtgtactattgaaaatttaatcttgcgtgtgtggactgacttgctgaagattaaacaaaatactcctttcgtcaaataaaaaaactcaacttagacgaggatgtgatccctcctaacataacaaatctagataaccatttatctaaattcgttgtattaagagagggttaacccttgtagattaagttttttagatggagaaagtatatttgaaagggatgtcttttgaggttgttaagagtcacaatatcgattcctgctagcggcttcgttcgtgaactgagattttaattggcacagaaaccagagcaagcaattaacacatgattaattaataattaattattataaatttgaaaaataggttcatttgatttttaaagaaacttttatatattctttttatcaaaaatacaatatctagaagtttggaaagtgtgctaatggaaaaagagaaagttgaagtttaaagttggagtttaaaacaaacggaaagaaataactactagtagaactttagcaaatctgaaatgaccaaataaaattttgtggctctttcaccttacacaatcgacacatcacctcctgtagcactggcggacccagaaaaaaatcatagccatggcgaagacaaaaagagtcaactaacaacatctcaatccaacccaatgaaacaacaaagacagccaacatggcaattacaaaaataggtagatatatacttcaagtactagttccacatatctgtattagtgaaaagtaaattccaagattggtatatatgtcctcttttatagcagagttagcacttgcgtctagtatcaactcctccttggcacccgccggtggcaccgtttccatgatctcggtcgcggtttgcaccgttgtagcctccattgttcccgtggtcatggttgccattgtgcctgctctgttagccgccacgtcctcgattggccatattgactgtcgcttcggtggtttgtcgacgggccaggcactgctcaaagccaagccactaggagtatgcctctcccagaaattaatcatcggttcggttttactgacaatggatgagatgaccggctcaaagttgtcgtcgagctagcaatgaaataggagatgagatcttcatcgtcgacaaccttcttgacagcggcggtcatctcatcactaagcaccctcatctttgcgatagtcagcgacggatagatctagatcgcccttcttggtgttgaagagagcgattctagtgttgatgaagcacgctattatcaccgaggagtacatctcctcaagcatcctgcacgcctctgcagcagggttggaaatttcggaccaaaatttccgaaatttcgatcatttcagtccactccaatacgatattagttcgtccgaaatttttcaatttttcaattttttcatgaatttggataatatttgttcaaattcaactaaattttgctcaaaatttgggaccaaaatttccgaaatttcgggatttcggtgaccccctatcaaaagtcccaaaccgagaaagtgaaccttgctctgcagaggtgctgcatgtggctacctgtgccaggatttgcttaccagttgccacccattcttcatagactggatttgggtccccggacctctgtccttaattagctcgttgtcaccttgcttcgtgattatagcagtcggagctgccgtcgtgccggtgaggtgcccttcaagatgggctcctcgcaccaatcccagaatctacgctttccttaccgcgtgattggtcttggagagtttctccaagatcgtgcttccaccgagcggattgctggccgtcgccttggatgaactccccatgagttcgagcagatgcgattttagtggggctctgataccatatgaagcaccagaggtgcagaagtgttgaaccctcttgggccgcacctttgttcatatattggtgataataaccatcactgtggtttacaagatagtgcaggttgttggatagataatatctattctgttacaacagattatatctgaacctatctatccattcaacgatgcaccgcatacatcatatatcatctatctatctatcttctatctatctattatattatattatattatattatattatatactaaaagtccattaaacttcctagaaacgctctcaaaccgccacgtgacgttcctataaatactcctagaccgccacatggcactgttaaatctcaccgtcgattttcatttaaattggtggacccaatactttagactattagattagatgtgttatttttttttaaaaaaaaagaatactttcgcatctatactgtgggccggacaaagaaacaaaacgtaagttatctttgtacgtacgtacgtacatacggagaagaaacaatgaatcttatctcctcttcaatggaagaaaagaaaacatgtaccgacttacgataaaagcgattaataagtaaaaaaaacatacgtaaagcaggtacgtagtgccactgaaaaactcgatgctccataaaatatgatattacactattttaaaataaaatatattactctataaagttatgcaaatatacatagctaaactagatcgtttacaatataaaaataaaatatcctatgaatactctttaaacatcctatctataaattattttaaaatcatatatctaatttgtgatccagtcggatcctctaattaaataaaatattgatgtctatgttcataaatacatcattatatatgaggtcaacatataataaataatgttataataataatcagaaaaataatgaattacctcttaaactattacggtcgaccgaattacccctataaacccgaaaaccggacatctttcaccctcaactattaataccggatgaattacgtccccccccaatgcggagtggtttttcgtcctacgtgtcaatttagttagcattttcttaaaaaatggtaggacccatatatcatatctcttcctaaccccttcatcatctctctctttcttctccctccacatatcaatcggcaaggctaggggcggcaagcggcggaggccgctcctcctcagctgactcggcagccacatgcgcattccaatcgaggccgtcgtctccatcatttccgttgcatatcgttgtcgcatgatgagagttgcaggtaccggaggcgagaacctgcgctggtcctcaatggccaggttctgctacacccctgccatctagaacttggccaacaaatatggccgcagctatgtctaccatagcatgtcgtcccaccacggtttttaatcgatccccatcaccaatgcctctctcccgatgagacaacgaggcggatcaatcaagcaagcaagcgtaggggaatagacgaaggaggaggagaagagcggcggggtgacagtgtgcctacccggccggtccagtagcaatgggagggagaagagagaggctggggaatgggattcaggaagagaagcagagagagagaggtgagagaggagaggggtagagagggtacagagtgtcacatatggccccacctattttattttttttaaatgcagactggactaccatgtaggactaaaactactccaggttgagtttttttttttggggggggtaattcatcttttattaataattgagggtgaaagatgtctggtttcgggtttatggggtaattcggtcgaccgtaatagttagggggtaacttgtacttttcctatttcaaataattttacatcatattctaggtgtcaaataacacttgatgactatataatgctaacttaaagctctatatgtaaaataattgaaaacaacacaatttagttgtgtatttttaagcagatatgatttagttttaatatgtctgagattaagattctcatcttttttttaatttttagaactatttcaatagtatatgataagtgggcaacataaatgttacataaatgtaaaaaataattatgaaaaatatttcaagccagtgatcttgctataatataaccatttagtccatcataggatttatggtcatatatgtatgtttttctctttgtcaaatagttttgataacaaatgaacaatcaattaacatgcgcaataaactactcatgatatttttttttatagttgaggaattccaacttatcagacataatttgatgaatgtatgtcatgcactctattgatgtgactatgaattatacttcaatcaattagttattataaataagtttgggaaaatagattcattctctaaattaattagtaaaggtatcttatgtgattatgaaaggcgttgaaaaataagatatgcaaaattatatatatttgtcaaaatataaccaacaatatggtcctttggagattttatcgtggtagtattttaaaaaacactttattcaggtaagaaaatcacatatagtacaaatagaaataaaaaaactccattattccattattgttttattatcgtgacacatgttgttctcataaagtcatgtcattgtcataaatttagggttgtatggtttcatgtaatatgtcataaccagatattaactaaaacatgtttaaaatagagtgaagatctattttgaaaatataatctaaatgtaaacatttataataaaaaaagttaagcaacattaaataagtgtctacgcatatgcgcgggctatttatatactaaaagtccattaaacttcctacaaacgctctcaagccgccacgtggcgctctaataaattaaagaaaatcctagaaattataagaaaaaaaagcaaaacatccaccccttgattttcacttaaattggtgggtccaatattatacaccattagatgaaattgatcataaaacaaaccaaatagtgtggggtcccacctctcctcctcctaccgcgcatgtgtgggtatacgtacgtaacatgtacgtacgcttccttcccttcctctttttttttcctttttttcttctttttcccatttatataatggatattttttaaatcaccataattttacaaacaaacaaatttaccatcatacaactcacatgtaactaaattagctctacaatttttgaaataaaatttacaccattatatgttaccattaaattaataatgtaatataatttccacttaaacatatgtactcattattttatactattattttcaaataatgcactattttaaaataaagtttacacatctatattgcgtacctatcaaataaacaatttaagatctatattaactgatttatacgtacacttaaactgatggacccactatataaatcattgaaactatttttattacattggactattattctcaaataatgcattctttcaaaataaagtctacaacattatatactatatactgtgtacccattaaattaacaatttaaaatctatactcactaatatgcacttacactagaaccactagacccattatttaaatcatttgatatattatttgctaataaataaagtatccgaaatcatctttttggcccgctgcacaatgcacgtctgcacctttgccttttgcacgtgtgtaaagcgtcgtgtctgaggcatctaaggtgatcacgactgccgcagcactaccgctatgccacatatcaaatcatatatggagatgattaattttgttaataacatggaaagaaaattaaaggtatgatgtagcgagagaagaattaaacactgtgggttgtgttttttctaacatttagctctgtttaagctgaaatcgagagttgattacagaataattataatgtatcgtgttatgtcgtatttggattttgtactatttattcatataggtgaaagaaatcattatattataaatctgagcactatattaacgaatatcaagagaactcttacaaaaacaagggtgttataagggagtttaagaccctctttttttctagattacatagttggatttttgtttgcacgctttccaagtttctaaatggtgccttttttaaaccacattttaactttttagaagtcaatttatttgtttataccctcaaatagctacaacataaatcagataattcatcaatttcagctgtcctaaaccttaaatagtacgtatttttttttcatgcgagtgatggtaatctgtaaattgggaatcaacggataatcaaagtcgtaagatgaatatgtaagagctactataaacaactgtaaataggtatcaaaattaattgctattaattagacatctaatggcttgctagccacacaattaatttctctctacatgcatataaacatgcaggaagctggaacaaatattaccatgtgccccatacatatatattaagctacatgcatataaacatgcaggaagctggaacaaatattaccatgtgccccatacatatatattaagcggttaatattttaattacatgtgttaagtcctttaaaatttattaaaatgctctcaagctgccacgtggtgctctaataaattagagcaaatattagaaattctaaaaaaaacagcaaagtatccactgcttaattttcacttaaatcgggacatccaatattataaactgttagattaaattgatcttagaacaaactaaatactacaagatcccacctctcgtcccatggcataggtatgcacctacgtacgtgggtacgtacgcttcctctcccttttttcatttttccctttcttctttttttccatgcatacccttctctctttttcttactatatcatgcgcctttatgagactatttaatcacaagaattttgagtatcttgctctcgcaatttttatttgtggctatactacgcggtatgcatatagatggactatatgataattaactagcaatagtttcttatttactcgagaaaaaaaatgattcaaaagtcgtaagtacttaatccttctcttactcaaaagtttatgaatggtttttaagataccttaagaaaaatagaacccttaaattattataaaataacattatccgaactttagtttgcacttaatctatgagacaaaatttttgaacaaacaataatcttatcttttaataatataagtgcccacgcatgcgcgtgggccaccttcctagttatatactaaaagttcattaaactttctacaaacgctcatatatcaccacatggcactctacaaacgcttctaagctgccatgtggtaaagaaacatctaactcttgattatcatttaaattagtgggcccatctttttttttaccattacaatagatgtagcaaaaaaaagtaatccacccatcctaatctaactctaaattggaccctcactctattcgtgcggatgcatatacatacgtactctgtacgctcctattcccaattctcttttcattctattatctatttatctctcctattttccttcttctaatagaaagcaaaatttacgtcaaaaacatttaggcaactatagcatttaaatcataaaagtattctaatatgcttatgttgttagattatttacatagtaactaaatcatacatatatgatttgatcacactataaaaagacacatagagatcggtgttgtaggtgctggaagtgataaaaccggcacctatatatcatttccgacctctgcgggatgaaaataaaaaaaagactatacctttaatagactgtaggtgtcggttttctataatataggtgtcttttttttaacaaaaactaacacctttaatttactatgagtgtcggttaattaaaaaccgacactcggtttttaaaaaaccgacactaaagagtcgagccgagctgaccggtggtctctatcgcgcggataagaccgagagtctctcgctctcccccctctctctctctctctctatctctcgctctctctgtcgcgcgcattcttctttctctctcacacacacgaacacagtctacgattcatgcccgcgcgaatgcgtgggctatcttccttgttttcttaatagcgggtacatatttacagtaagtatatgtatatatattttttctccaagtgtggactcttgttgtgagccagttctcttaagatctgcattcagccacccacccagctgccttcctcactatatatagcctatactgcttctcccgggaagaattgcacacaaatacacaatgcacacacacagacacactctcgttagcttaccattgatgaattaatacttctgtctcatactcagacagatgatacagagttatactgagtatggaaggcattgggagtatggaagtcgccaacacgtgaagtcagagtactatagatatctagaaacttatccctatatgatatgtaatctcaaaaggtaaggtaatgcgtacggagatgatacgaataagattagaggtgagagtcacctctacctcaacaatatttaccagccttgtgcctaggcttccatgtggttaggggtcgatagtagagcttctgctcaccatccatgcctgaagaagggaacagtggacctagtccaacaaccaatgtggttaatttcccccacaaaatctgtaaaaagtgaaactttgttgcaactttcatggaagataggctctctttggcttgtggtttgcttgatgatttgattgctactttcttgtgcatattaactcatacacctcaactctgctatgcaattgtttttgttatgttatctgtatatctctgtgttgcctcaaaaggacaaagggaattgttagcatttcaaatgttcaggcagaaaacaacatttttatctgcttgaacgtggggtgatggatgtttttgcaagacaccaaccggcaagaaaataagcttgaaatcttcagttaacaaaactcctattcctttacatttacaacacgtatgcacaacaacatttcccatagaaaggggtataccaatatacaatataacactacaacattgtcagctatgtgacttcaaggcatccctaaaaccgctaaaattatgaccgcctttcttcccgaaccctgttgttgttttctgcatcatcgcgacaaactcgttgtaatctatacgcccatcctgcaggaaaaagaatagcacaaaacacatcagatttactgatggaagataatctttcatggttagagttgccaaccctaatagcagcgcaaaattgtaggattggttcttggatgatcttacattgtcctgatctacttcgcctatcatgtcttcgagtcgaacatcctcgataccaaactcatcgcaggcttgctggagctcatcagatgtgatgtatccactgccatctttgtcgaagtattggaaggcggcatatagatgatcttccctttcaactttgttgaggtgtagagtggcagctatgaattctccataatctatggtgccactattgtcgatatcagcctacataaagaacatgataaacgttttgttatgcacttgccacaattagttgcacattgatgaattcagttcagtctttaccagttaacactttgtcaataagtaaacaggcaaagaagaacaaaagaacatgtgactaaactatttggttaaagaattcgatttcccttgttcttaatcgttgttatgccgagctacatggactgggacaatgttctatgcaactcctttgactatcaacagaaaacaatcaagtcagtgtgcttccttcatgtcacattatatctgaagatctgaaaaataataagaagatctgaagaactagagtctaaaatgtaacttctgtgccattccaatctagaagttaaatgtaactaattactactccctccgtttctaaatattttacaccgttgactttttagcacatgtttgaccgttcgtcttattcaaaaacttttgtgaaatatgtaaaactatatgtatacataaaaatatatttaacaatgaatcaaatgatagaaaaaaaattaataattacttaaagttttcaaataagacaaacgatcaaacatatttaaaaaagttaacaacgtcaaatatttaaaaacggagggagtaatttgcaaataatagttttagaaaacatctttaccaaccaagatctccaagtgaatatgattagcagaggggtttagagcacaaacttacagcctgcatgagctgataaatttcagactccttcatgttggcacccactctctccaacccggccttgagctcctcgtagttgatctgcccgctgttgtccgtgtccatcatcttgaacatctccttcaacccggcgatctcctcctccgacaagttctccgcgatcacctgcgcaatcgatcgcccaatcaatgtcacacaccatcaccatgaacaaatctcaatttccacaatgcaagacaggtgctcactctcaatgccatcttcttgagcttgttcatggccgagaactgcctcagccgcgacagcaccgccgagtccagcggcttgtccggcgccgacccgctcatctgcagccatggatggcctgcgagaaaagaacagcagtgtcagtgttgcaggaagcagccatggcggattgccaagagagtggtgagctcacataggacttcgtgcgcggtgagccgcttcttggggtcccggacgagcaccttgcggaggaggtccttggcgccatccgacacgttcggccatgggtccgactcgaagtccagcgtcccgtgcagcacctgctcgaatatcccctgctccgtctctgcgaagacgacgacggcgatgtcgccggcggcggcgagaaatttgttcagcattcgaggtcgaaatttgttcgtcaatggcggcgtcgcctacctacctgcccagaacggcggcacgccgcagaggaggatgtagatgatgacgccggcgctccacacgtcggcctcctgcccgtagctcttcttcagcacctccggcgccacgtagtacgggctccccaccacgtcggtgaacacctcgcctgcagtgcaaagccacgcagatcgatcgagctcctcacgacggcgacaatggcggcgacgaccatggtgcgtgaccggttgtttgtttacctgggcggaaaaacatggagaggccgaagtcgatggtcttgagcggcgcgtcctcctcgttgccgacgaacaggaagttctcgggcttgaggtcgcggtgcatgacgccgagcgagtggcacgactcgacgacggcgacgatgacgcgggcgagcccggccgcctgccgctccgtgtagtgccccttgcgcacgatccggtcgaacagctcgccgccggcgcagagctccatgacgacgtgcaccgccacggcgtcctcgtaggcgccgcggatggagatgatgttggggtggccggcgaggtggtgcatgatctggatctcgcggcggacgtcctccacgtcctcgtcggtgagtagcttccgcttggcgatcgacttgcacgcgtactcgccgccgttcgccttgtcgacgcacaggtacgtcgtcccgaactggccctgaccgagtttgcgccccaggctgtatttgtccttgagattctccgtctttcgccggagcaccgactccacctgcaggccggcgctggagatgcgcttgatgtgcgccggcttcttggcgcgcgactgctgccgctgctgcggcggcggaggctgctgggtggtgttcgacgacgcgggcggtggcggcgagggctgctcctgcggtggcggcggctgcgacggcgccgcgggctgcggttcgggctgcggctgcggtggcggcggctcggagatgacgacgggtacgggcggggcggtctgggtgggcggcggcggcttgaagaagggggccgaggggagcacgacggggatggagcgggaggtggtggtgggctgcgacggggaggacggcgcggcgtggcgcggccgcaggatgccgaggagcccgttcttggcgaagttgcggcgcgggccgatgcagacgttgcccatcaggggcggtgccgcggccccggcggcaatggcggcgtacggcggcggtcaggatcaccttctcttcacacaacaccgctcgtcgtcgtcgtagtcgtcttctcctgcggcgccggcggcggaacggggcgcgttccgccgggaagcgagcgatgatgtgcggtggtggcgaaggcgcggcgggggaggaaggatgggtggagacgagacgatcgggggaagctaaaaatggagaggaaatggaagagaaacggagagggagaggcaacagcggcggcgtgccaaatttggcgggaaacagcgggaggccctgggttgggtgtcggaactcggcgcgggcgctcaactgtgtgagcgtgacagcgcgcggaaaattggttgattggttgcgtgggacgtttttgtgccagtgtcctcaatttaaattttaaaaaa

SEQ ID NO: 4619 - DNA, 37337 bp, Oryza sativa
  unsure (1)..(37337): unsure at all n locations
catcctgttcgtcagattatcccatgcacaacatgagtatctatctatctatctatatctatatctctatatcttctatactaattgggcactttctatgaactctcatattaatcaggcagatctaaccgttaattaagtagatcagataatcttaaccatagattattaatatctacttaacgtcacggcctcatgggccacgcaaagcccatccaatttttcactaatgtatgtacacaacatatctgccatacgtacttaatataatttttttaaaaaaattgttgccacaataaatgtatgtatttgtacgaattaactactttgccggattcgatagattaattcgaagaaaattttaagaactatatattatatctttactttcttgttcactcacgcttcaattagtttgaatcccataaggtttaatttttttacttatccatgagaattgaaacatctttctaagtgaagaaagtacgtatgcacatattatacttagtacaaacagatagcctacacataagtgaaaacacattcatatctagcagaaacccataaagttaatataacaaacttgtcaaaaatattatcttatattatttgacaatcagaaatatatctatctatctatacctatactaattgggcactctaaagaagctcccacgttaattagaaacatcccactgttgatttgatagatcgaattatcctaactatagattataataaattttaataagcattaattaacgttatgggccttctttaaagcccatcaaacaaccaatactttaatgacctttccaatatctgtctttatctcaacgcctcttcgtttttttgttttgtccacactgcaacgtcgtacaacatgggagaacacaagaatatcgatggagaacatggcatcgatcaaatacgagagatttctcagcacttgcgcacattgatcaggcacgcaacaagtcatcccggctccatgcatggtggcagcgcaatactatcaaacctagctaggtaatatgcagcttatacgtatacagcagattgcacgcaggaggcagtggtctgcgcttgcgatatgcttaacacatttattgtatcagctagcaatcagtcaatcatatgcatgtgtaagttttagacgcttccacagcaacagcaacagttctctttgtacctatcaaatacaagtctctcatatggttaattggataatttccctttatatatatgtatataccatatttttcattcttgttttgatgaattgttatttgttgtccaaccggtttgatttttctcctcaagcttttaaaagtacatggttcgagtatcctattatattgatgctgttgctgtcatgtcatgttttttcaccaatatcaagaaagccctaacttccacttcccgtatatttcattttatgtgagtatgtgatgggaaaaaaatcaacaaacaagtagactttaacttccccgcatgcatacaaaacgagtgttaactatacaaaattcctgcatgcatttatatgcagactcaatttgcattcataaaataatgctacatgtcagacgaggcttacatgatgatcaatttgaaaattcagatttttagttatatggtaaccaatatggagcggtgggagtaatttgtaactagattttggaagtattacttagctaccctcgataatttccatgtatatatgaatataccgtatttttcattttcttttgatagtttgtgtgtatttaacttggtccaagtagtttgatttcgtcctcaaaatttatattttaaaatcgtattctttaaaaaaaatcaatttgattgtttctttatacatgtttctcatctgaaacaagattgaccaggatttaaacacaccgtcaactgactcgataaaaacaacttcattgcaatttaaaaatggtgtacttcactattcatgaacttaaatatcatggtcctaatacaattttaagatctgcattatgaacttaaatattgtggtaaataatttattatttaatatcttaattgaattaattagttttttcattaattacacaatcagttgaaagacccagtgttctagttgcagtcatgataaataatttgtgttcaaaaacatgtataattgaattcaattaatatatatatatgtagttatatattttaatttaattttgacttccagaaacatatataataaaatatacaacgacttatacatgtaacttactttcaaacataatgtagtaaccaaaatattcaactaataacacaaatttagtatggtaaattaacaaaactagcccgtgcaacgcatgggatggcgactaataatactaaattactagggatactactaggtagctcatccgtagaaagtgcttgggcggttgggccccttagcccccattctttgtccaccactgcttctcctcgctgctctgcttttactctgagtcagttacaccatcttgatcaacagcttccacgttgcctttcccatcttcatcttcaaatgttaacacatggtttttatttttcagttgttcttatgctgagactttcgctataatttttaaataagatagtattataaaatttaataagtttatgatgtcgtgacagtagtttcaaatataaatctaaatataccatttataattttaaaacatatatttttaatttattgatagtttttttacaactaaacttattgatagtaaaagtttcaaaagtttgataaagagagtcaaacatctttttttttaccctttttctttcctcgagcaatagtcccacatgtcaattcctattttgttctaaatagccataggttaaacctttaacctatatatgttgcaatcgtttatagtactgtttatatcaacttgtaattagccatggtaaagccttacccaaacagttttctttttctcaacaccacctgaatttctgtggtatttctatggtgaacatatatagactgaattaactgggtgagcaacagaagtgaatccatcttctcaaaacgtaaggatggatagcaacaagctagatgggcattgaaaggagagaaaagaagctgtgctaactcatcttgcatttcctatcaccatccttcccattttccagcaaatacatcatttacagtgtgtgtgcaggacaatgaaacccgctactgctaggggggactcaggctgctgtctccttcacacggctagctgtatggttctcaccaaatgttcgacaagagttcacgactggagaaactatcattcgtgggtcggctaaaaatcacaatagtcttggttactcaaaaaaccgagactaaaaatcatttttagtttcggtttaaaagtgcaacggaaatatatgatctttagtcccggttggtgttaccagccaggacccgtttatttttttgtcagggtgtgtcaggtcccccaatatctttaactaaatatattcactttagtcccggtttgtttaaacaactgggatagaaaaaagagccaagctacagagtcatccttctctcccccttcccttatccttattttcttctcccctcctccttcccctcccctctccttatactctcctccccttcacagggcgctgcagctgctctggcggccccttgcggtcgtggtggaggggcgtggcagcgggggagcggcatggtggggcggcagaggagctgcacgcacgcacggctgctctggcggccccttgtagcagcggcggaggggcgtggcggcagcgtgggagaggcatggcggtgcggtggaggggcgtggcggcgcggcggcggaggggatcgtccagggcgcggtcgtcgccgtattttggggattttttttttgagattttgtgatgtaaatttttggagattttgtcatgtaaatttttggagattttgtgatgttaatctgtcatgttgttgcattccatccgtttgcattcgatttgtgattgatggaaaaaagcaatgaaaaaaaacacatgcaagcaactaaaaacaatcgaaaagaaaaaaaaactttagtcccggttggttattttaacctttagtcccggttatttcaaccgcaatccagtagtaaagagggttgcaaaccgggacagaagaacgtttctccaatagtggttggatcatgcactgtctagaaacttagatgtttggtgtcgctccgagctcgcctcacttgttttttcaatgcctatcattctcaaatctcaactctgaatgatacctctcactcttacggtgctccgatgcttgcacaattactcgattaatcctgttccatccccatcgttttccgatgtttcttgtttcccttttataagacaaccataaatcatctggtagtggagagtttgatggatgtgtgcctttccagttgtatggagttattgttcagttatcttgttaggtcccatgttcaatgagagtgtaaaccttggcatttatgcacatcagggaagtgttgttcaaatgagaaatatgaaaaaaaaatgttattttcagaaagaaaaaaaatggcttaatcttcacaaacatcgaaatgcaaaatatagctaactcactgctgtcgaattgactgactagtttttggtaaacattgttaatattattttttagactgtaagaaatctcctataggcgtacttgtactctgcttctgtgaaaattactaaattgggaaattcttattactattattgaaggaccaatttagttaattactcatgtggaacggttgtggctcacagtgtgtcagtaaaatccacatgtcagtgccatagttttggaaataagtacttctacatctgaatgtttgattattctttttaccgttttgaagataaaatcatatttgctttagtgggaaatttcatcatatatcctttgttttgatcgaaaattgcgtgattaccatctcatggcaatgacatgtgggaccatgtaaggtcactagcatgcatctcccacgatggtaaatctaaatttcaatatataaagagagaagatgatcacattttactttttttaatataactaggaaggtggcccgcacgatgcgcgggcatttatattgttgaaagataagattatagtttatttagaaattgtctcataggtaataaacttgggatcgaacaatatccttttaaaatgattcaggggttctattttcttaatgtaactcaaaaaacattcagactcttgaatacaagatggattaagttagtacaactttactaccgctagcttaattatcaaccatatcacttgtatacataccatgcaaatatgggtacaagcgaaaattgcaaaatcaaggaactcaaaatggatcatcctatgaaggcatataacgaacaaattaatggtaaattaaaacttggatttcccccctgtatataagttcaacaatttcatattttctccatagttttgaagaactttaaaaggttttggtgcatacaaatcacctacaccatcgctttgcttggtattgcaaaatatcaacattgtttgaagctaatttctttagtttttgcaagtttcattattttcttgaaacaataattgtttaaaataagactataattatataaatttaattagtatgggtagtttacttataaattttgaagtgttttgaagtaaagtttttctatcatgtagtctggttatatcaataatatagttttgttcaataaattcaatattatttacatcaccagaattaataaaaatttatgaaaccatccatgactacttaaaattttggtttgtctgatttgtttatttcaaatttagataatcacatattctccttctaatcggtgtgtttgtcattattcataataaaaaaaaacactccttgtacagctgacacatcatattgtcactcaatcacatacaaacgtaaaatatttgtcattattctcggaccgctcattcctcattggtatcttccactcatccatcatcttataatagaagtatacaccatattttgtctaactatttagtttacataagggacaacaccacgctcctcctccctcatgcatgggacacagtgtccaattttttttccaaagcaagtttttaattaacacatgtaattagaatattacatgtgtaatatatgtgtatgtgacacatggtaatttttattctagcttcgccctgcttatatactgtatagagagattaattatattcaacctgcagtgcttgattcttcttctttctacattgcatcttcgcgatttgttttcatgttattaaaaaaaccaatcgttgcccattgatgatttgacacgttttcattttagcgaagcaatagcgctataacatcatgatcaccttagctaccttaggtatacgatgcttcgtcatgcgtgtaaaaggtaaagacgtcaatgtgttgtatagagagacaaagaggacttccgaggctagatctcatggtctaaataatatgtccaccggtttaactaaaaatcgataaacaaatatttttattaggaaatagtctaaaataattggtacataatatcatataatggtgttaactctatttttaaatattgtagatctaatttatttacatctaattgtaaagagttatatgttgacattcaatgttagtaaagcaactattatgtaaagtttattatcatgaataataataattatagtggctcaactaaatacatggaaaaatggaaagggaaaaagaggaaggtcctcctgagtggaaggaaaggagggtacgtagggagagaagaggtggaatcgtagtttaatctaacggcttataatattggacccaccaatttatgtggaaattaagggatatatgttttgttttttttctcaaattttgtagcatttggtaacttgagagcgttttgaggaactttaatggacatacgttgtatcgtttggttgagacacttatataaggacaatattaaccggagaacatccagcacgttttgtccctaaattgttttcgtcagttttgctttttataattttgtaacataatagttatctttatactatattgtatttatgtaatacatagaagcaattatttataatgttattcatcaactgtaaagaatggtaggcttattttctttaaaaaagcatgcatactaaattaagtgttaaatgaaaattaagactttttaattggatataggttattgttttctattaatggatgaattgggtggacatgaaagtccactaaatgcattggttatatagtctaatatgatttggtgtagttcgagatgcggcccaggaatccaagaattgagaatttttttacagtggattaattgttttttggattttaatatttgtatgttaaaattcagcagctatcagtgagatggagtaacctcagttttgtatttttcttcagaacagaagaattaaacattggtgctaattacgtctaaatagaaaaaagtacatttagttctaataacaatgattaaaagaagcaatattaaacacatacctcataactgttgatcttcgttctttctgccccataatgttttcttgtctgtaaactcaaagtagtagtccgagaaacattcatttttgctttgacctattttattattgtatcgtgataaaaaaagattttgagatatctttcggtaccagtacttatcatgttccataactttgattatttttaaaaaatgtataatgagtttatcttaatttttggcctaaagtggtttgccaattgctttgggattgaggcatgtattgagttgcctcgaagaaaatagtatttacataatagaacaatatattaaatgacatgtttgcaacaatcataccttgcatctagtagactcatctgtataccatagaactcacagccattgtaagattaaccgcatcctatagcctaatcactcttactttaattatacacaatacttatcatgttccataactttggaacttttaaaaatatataatgagtttatcttaatttttggcctaaagtggtttgccaattgctttgggattgcggcatgtattgagttgccccgaagaaaatagtatttacataatagaacaatatattaaatgatatgtttgcaacaatgataccttgcgtcaagtagaatcatctgtataccatagaactcatcagccattgtaggattaatcgcatcccattgcctaatcactcttaatttaattgtccacctatcattttttctgtgttaacgcagtaatcaaattgtaaagtaccatgttatctgcaaatgttcatatgcaatataatatatacatttatgttattcaatagatgcaatatagtgtagccttaattaatacaggatagcattattgtgttcttctataggtgcacgattaccttcttttgccaaatatgagcagcctgaattgactaatgtcaccaaacacctcttatgccaagatgagtcgccagatagagtcgtgtattgtagagattaaaataccatctggtcgtggtgttgctgaaggagataataatcttgcctgcttgatcgatttaaaatttgctaatctactgaccggtgtatatatgtatatgtagagataatgtgatattaagttgaccggtgtatatatgtatatgtagagataatgtgatattaagttgacgtaggatagctaatcttgccagcttcattgattcaaagtaggaaactaatcttgagataaatacgctccatgttatgatcatggcaaaagcgcacgtgtgggtcctcaacttctaggcgcgggttcacgttgtgcccatgtggcatattgagagcgttttgaggaagccacatggcagttcgagaacgtttgtagaaagtttaatggatttttaatatataatagataggttataaagtctaataagtttataagacaataacaatacttttcactattgcaaaaatacgcacatataccattttatatgattaaaccaagtatttaaaatttatcgtagttgtaatcgtttcagaaaacagcaaaatgtcataaaatttgaccggagggagactttttttttttggacttaagcaaaggacccatgtgtcagtgtctaattttaatttgttctaacaaatgtgagcctactctttcttctccattccactggtcagaatttgttttctacagcatgtctgcatttgtatatagaatctgaatttacagagttagcatcacaagtgaatacatttcttgaaatgttcgggtagcagcggagtctagaccttgtttagatggtactaaaacttttaagtccctatcatatcggatatttggacactaattataaatattaaacgtagactattaataaaacccatccataatcttggactaattcgtgagacgaatctattgagcctaattaatctatgattagcctatgtgatgctacagcaaacattctctaattatggattaattaggcttaaaatatttgtctcgcgaattagttttcatttatgtaattagttttgtaagtagtctatatctaatactctaaattagtgtctaaatatagggactaaagttaagtccctggatccaagcaccaccttataccctttgaaaactccaagcgtttttcaaactaatgactcaatccgaaatcaaagtgcaacataactttttttcttcgcttataccactcggccgccttgttcaccaaatacatcatctagaatatttgcaggtcaaagcacctactgcagctatgcttgtggcagaccgtgtgattcttatgccggtgtcttcatccatcttcgatcagtgtggcgtctactgcttctgacttgcttcctggatacctctcattcccttgacccacatttatacctctcattctcatttttgtacacagccacacctctcattctcatagcactctgatttctttaaactatgccctctgcatcaactatagacgcacacaacaatttaatttgtgggaactctgatccatgcttgcacaacacacctagattgatctttgtttcatactcatcgtgtagtcttttcacttcctttttatacactcgggatgaaggctgtgtttagtttctaaaattgggttcaagtttgagaaaagttggtagtttgaaaaaaaagttgggagtttatgtgtgtaggaaagttttggatgtgatgtgatgtgatgaaaagttgaaaattggggggaagtttggtgtgaactaaacatggcccaattgtcaggctgtgtttttagtgtggagttattgttcagtaatcatgttaggcacattggccccttgatgaatggatcgagtgtaaacctttgcatttatttatgaacaaatgagcaacctttttttttttgttttttcagatgacaacgcttgcaaaaattttgttcatttttaaattgtcgcgtgacctctagaaacatcaaaacgggaaactgaagaccaacattccattggccaatgccaacagcaagagcacgtcgtcatgtgctctgcaggtgtcttcctcttccacctctctgatggtttttcttgtacaaaatttagttggacttgtttcataaatcattgtttgtgtccatgaacagacaaggaaacgataaataatccaaatgtgttcttttatgtttatttattattgagccctttcatgttgctccacttacttccatatggggtaagagctcaaagaaatcccaaccgttgattattgataattgttttgttaaataaaaacatatgagatcatttcattaatgatgtaattccggaaagggaagtaacggtagatatattatacttccaaatttaattatacatgttaattctaccatatatgcaacatcatctgttaaaaaaaataggacccttcttgtcaaaaaaaagtgagagagttttgactaaattcaaagtaatttcaaaatagtttttgaacatgaaaataattattgtatttggagtctctaaatgtcatatgtgaaaaaaaaaatataacttaaaatttcaaaattatttttctaaattcaaatacaaaccgcagcaagaaatagaaatagcatttgactatcacagttttcattcaaaatttgaacttttaagcagttttaattatggtattactgatgaatcttctaaatacaaggaaacattgccctcttctttaaatgctaattagtaacaacttaccacctaagaggtaagaagaatattaacccttggatcctaacataatgcattgatggtccagaaagttttggagtacggtaaaaaaatcctaatttatttattttgttcatgtacaacaaaaaaaaagagaggatacaaacttcattgttgttcaccaaaaatttgaaaatgtgcatgtatttctccatcttatatctttgcaagttcatttctcttcaagttccatccaaatagtcgaaaagtgcttaaccttccatatcaggcaaccaaatgaatcaactaacgtgaattcaggataggtctaatgttaggatccttgtggaactcgtccatttggattcaagtcttaaaatctagaatgggtgcatgtattttcgttgaatttaatccaagtaggtaatacatacatgcatgcacatgtgggtatgtctatgtggtaaagttattatccaaagctatgttaggctatgccttcaatctttgttgagatatgtggtaccatgcactgacggaatgtgtgcgagtctgaattatagtaaaaaaaaaaagaaatcaagtagatggatataatgtactcgcttggcactgcaatcatttgtattgttgcttaagttaaccgagtgagaaatcacaagtgcatccatcttctcaaaactttaggatagcaaaaagctgtgcattgaaaagaaagaataagctgtaaaaactcattttgtgtttcccatcaccgtcaatcccagtttccagtaaatacacgatccacaagggttgcaggtcaaagcaaccacttctgctgtgtgaggtactgaggcaggcagtctccttcactatctgtctagctatcgccaaatgttcgtcgtgagtcgcagggacaaccccaggtcctgggcagcatcggccacggcctgatcatggggcgaaaggccaatttaactttttatccaacgtttaaccattcatcttatttaaaaaaatttatgtaattactatttattttattatgacttgattcgtaatcaaatattctttaatcataacataaatattttcatatttgcatgaaaattttgaataaaatgaatggtcaaacgttggtcgaaaagtcaacgacgtcatacatttaaatatggagggagtactatttttcaccatgtaaatccgtgttgctccaaaacttccatgggcggccccggctatatatggtccaattcctggtccgcccctcactggtctggtgggttagatcatctataattttgaaacttgttgatttttgagtttctctcacttgtttttccgacgcctcacatcctcagatcttaacggaataccctctcgctgtcatggcattctgatgcttgcactactccttgatcaatcatgtctcattcccatcatcgtccagtctttcttgtttcccttttatagatcaggatgaatcgtctggcagtggagacttcgatgggtttgtgtttacagtactatggagttattgtccagttatcgtgttaggtctcctgttcaattaattcaatgtgaatcttggcatttatgcacatcaggaaaccagtgttcaaacgataaatatgaattttttgttattttgaaatgaattatggtgttctttctgcccaacaacagaacagagtcttacaaagtaaccaaaaaggaaaggaacaccaacatattttcatacagctgctgggtatgccagctttcaaaaatgcataacacctctaagtttctgaactagtttgttcatagaacccctcctgacaaaaacttcagatgtccatcggcaaaacatcagacgaaatatggcttaatcttcacagacatcaaaatgggaaatgtagctaactcgctgccatcaaatcgactgactagctagcttgtaaacattgtttatatttggtttttgagtaaagtccatcaccggtccctaaacttgtaccgctgtgtcatcccggtccctaaactcataaatggaccattcaggtcctcaaacttgttcgactgtgtcatcccagtccctaaacttacagatcactcgtttaggtcctccaacttgttcagttgtgtcaccccggtccctaagcagaacggtctaaaaactttatataaaaaataattcataactttttcatgtgaaccctaatgaagacaaactttatatcaaaattatagcccttgacgtgacctacaactttgtagttgataagtttttgaattaaaactgtttagggtcccaaaatattgttgcatgtttatagattttgaaattttaattttaaaattacattttgggacaaaaaatgacttgaaataaaaaaaatcaactataaagttgtagatcgtgtcgagggctacaagtttgatataaagtttgtctttattagagttcacatgaaaaagttatgaattatttttaaatataaagtctttagaccgtcctatttgacccagatgatattcaaatctaagtttagggaccgaggtgacacaactgaacaagttggagaatctaaatgagtgatctgcaattttagggaccgggatgacatagttgaacaagtttgaggacctgaacggtcgatttgcgagtttagggaccgctatgacacagcggtacaagtttagggacaggtgatggtctttactcttgtataaactattcgttttatatgggccattctttttccaacatagtacgatagaactatttggttttctataatttttttcccaaaaagtgtgcaatcaaattggtccggtctttttcgggtggtgaggtgtgaggaaaacaactgcacttttatagaagtagataaattgatattaccatcctcagacatgtaagtgacttcaaattacccccacatgcttttgaaatagatattgaaaatccttaatttttggtcaaattaatggtacttgatcaaatttcccaacaaacaatgattttaccttcaaaaccgaaaaattcagttttaaaggctttggctaactgaaaattttgttaatactcataactgaaatttttgttaatactcataacttcgaaaccgaaaaactcagttttaatggatattaatttgttctgttcttccaaaatttaccctctttttttatattcaaaaactgaaattgagcacagacattccacatgactaattaaccaatctggtccttcaacactaacatgaatttccctagaatttagttatttccacagaagcacgtacgcatgtgggagatttcttactgactaaaacataatgtaaacactgttttagtcagttgattcgacaacagcgagttatctatttttcccattttgatgtttgtgaagattaagccgtaatttatcccaaaacaacaaatttttcatacttttcatgcgaacaccgttttcctgacgtgcataaataccaaggtccacattcagttcattcaacatgggacctaacacgataactgagcaacagctccatactacagtaaacatacaaccatcaaactctcccctaccacactattgaccttggtcctatgaaaggaaatcatgaaagattggacaactatgggggtgaaacatgattaatcgagtaattgtgcaagcatcatagtaccataagagtgagattgggggtattcagttaagatctgagaatgagaggcatcgagaaaataagtgagaggaactccaagccaaagagatcgagaaaatgtctagattaaagatgctctatctgatgatggacatttggtgagagctagacaacaattaatgtgattgaatcctgcctcacacttagcagcagtggttgctccgacctgcacgcacggtagctcttgcatttacccaaaaatggtacagcttcttttctctccttttgatgtgcaacttgtttaattatcttaacgttttgagaagatggatctatttgtgatgctcacctggttaattcggcctacatatgttcaccatataaatgccacacaaaattcagctggaacagataagaaaatactgtctggagaaggcttaatccatggttacaagttataaacagtaatacaaatgattgcaccatataaattatttttttctgaggagagaacatacatatttaaattaaatcatgttttcatatgtagatttttatttgaaactttcatttgaacaaatcttttttaactcaacagtaaaaatatgtatatactcaattttttaatctatcagagtactttgaaaaaaaataaatctgtattcagtgatgtggaaatttatcttacacgtgatgagcctgctttgttagatgcgccgagtcataacaatacccaatttcagagaaatttagtttattaaattaagtgtaactgaatatttttgttaaatatttttcaaaaactagtttatttcaataaaataaatcatgcacagccatttcacgcgactaattagccaaatttccatgcattgtcatgtacagactgctgagcactaagttataataattgtaaggccatatgggatacatatatctacaggggtgttaacatgtgtcatataacccaacctaaaatagttatgcagttgcagaaaaccatgctatatatatctaagttcggagttgctagaaatatggcgccatatgctacagtcgattttttttcagccacttacacaatagttatacctcatttacaccccacttacatatataattggtatgtaattttcgaatttacatatgtaattttagtacttacatatataattttgtgacttacattgtaaatacactaaaattacatatgtaatttagggacttacagtgtaaataaataccgactattttttgatgaaaaatatggcgccatatatatagctacacccatcaagttttagataatccgatttacaattacagtaaactaagaaaaatataactgagattggtgctactcatattatcatatattgtagatcaaacgactagtaaatctgaaatctatttgcgcgaaaaacacaccccctgccaaactttccactgcccgagtattcatccagtagtatataaaagcgaagcaagaaaggtcagacaatgaggatggaacaagtattcatcgatttgagtccaattcgttacagattctagagtatggtattgacatgtggatcaaacatacacatgatgaacccactttgtacgttaattatatgatagcctggctattaaccgagtcccaaattttttggaaaaaaaaacagtttttgacgtttgggactgacagaaaactttggttgctatcatagttcagtagcattacggccggtcctgacattttggaggccctaggcagacttgacgctatgggtcttagagttagcccttaaggagttatatctaattttttttacttctaatacatacagtatactctataaagcacatataccatagagtgacacaaataaacatttttaacacggtaaataataaatcaagcagtttgcaagttgcgatagagcaatttaatctttaataaataatatcaatagtataattgacaactaaaaataccatagaaacaaattagtatgaacaccttaataggagaccacaaatatcccatgtcccttataaaaaagagctttttcgcgaccttatgagttatgtatagcacccaacaaatgtttctaggtaacattgtaacacctgaagcagtgaaattgcaaagtaaattgataaaggcatagctgcatagagcttgtcgattgacttctaggtctgtgacctaccttcagcctgaagaagggggcgaatgggaaatggccgatgagccgatgacaatcacagatcacgcgggtagggcagggaccagccaccatccaggcaagccggcaagaagcgtcgacagcgataccgccttggtggcttggccgatgggccacggcgatcaggcgctataggctagtggggccgatgcggtctttgcactcacggcggcctctcgcggactagggcatcggcgagacggcgacgaagcgacgcggctcggcctgggcctgcactgcagttctcgtggtgtagggccggtgggcaggncggcaggcgaagtgacgcgcacgcgcacgcgcactgctccctggctgatcgctgattcgctgagcagttgagggcggcctgaggcgcgcgtctggggctctgggctgtggctaggcctgttggccgggctggggtgggaggggataagtgatgggtcccctctggcctgggccctaggcggtcgcacaacccgcctaggcccagggccggccctgagtagcatatgtagttaatttacatgatgagactcgctttgttggatgacctaggtagtaatcgagacataattgtagaaaaacttagttctaaaatttgggcaaacaaataatcttgttgcatttttcaaaagtaagctcaagtcaaaaacctcgtaacagtgctcaagggggttatttgtccgatttgcgtagttgggggtgagggtgaaggatgtctggttttgtggtccaggggataattcaatcgaccgtgatagttcggagggtaatttgtactttttctatttaaaaatgaacaaaatttccgcaagctttgtcatcaaaaaaacaaaagaaaaaggtttctcatttgtgcgtaaataaatgcaaaggtttacactcaatccattcagcaaggggccaaagtgcctaacatgattactgaacaataactccacactgaaaaacacagccaccaaactttccactgcctgacaattcatcctggtgtataaaaaggaagtgtaaaaattacacgatgagtatgaaacaaagaccaatctaggtgtgttgtgcaagcatggatcagagttcccacaaactaaattgttgtgtgcgtctatagttgatgcagagggcatagttaaaagaaatcagagtgctatgagaatgagaggtataaacatgggtcatgagaatgagaggtatccaggaagcaggtcagaagcactagacgccacactgatcgaagatgattgaagacattgccatgacaaacacatgatctgcctcaagcatagctgtagtaggtgctttgacctacaaatattgtagatgatgtatttggtgaacaagtcatccgagtggtataaacgaagaaaaagaattatgatgcacgttgatctaggatctcactgtcttttcttgcatagcagaaatcaggtcattaatttgaaaaacgcaggagacatacttcctttttgacaaatattacccactcttggagttttcacaagagtacaaactcggctgctacccaagcatttcaggaaatgtattcacttgtgatgctaactctgccaattcagattatatatgcaaaagcagagatgctatagaaaactaattctgaccagtcgaatggagaggagaaagagtacgctcagatatattagaattaaggtttaacatattgatttttagaacaaattaaaatttgagaataacatgtgggtcaattgcttaagtccaacaaaaattctccctcctgtcttttgtcaaacgattacgactgcaataaattttaaatacttggtttagtcatagaaaatggtatacatgcgcacttttgccatcgtaaacgatactcttctagtcttataaacttattagactttataaatctgttataataaaatgtgatcatcttcccactttttagattaaaatttagatttaccattgtgggagatgcatgccagtgaccataattgaccctacaaatcattaacatgagatagtaatcgtcaattttctatcaaaacaaaggatatatgatcaaatttcccactaaaacaagtatggttttatatgattattcatttttactgttttgaagataaagcctgtcggaggatgaactcctccatcagagaaccgtgaggcccccctttgtgagttcggccgggggcagcgggtgagattcgagggcttggtgagcgaagctgtgtgatcttgagggcgttcaatcccccaaagacgatgagacaaaagaggtttatacagattcgggccgctaagaagcgtaataccctactcctgtgtttgggattatggttgagtgttacaagggttcctaaactccggagagcactctcgctcttcttctccttgagttcgggcctactgagtatcgtcccttttatcggtgggcaaggtcctccttttatagttcaaggggataccacataggcccaacaacctaacttcctcgagaagtattaccatctttgcattaaatgcatgtcttgttccttaacttggataccgcatacacgtcgcctcggtcgtggggcctaccacaccatgccgcctgacacggggggcgcccatgtcattcaccatttaatgggtgaagacttctgggctcctattataccgggaaacgggagcctagctttgaccagagcgggaggaccgactccggctgggataagatgatgagaacctctcaccatcattatttgatgggacatgtcaggctgcacgccgcctgacacacgagcagcgcacaggcgcactagccagtccgatcggtcattcgaccggtcacagaccggttgagtacactgcacgccgcattaaatgcggcgtggcgcgaccgcttgggtcgccataaatgcaggtaggtgggcacctgtacgtggtgatctagagagggggtcgggggagcccgacccctagtcacgggagggggccgccgccgcccgacctcaggcccgatcccccctcgggggagggccccgtggcgcctggggcagccttctccctctagtctcggccagggagtggccgccaccccacctcgggcctgactccccttgggggagggccacgtggtattggggagcggcctcctccgacttgtctttgggaaggagtggctgccaccccacctcgggcctgacttcccttaggggagggccacgtggcattggggggctgcctcctccgactaatctttgggaaggagtggccgccaccccacctcgggcctgactccccttgggggagggccacgtggcattggggggcggcctcctccaactaaacatgataccccgggctcatatcaccgacaaagccatacttgttttgatcaaaatattcatatgcagaagtacttatttccaaatctatgcactgacaagtggattttacagacacacgatgagccaatgtttgttggatggcctcggaccaaggtgataactgatacccaattttaggaaactcacttttaaacgttggggctaactgaatttttgttaaactcttgctagatatttgttatgttgttccaaaattttctctctttttttttcagaaatataaattgagcactgctgttccacgtgactaattaactaacttagtccatcaatattttttccctataatttagtaatttccacagaaccacagtacaagtatgcctacaggagatttcttacggactaaaagaataatataaataatgtctaccaaaaacctagtcagttgattcgacggcaatgagttagctatatttttcatttcgatctttgtgaagattaagtcatatatttttctttctgagaataacaaaattttcatatctcatttgaacaatgctttcctaacgtgcataaatgtcaaggtttaaactttgttcattgaagatgggaccaaacaagttaactgaacaataactccatactattgtaaacgcatacacctatcaaaatctccactgcaagatgattcatggttgtcctataaaagggaaacaagaaagatcggcaagacgatggggatggtacatgattaattgagtagttgtgcaagcatcagactgccgtaagtgtgagaggtatcattcagatttgagatttgagaatgataggcatcgagaaaacaagcgaggggagctcgaaccgacaccgatcatccaagtttccgcattgtacatgatctcagtcttgatgaacatttggtgagaacacacctggcagcagcgggttttttttttgtaccgcacacacactgtaacgatgtattttgctggaaaataggatggatagtgataggaaatgtaagatgatacctcctcttgttgctatccatcctaatgattcaagaagatgaatccacttgtgttgctcacttgctcacctggttaattcagtctatatatgttcaccatagaaatgccactgaaattcaggtagtgcagaggaaaaaaacactgtttgggtaaggctttaccatggttaattacaagttaatataaacatgattaattgagtagttgtgcaagcatcagactgccataagagtgagaggtatcattcagatttgagatttgagaatgataggcatcgagaaaacaagcgaggggagctcgaaccgacaccgatcatctaagtttccgcattgcagacgatctcagttttgatgaacatttggtgagaacacacctggcagcagcggttttttttttttaccgcacacacactgtaacgatgtattttgctcgaaaacaggatggatggtgataggaaatgtaagatgatacctcttcttgttgttatccatcctaatgtttcgagaagatgaatccacttgtgttgctcacctggttaattcggtctatatatgttcaccgtagaaatgccacagaaattcaggtgttgcagaggaaaaaaaacattgtttgggtaaggctttaccatggttaattacaagttaatataaacagtaatataaacgattgcagcatacataggttaaagggttaacctatggctatgcagatcaaaatagaaattgacacaaggacctatagcttgaggaaagaaaaaggataaaaaaatgatgtttgactctctttatcaaacttttgaaactttgattatcaataaaattaaaatattttgtttacaactataaaaggtatatgtagatttatatttaaaattactgccacaacatcataaacttattaaattttataatattattttatttaaaaactgtagcgaaagtctcaccagaagaactactgaaaaaaaaatataaactatgtgtcaacatttgacaataaagaccaggaaggcaactcggaagctgttgatcaagatggtgtaactgaagcagagtataagctagtaagcagagcagcgaagagaagcagtggtggacaaacaatggggggcaaaggggcccaacacctcctatagatgggctacctagtagtatccctaggaatttagtattatttctgattgtcaaataatacaagataataattttaacaagtttgttatattatttttatgggtttctaggaacatattacataccatcgagataactcttttgatgtattttgctttcttctaagttactatcccttttatgtgtaattgtatactggaaaaggcaattagttctatttaatagatagtttgtatgctatgttttgtcccattgacaccctctcaaatttaatcgtgcattcgccactgatgacgcaaacgttggttccagaaatacaaaagctaatttaaattatattgggccaacatgggcagtgtagtgaatatgtactatgtgacccatgttagagaaccaaacagatagagagctaatcatgtttatcgtgtttgtacatatcttgttttgtgtgtgtgggagggggggccaggtgttgaatttttggaaagttcaatttttgacgtttggggctgattgaaaatttggttgttatgaaacattgaaatggtggcagttcagtaccatgtgtacttagtttacacgattagactcttctaccaagattatttgttatgtttggataacaaataaccttacggaatggtcgggtaacaaataatattgttatgtttatcaaaaaacttttggacctaattttctagttttgattttttaagattaaccaaattctctttttcttttgtcagacgaagaacgaaatttccactagtgtcatgatcggaagaagagataaggttgctcatctgagcatccttttcctgatgtgcgtacataaatgctcattcacattcagtccaatcaatatgtgacctaacaaaattgctgaacaataaattcaaacacacacccacaaaactttgcactacatgataattcatcttggtctataaaatgacatgaagaaagattagacgatgaggatggaactagataaatcatggaattgcgcaagcatcatggtgttgtgtgcatctacaattggagcccataacagaattatcattaaaatgttaaaagtgccatgagaatgagaggtattcatgaaacaagtcagaagcccaatatgcttttctatccgattacgcttgcaagttcaggattaccaaaatgttctcgaacatttggcaagaactactcctcgtgggagcttctaatcgggtggtcgtcgagctcgatctcgtcgatatgcccatcgcatgtccctctcccgtttctcacgaaccctgctagaatttcttaaacaattaaaaataagtttaaaaagagaaataggaagaagcataatattagtgtgtatagattttacacatagaaataaatatattgtaatctttatgtgtataatagaaacattatatataaatttttatcttataaactttagatgtctaaaggtgtgtaaacttttgatacataaacttataaaaaaagtatgatgtgaaaaagggaaaacggtgaaaaaaaataaaaaaaaatcgcttggggcgaccagtggctaattattgatttagactcctctattcgagtccaattcgttgcaaattctagcagtagctaacagtataggcgtatggcactggcatgtggaccctacttgcacatgataaacccactttgtaccttaattatgatggcctggctatatagtaaccgagtcccaaattttggaaatttggtttttgacgtttggggctaactgaaaatttggttccaaatttgctatcaaaacattttgagacggtggcagttcagttgtatctgtacttaattacactatgagactcatttttgttagattaccttggtagtaatcgagacataattttaggaaaacttagttttaaagtgggctaaaaaataatcttgttatgtgtttcaaaagttctgcttttttttaacaaaaaaatgaattcaacacgggcacaacagtcccaaacttgcaagcaactactctctctcccggaatatagcaagctataacctaggatcggataggacgtatctggcgtgtccagatttatagtaataagataagtcccatccgattataggttactgtattctgggacaggagagtaattatccaatttcttgtgcttgatcacgcccagacaattgagctcccaaaacgagttacaccatttggtggccctgatctaaatttccatttttaatttcttaagattatgccaagtcctttttcttttcaaaagagcgtgatgaccggaagaacaaataaggttgctcgtgctgatgtgcataattttgtagatgatggataaaatccagcttttggttcaatgaagaatctttttctcttttaaaaaaaagccaaacatgaaagtatatgagaagacaagtttaaccagctggatacaacttattcagatgctgatgtgcatgtataaatgctcctacacactcagtccaaccaataatggacctgacaaaactaatgaacaataacttcataccgaaaacacatcccgtcaaaatttgtactacatgataattcatccccgtctataaaagggcacgaagaaagatcagacaatgaggatggaacaagatagatcaaggaattatgcaggcatccctcctagagtcactgtattgttctgtgcatctacagttggagcacatgccataattatccttttttttaaaaaaaaatcagagtgccatgagaatgagaggtattcagggaacaagtgaaacgcggaaaatacattgtagccaattaggcaattactcttgcaagttaaggatgactagatgactgatcagcaagattcggtgagctagacaaccatgcgtggacgtgatggatcaggatctcctgcctcgtgagagtgcagtcagtgtttacccaccgttcaagcaatccgtcggctggaatccctcgtgcgcttaacagccgatagaaccagcaagccaaagttgccgaatagcgcgaatgagagcacattaatagagttgtggatggaaaattgggcatccctgctctgtttttgcaccgaaaatactaagattgttggtcttccttcccgcctcacctcttcgcagtccaaaaaattgagatgcaataagacatgcaggtttccacaaaacaatttgaaggatttttgctttctgaattttatttgcaaatatttagaatgttacatctgctgccagtagactatttctagtcttctactaccagcatcaattttctcgcatacaacaaattgggtcactagtttgaacaacgcaactatgcaagagacacatccctttttataattttgtctaaggaattggattaaccgcttagagttctcacaagagcatcttcatgtgatgtattcacttgtgacgccaattctgtcaaatacaccaaagagaactatgtctagtggaatagcgaagaaagaccaggatcatatttgttagaattcaggttaatttaacctacggttatatagatcaaactaaacactgacacgtggatctattgcttaagtcccacgaaaatagcccctccagtcagaattttatgacattttactctctgtcaaacttttaaaaatccaattatttttgaatacttagtttatacatataaaaataggtttggattttgtcatcttaaaaagcacttgttagcttttataaatctatcctactaaaaatgtaaacagttccctccttttatattgattagtcacactagtggccaacccgtgcattgcacgacttctgttattgacatttaaatattttcaaagtgatttgttcatgatttagttcgaaatattataatcaataaatatcaaattgtaatcgatttggagtctaaaatcataaaaatgtaaaaactaaaaaatatttgcttctgttattattttttcttttattttaacaagtaattatttttaatattgtaaatattgaaattttaaagtgtgctgttattttccagtggctttgacatatagtacagttcatatcagttactaacaggtttgaaatttataaagtagtaaaaattaatttttatttatcttttctaaattttagaactcataaactaaaattggaaccgatagtattttcggtagcttgttttattaactaggaaggtagcccgcgcatacgcgcgggcatgttgtttaatcttgtttgaaattttattattacgaatgtttgtgtggatgatatttttgaaatatttttttactctattttaaacgtatgttcgttaataactgttgggtgtattacttgaacctgtatatcctcaaatttaatagaaaaaatatgccccaataatggagttagttcatacctatttatattgtgtgtgattctttttttaaaatttttccaaactttatataacattttttttgttttgtatgctatagatgactttaagtaatattttaattttattatatattaatgaaatatattttctattaaaaatataactaatgatactacttcatctaatcaaagatagacttatattacttatattccctctgtcacataaatcgaaggaggtaaattttatcccaaaacaatagaagaatttatacgtaaccaggacgttgattttctaaatactaccacgataatctccaaagtaccgtatcatattttgacaaatatatgtgctgtagtgcatgttcgttcagtgtccggtttgttttccacacctattgtttctaatcacatgagacacctttagtaatttggagaatacatatgttcatttaaattagtgttgtatatttgtcaagtgtttttcacacctaaaatatgatgtgaaattattatcgtaacattaattattacatgttggttccataattgtaatgtatttatggctatagatattagtagtttatttatttaaaggaatacaaccggatcacaaattggatatataattttaaaataatttaaaagatagaatgcttaaaagcattgaatgtatattttatatttacatttacgtaaatttgaagattattatatttttatccttaattcgtagaaaattattttttaaggactgccattttttgggggctttatcataaatacgttttatgttattccggcaaacaatatgtaagcattattgttttttttcaaccatatgtacgtacggagtactttttccggtcaacagttatatatttgtcatatatccgtatataggagaaacaattaatctaacggtgtaaaatgaaacaactaaattgtgttgttttcattttcacaaatataaatttaaattagcatttaatatttgtcgagtgatatttgacaccctaaaatatgatgtgaaataagaaaatatcaaaacattaattattatatatatcaacctcgtatgttaagatcgaacgaacaaagatcattgatgggatatttcatatttgtaatatagatttagtttaactacgtatatttacgtaaatttgtagagtaatatatttatctttaaatattatataatactatttcaaaagaccatcgatctttttcgaatgatacgcttttttttttgtttttatagtaagggattttgaaaatactatttcgaaagaccaccatgcggagatttttctttgttccgaactttcgatggatagcggttaagctttatttattttttcaagtcgtatgtacgtagggactacttatgtttttttttctttttctagcctaattgttatatatatctcccgcatacgtacacagagtaataagttattagtttttaaaataaaatatatctaatggtttaaactattgggttcaccaatttaattaaaaatcggcggtgatatttgcttaaatttatatagtaatagattttatctttaaatattacaaaactctattttaaagataatcgattttttatggtactatacacgtatgttttttttttctttgttgtttttacagtaagtctgtgcatagtttttttctttcaataaacagtaggtaatatattcattgttttttattcttacatatgtacatatatatggagtactcgtgtttttttttctttttccggtgaagtaaggtatgagtttctttttaaataaaatacatataatctaaggtaagattcattgttttctattcttacgtatgttcattagtacgttacctgtacatacgtatatacggggatggatgcatatgtccgcgcagggtacaggggaggactaaaatcagtttaatttgttttctttttccggtgtatagtaaggtattagtttctttttaaataaaatacatctgatctaatctaatggtccaaattatcaggtccaccgatttaagtgaaaatcgacggtgagattagacattgccacgtggcagtctaggagcgtttgtagaagtgccacgtggcggcttgagagcgtttataggaagtttaatggacttttatttagtatataatagatagatagatagatagattgcagatggaaatgtcgatggtaataatatgtcctggcatgatcaacattggcaatttcattttcaaaatatgaccacctaatttttaagtgaaatatttataatactttgacaatatgttttattatttaatttttttataaaaaatacaaccatataattttaatccattacaatctaatcgtttgaaagtactttgttatcaaaagtgagatggccgtagttaacagcatcagtaatttgaatggtatattttatttgacacaaataagtgcaataatcatagtgcacaaatttaacatgcaagctccaagcacaataatttaagggtgattactatcgtgaccttgacataataataaaaaactacttaatccggcagacagtaattcatagaagtagaacttaagtgtaaaaacatggaaaatttgctgtcatgttatcgtaactgcactatatggctatgtaatgtttgaaccaaagcgaattagagcaagcatgctgacttatttagaataaaagcgtatatgcattctagctttgagaagcacatgcaacgcggtgaagttagtttctgtgaagatatatcaaatgctcgtcgctttgatttgccgtgccttagatctatatctgttgtagctgccaatgagattagttaagaataatactgttctagatatgaatgtgttttcactaatgtgtaggttatctgtttgtacaaagtataatatgtgcgtacgtactttcttcgattagaaagatgttttcaattcttatggataagtagaataataaaccgtacgggaatcaaagaattatgttgcgttgatctaggaactcactgtcttttcttgcatagcagaaatcgggtcattagtttgaaaaacgcaagagacatatatactacccttttaacaaatattaaccactcttggagttttcacaagagtacaaaatcggctgctacccaagcatttcaagaaatgtattacttgtgatgctaaccctgccaattcagattctataagcaaatgcaaacatgctgtggaaaacaaattctgaccagcggaatggagaagaaagagtaggtttacatttgttagaacaaattaaaattagatactgacatgtgagtcaattgcttaagtcgaacaaaaaagtctccctccggtcaaattttatgacattttactgttttctgaaacgattgcaactgcgataaattttatatacttggtttaatcatatgaaatggtacatgtgtgtatttttgccatactgaaaagtactcttatagtcttaattataaacttattagactttataaatctattctattaaaaaagtaaaatgtgataatcttctctctttatatattgaaatttagatttaccatcgtgggagatgcatgctagtgaccttacatgaccacacatgtcattggcatgagatggtaatcgcgcaattttcgatcgaaacaaaggatatatgatcaaatttcccactaaaacaaatatgattttatcgtcaaaacagtaaaaagaatagtcaaatattcatatgtagaagtacttatttccaaaactatggcactcacatgtggattttagtgacacatgatgagccacaaccgttccacatgagtaattaactaacttggtccttcaatagcaataagaatttcctaatgtaataattttcacagaagcatattacaagtacgcctaaaggagatctcttacggactaaaaaataatataaacaatgtttaccaaaaactagtcagtcaattcaaaagcagtgagttagctatattttgcatttcgatgtttgtgaagattaagccattttttttctttctgaaaatagcttttttttttcatattactcatttgaacaacacttccctgacatgcataaatgccaaggttttcattgaacatgggacctaacaagataactgaacaataactccgtactactataaacgtacacacccatcaaaccctttactaccagatggttcatgcttgatctataaaagggaaataagaaagattggaaaacgatggggatatggaataagattaatcgagtagttgtgtaagaatcagataaccgtaagagtgagaggtatcattcagagttgagatttgagaatgataagcatcgagaaaacaagcgaggggagcttgaagcgacatcgataacccaagcttccggacggtacacgatccaaaactcatgacgaacattcggcgagaatcagacaaccgggcggctagaaagtgggatggatgggtgatagaaaatgcaagatgagttagcacagcttcttttctctcctttggaggccctacttgttgctatccatcctaacgttttgagaagttttttttttttggggggtgggggggggggagatgggggtgacaaagagatagagactgaaaatttggttgctatcaaccatttagacggtagcagttcagtaccatctgtacatagtttacacgattagactctaattcgctttgttagatgacccaagtaataatcgagacacaatgttaggaaaacatagatttaaagttgggccaacaaataatcttgctatgtctatcaaaagttgggccaaattcttttttttttctcaaaagaacgaaatttccactagtgtcacgatcgaaagacgaaataagattgctcatttgagcatccggtccatttcctgatgtgcgtacataaatgctcattcacaattcagtccaatcaatttgtgacctgacaaaattactgaacaataaattcaaacacacaaccacaaaactttgcactacatgataattcatcctggtctataaaatgacacgaagaaagatatattagacgatgaggatggaacaagataaatcgaggaaatgcgcaagcattatggtgttgttgtgtgcatctacagttggagcccataccagaattatcattaaaatgttgaacaagccagaagcccaaaatgcttttccgttcgattacgcttgtaagttcacggttacttgaccgacctcgtacatttaggaagaactactctccgagggtgcttaattttctcatcaggtggtcgtgccgctcgatatggccaataggccaatcgtgtgcccctttcccatggctcccccttcacatgaaaccagatagaatttcaaaaacaattaaaaaataataagttttaaaaggataatagaaaataaaataaaaattaagtttaaaaagaaagtagaaaaaagataatatccatatgtatagattttacacatagtaacaaatatattgtaaactttatgcacataatagaaacattttgtataaaagaatatttaaatctgaatttaaatcggctatataaatttttagcttataaacattgggtataaggtgcgtaaacttttgatacacaatcttatacgaaaagaaaaactatgcagtgaaaaaagggaaagtggtgaagaaaataaaaaaatcgctcagggcaaccgatggctaattattgattttgactcctcgatttgaatccaattcgtggaaattatagcaatagctactagtataggaaaactacaatgcgggataccgttcggacatggcagtttaatggagactactatgatcactccctccaatacatacataagtcaatttgatttttgtgcgcaatcaagtgctcatgggcacgtgaaacacggacattagcagctaaccggcatacggacacgagcagcttactgaggtgtgctgcagccctccctcaagtgctcatgggcacgtgatacgaggaggtgggccacaccagtacctaagttggtaacatcacggtatgataaagctgcacaaatcaatacattcatttgtgcatactcacggtgagaagacatggggctttctaatattacatttttttatctttatcgttcatctctttagaaattttcttttctcattccggaaatgctataagatggtattccgttcggaatgatactggttaagtatcaagtccagatatatctaaggtattatgtcctgatacctaaccggtatcaggtgatatctctcaggtatcagttgatacttgcaaggtatgatgtcacctgatacctggtaggaatcgcctaatacaagataggtatcatctgataccgattagatcggcatcaaatgatatctcacaagtatcacctgatacttattacgaatcaccttatcctagttagtactactagaatagagggagactatagaaaagtataccgttccaatggaatagctaatgtacatgatatcagcatgataccagagagataacggatctggtacctccggtaccaaacatgataacccataggtattatcagcctcattggatggcatattatatgaatatgccaaatggcatacttataaacgaaaatcaagttgtgaataaaacttttatatatgtgtttttagcgatccaaaagtaaaggctgaaaaataaacttcgatgaaaaaaccccaaaatcagctccaaatttaacgttgaaaattcaaattttggttgataagcatatgaatatgccaaacgatggggacctatatctgatacctaggtatcatgatgacatcagcatgatacctcataggtatcagatctgatacctatgtatcatgttgacatcagcatgataccgaatatggtgtctccggcaccaaacatgatactccgtaggcatcagatttggtacctaggtatcatgctgaagtcacaattggaacaatatattgatctgttcaaactcaagggagcgctcgatgcacgtggggagacatatagatttttttgagagccatgtacattgatacatcacgctagctgagtccgtttttatccttatccatatcttgctcagggaggcggaggtgtcattcaattatcccatttggacggaatgccgtacactagtcgttctcagtacagtatagcacaggcatgtgggccctacttacacatgataaacccactttatacgttaattagatgacagcctggctagtactaacacagtcccaaattttggaagattcgatttttgacgattggagctaactgaaaatttggttgctaactttagtatcaaaaagccgtcgcagttcagttgtatctgtagttaattacactatgagcctcactttggttagattaccttggtagtgaactactaatcgagacataatttcaggaaaacttgttcttaaagttggataaaaaataatcttgttatgtgtttcaaaagctctgtttttctaaaaaaaaatgaattcagcacaggcacaacagtcccatacatgcaagcaactaattaaccagtttcatgtgcgtggtcacacccggacagttgagctcccaaaactagtcacaacatttggtggcactgatctaaatttccaattttgattttttaagattatgccaaattctttttcttttcaaaaaaacgaaattttcactagcgtcatgattggaagaagaaataaggttgctcatttgagcacctttctgcttatgtgcatatttttgaagataatggataaaatccagcttttacttcaacgaagaagctatagccaattatatcgtttttctaaaaaagccaaacatgaaagtatatgggaagacaactataaccagccagatacaacttattcagatgctggtgtgcatatataaatgctcattcacattcagtccaatcaatatgggaccagagaaaattactgaacacaaacttcacactgaaaacatacacccaccaaactttgtacagcatgatatataattcatcctcgtctataaaaaggcacaaggaaaaagatcagacaatggggatggaacaacataaatggaggaattgtgcaagcatcatagtattttttgtgcatttccagttgaagcacatgctctagttattatagaaaagaaaatcagagtgccacgagaatgagaggtattcaggaaacaagcgaaacacaaacaatgcgtagctgccagttactcttgcaagtgcaggatgaccacatgactgatcaccaagatttggtgagatggacaaccatgtgtggaggtgactgatcaagatcgtctgccttcactccttgaaagcaggagcatgcagtcagcgtttatccaccgtccaagcaatccgtcggctcgggtcgctcgtgcgcttaacagacgataaaaccagcaagccagagtagctgcatggcgtgaatcagagcacgttaatagagttgtggagggaaaattgagcatccctgctctgttttgcaccggaaatacagagattgagatgcaatatgagcacagccattaaacagtgattttaccccttcaaaaccgaaaagttgcaggatattaatttgttatattgttccaaaatttaccctcttttttttcctcaaaaattgaaattgagcacagacattccacgtgactaattaaccaatctgctccttcaactctagtatgattttccatatagtttagtaatttcaacagaagagtacacatacgcatgcgggagatttcttactgactataaaaataatgtaaacaatgttttaccaaagctagtccatcgattcgtcaacagctagttaactgtatttcccattttgatgtttgtgaagattaagccataatttatctcaaaacaacaaagtttgaacaccgctttcctaacgtgcataaatgccaaggtacattcagttgattcaacatgggggcgaacaagataacagaagaatagctccatagtccatactgtacagccaacacacaaccatcaaactctccactaccacactattcatcctggtcctataaaagggtgtcaagaaagattgtacaacggtgcggatgaaacaggattaatcgagtaattgtgcgagcatcatagtgtcataagagtgaggttgagatcgatattcagttaagatctgggaatgagaagcattgagaaaataagcaagaggaactcgaagcaacagtgatcaaccaaatatccagattgaagacgatccgtctcacgacagacatttggtgagagctagacagcaacatgaaggatatgtccatttgtacggtagcttttgcatgtgctgggaaatgggacagtaatatgagtttgatggtgataggaaaagtaagacgatttggtacagcgtcttttctctccttttgacgcacaacttgtttatcctaacgttttgagaagatggatccatttgtagaagatggatccatttgtgatgctcacccggttaatttggcctacatatatatgctcaccatataaatgccacacaaattttcaggtggaacagtgaaaaaatactgtttggataaagcttaatccacggttacatgttataaacagtaatataaatgattgcagcatatatggtgattccatttgtattcatatactttgatttgattttttttctgaagagagaacatacatatttaaataaaatcgtattttcatatgtagacttttatttgaaactttcatttcaaaaaattatatttacctaaacagtaaaaatctatatatactcattttttaatctatcagagtactttaaaaaaataaatctgtattgaacgatgtggaatttaacttacacgtgatgagcctgctttgttagatggaccgagtcgtaaccgagacccaatttcaatgaaatttagtttttgaaattaaggtaactgaagatttttgttatgcttttcaaaaactagtttattgtaataaaataaatcgtgcacagccattttactggtagagaaaccatttttggtcggtcgacccaaatccacagtagtcccggttccattaaaaaccgggactaaaaatgatttttagtcccggttaataagaggaagatctttaatcccggttgttgttctttagtcccggttgataactccaaccgggactaaagttcatttttagtcccggttgattccatgtcaggccgtgtcagggctctaggatctttagtcccggttaataacaccaaccgggactaaaaacctatttttagtcccggttggtgatactaaccg

SEQ ID NO: 4620 - DNA, 33796 bp, Oryza sativa
aagcaaaaatccttcaaattgttttgtggaaacctgcatgtcttattgcatctcaattttttggactgcgaagaggtgaggtggaaggaagaccaacaatcttagtattttcggtgcaaaaacagagcagggatgcccaattttccatccacaactctattaatgtgctctcattcgcgctattcggcaactttggcttgctggttctatcggctgttaagcgcacgagggattccagccgacggattgcttgaacggtgggtaaacactgactgcactctcacgaggcaggagatcctgatccatcacgtccacgcatggttgtctagctcaccgaatcttgctgatcagtcatctagtcatccttaacttgcaagagtaattgcctaattggctacaatgtattttccgcgtttcacttgttccctgaatacctctcattctcatggcactctgatttttttttaaaaaaaaggataattatggcatgtgctccaactgtagatgcacagaacaatacagtgactctaggagggatgcctgcataattccttgatctatcttgttccatcctcattgtctgatctttcttcgtgcccttttatagacggggatgaattatcatgtagtacaaattttgacgggatgtgttttcggtatgaagttattgttcattagttttgtcaggtccattattggttggactgagtgtgtaggagcatttatacatgcacatcagcatctgaataagttgtatccagctggttaaacttgtcttctcatatactttcatgtttggcttttttttaaaagagaaaaagattcttcattgaaccaaaagctggattttatccatcatctacaaaattatgcacatcagcacgagcaaccttatttgttcttccggtcatcacgctcttttgaaaagaaaaaggacttggcataatcttaagaaattaaaaatggaaatttagatcagggccaccaaatggtgtaactcgttttgggagctcaattgtctgggcgtgatcaagcacaagaaattggataattactctcctgtcccagaatacagtaacctataatcggatgggacttatcttattactataaatctggacacgccagatacgtcctatccgatcctaggttatagcttgctatattccgggagagagagtagttgcttgcaagtttgggactgttgtgcccgtgttgaattcatttttttgttaaaaaaaagcagaacttttgaaacacataacaagattattttttagcccactttaaaactaagttttcctaaaattatgtctcgattactaccaaggtaatctaacaaaaatgagtctcatagtgtaattaagtacagatacaactgaactgccaccgtctcaaaatgttttgatagcaaatttggaaccaaattttcagttagccccaaacgtcaaaaaccaaatttccaaaatttgggactcggttactatatagccaggccatcataattaaggtacaaagtgggtttatcatgtgcaagtagggtccacatgccagtgccatacgcctatacttgtagctactgctagaatttgcaacgaattggactcgaatagaggagtctaaatcaataattagccactggtcgccccaagcgatttttttttattttttttcaccggttttcctttttcacatcatactttttttataagtttatgtatcaaaagtttacacacctttagacatctaaagtttataagataaaaatttatatataatgtttctattatacacataaagattacaatatatttatttctatgtgtaaaatctatacacactaatattatgcttcttcctatttctctttttaaacttatttttaattgtttaagaaattctagcagggttcgtgagaaacgggagagggacatgcgatgggcatatcgacgagatcgagctcgacgaccacccgattagaagctcccacgaggagtagttcttgccaaatgttcgagaacattttggtaatcctgaacttgcaagcgtaatcggatagaaaagcatattgggcttctgacttgtttcatgaatacctctcattctcatggcacttttaacattttaatgataattctgttatgggctccaattgtagatgcacacaacaccatgatgcttgcgcaattccatgatttatctagttccatcctcatcgtctaatctttcttcatgtcattttatagaccaagatgaattatcatgtagtgcaaagttttgtgggtgtgtgtttgaatttattgttcagcaattttgttaggtcacatattgattggactgaatgtgaatgagcatttatgtacgcacatcaggaaaaggatgctcagatgagcaaccttatctcttcttccgatcatgacactagtggaaatttcgttcttcgtctgacaaaagaaaaagagaatttggttaatcttaaaaaatcaaaactagaaaattaggtccaaaagttttttgataaacataacaatattatttgttacccgaccattccgtaaggttatttgttatccaaacataacaaataatcttggtagaagagtctaatcgtgtaaactaagtacacatggtactgaactgccaccatttcaatgtttcataacaaccaaattttcaatcagccccaaacgtcaaaaattgaactttccaaaaattcaacacctggccccccctcccacacacacaaaacaagatatgtacaaacacgataaacatgattagctctctatctgtttggttctctaacatgggtcacatagtacatattcactacactgcccatgttggcccaatataatttaaattagcttttgtatttctggaaccaacgtttgcgtcatcagtggcgaatgcacgattaaatttgagagggtgtcaatgggacaaaacatagcatacaaactatctattaaatagaactaattgccttttccagtatacaattacacataaaagggatagtaacttagaagaaagcaaaatacatcaaaagagttatctcgatggtatgtaatatgttcctagaaacccataaaaataatataacaaacttgttaaaattattatcttgtattatttgacaatcagaaataatactaaattcctagggatactactaggtagcccatctataggaggtgttgggcccctttgccccccattgtttgtccaccactgcttctcttcgctgctctgcttactagcttatactctgcttcagttacaccatcttgatcaacagcttccgagttgccttcctggtctttattgtcaaatgttgacacatagtttatatttttttttcagtagttcttctggtgagactttcgctacagtttttaaataaaataatattataaaatttaataagtttatgatgttgtggcagtaattttaaatataaatctacatataccttttatagttgtaaacaaaatattttaattttattgataatcaaagtttcaaaagtttgataaagagagtcaaacatcatttttttatcctttttctttcctcaagctataggtccttgtgtcaatttctattttgatctgcatagccataggttaaccctttaacctatgtatgctgcaatcgtttatattactgtttatattaacttgtaattaaccatggtaaagccttacccaaacaatgttttttttcctctgcaacacctgaatttctgtggcatttctacggtgaacatatatagaccgaattaaccaggtgagcaacacaagtggattcatcttctcgaaacattaggatggataacaacaagaagaggtatcatcttacatttcctatcaccatccatcctgttttcgagcaaaatacatcgttacagtgtgtgtgcggtaaaaaaaaaaaaccgctcctgccaggtgtgttctcaccgattgttcatcaaaagtgagatcgtgtgcaatgcggaaacttagatgatcggtgtcggttcgagctcccctcgcttgttttctcgatgcctatcattctcaaatctcaaatctgaatgatacctctcactcttatggcagtctgatgcttgcacaactactcaattaatcatgtttatattaacttgtaattaaccatggtaaagccttacccaaacagtgtttttttcctctgcactacctgaatttcagtggcatttctatggtgaacatatatagactgaattaaccaggtgagcaagtgagcaacacaagtggattcatcttcttgaatcattaggatggatagcaacaagaggaggtatcatcttacatttcctatcactatccatcctattttccagcaaaatacatcgttacagtgtgtgtgcggtacaaaaaaaaaacccgctgctgccaggtgtgttctcaccaaatgttcatcaagactgagatcatgtacaatgcggaaacttggatgatcggtgtcggttcgagctcccctcgcttgttttctcgatgcctatcattctcaaatctcaaatctgaatgatacctctcacacttacggcagtctgatgcttgcacaactactcaattaatcatgtaccatccccatcgtcttgccgatctttcttgtttcccttttataggacaaccatgaatcatcttgcagtggagattttgataggtgtatgcgtttacaatagtatggagttattgttcagttaacttgtttggtcccatcttcaatgaacaaagtttaaaccttgacatttatgcacgttaggaaagcattgttcaaatgagatatgaaaattttgttattctcagaaagaaaaatatatgacttaatcttcacaaagatcgaaatgaaaaatatagctaactcattgccgtcgaatcaactgactaggtttttggtagacattatttatattattcttttagtccgtaagaaatctcctgtaggcatacttgtactgtggttctgtggaaattactaaattatagggaaaaaatattgatggactaagttagttaattagtcacgtggaacagcagtgctcaatttatatttctgaaaaaaaaagagagaaaattttggaacaacataacaaatatctagcaagagtttaacaaaaattcagttagccccaacgtttaaaagtgagtttcctaaaattgggtatcagttatcaccttggtccgaggccatccaacaaacattggctcatcgtgtgtctgtaaaatccacttgtcagtgcatagatttggaaataagtacttctgcatatgaatattttgatcaaaacaagtatggctttgtcggtgatatgagcccggggtatcatgtttagttggaggaggccgccccccaatgccacgtggccctcccccaaggggagtcaggcccgaggtggggtggcggccactccttcccaaagattagtcggaggaggcagccccccaatgccacgtggccctcccctaagggaagtcaggcccgaggtggggtggcagccactccttcccaaagacaagtcggaggaggccgctccccaataccacgtggccctcccccaaggggagtcaggcccgaggtggggtggcggccactccctggccgagactagagggagaaggctgccccaggcgccacggggccctcccccgaggggggatcggtcctgaggtcaggcggcggcagccccctcccgtgactaggggtcgggcttccccgaccccctctctagatcaccacgtacaggtgcccacctacctgcatttatggcgacccaagcggtcgcgccacgccgcatttaatgcggcgtgcagtgtactcaaccggtctgtgaccggtcgaatgaccgatcggactggctagtgcgcctgtgcgctgctcgtgtgtcaggcggcgtgcagcctgacatgtcccatcaaataatgatggtgagaggttctcatcatcttatcccagccggagtcggtcctcccgctctggtcaaagctaggctcccgtttcccggtataataggagcccagaagtcttcacccattaaatggtgaatgacatgggcgccccccgtgtcaggcggcatggtgtggtaggccccacgaccgaggcgacgtgtatgcggtatccaagttaaggaacaagacatgcatttaatgcaaagatggtaatacttctcgaggaagttaggttgttgggcctatgtggtatccccttgaactataaaaggaggaccttgcccaccgataaaagggacgatactcagtaggcccgaactcaaggagaagaagagcgagagtgctctccggagtttaggaacccttgtaacactcaaccataatcccaaacacaggagtagggtattacgcttcttagcggcccgaatctgtataaacctcttttgtctcatcgtctttgggggattgaacgccctcaagatcacacagcttcgctcaccaagccctcgaatctcacccgctgcccccggccgaactcacaaaggggggcctcacggttctctgatggaggagttcatcctccgacaggctttatcttcaaaacagtaaaaatgaataatcatataaaaccatacttgttttagtgggaaatttgatcatatatcctttgttttgatagaaaattgacgattactatctcatgttaatgatttgtagggtcaattatggtcactggcatgcatctcccacaatggtaaatctaaattttaatctaaaaagtgggaagatgatcacattttattataacagatttataaagtctaataagtttataagactagaagagtatcgtttacgatggcaaaagtgcgcatgtataccattttctatgactaaaccaagtatttaaaatttattgcagtcgtaatcgtttgacaaaagacaggagggagaatttttgttggacttaagcaattgacccacatgttattctcaaattttaatttgttctaaaaatcaatatgttaaaccttaattctaatatatctgagcgtactctttctcctctccattcgactggtcagaattagttttctatagcatctctgcttttgcatatataatctgaattggcagagttagcatcacaagtgaatacatttcctgaaatgcttgggtagcagccgagtttgtactcttgtgaaaactccaagagtgggtaatatttgtcaaaaaggaagtatgtctcctgcgtttttcaaattaatgacctgatttctgctatgcaagaaaagacagtgagatcctagatcaacgtgcatcataattctttttcttcgtttataccactcggatgacttgttcaccaaatacatcatctacaatatttgtaggtcaaagcacctactacagctatgcttgaggcagatcatgtgtttgtcatggcaatgtcttcaatcatcttcgatcagtgtggcgtctagtgcttctgacctgcttcctggatacctctcattctcatgacccatgtttatacctctcattctcatagcactctgatttcttttaactatgccctctgcatcaactatagacgcacacaacaatttagtttgtgggaactctgatccatgcttgcacaacacacctagattggtctttgtttcatactcatcgtgtaatttttacacttcctttttatacaccaggatgaattgtcaggcagtggaaagtttggtggctgtgtttttcagtgtggagttattgttcagtaatcatgttaggcactttggccccttgctgaatggattgagtgtaaacctttgcatttatttacgcacaaatgagaaacctttttcttttgtttttttgatgacaaagcttgcggaaattttgttcatttttaaatagaaaaagtacaaattaccctccgaactatcacggtcgattgaattatcccctggaccacaaaaccagacatccttcaccctcacccccaactacgcaaatcggacaaataacccccttgagcactgttacgaggtttttgacttgagcttacttttgaaaaatgcaacaagattatttgtttgcccaaattttagaactaagtttttctacaattatgtctcgattactacctaggtcatccaacaaagcgagtctcatcatgtaaattaactacatatgctactcagggccggccctgggcctaggcgggttgtgcgaccgcctagggcccaggccagaggggacccatcacttatcccctcccaccccagcccggccaacaggcctagccacagcccagagccccagacgcgcgcctcaggccgccctcaactgctcagcgaatcagcgatcagccagggagcagtgcgcgtgcgcgtgcgcgtcacttcgcctgccgccctgcccaccggccctacaccacgagaactgcagtgcaggcccaggccgagccgcgtcgcttcgtcgccgtctcgccgatgccctagtccgcgagaggccgccgtgagtgccaagaccgcatcggccccactagcctatagcgcctgatcgccgtggcccatcggccaagccaccaaggcggtatcgctgtcgacgcttcttgccggctgcctggatggtggctggtccctgccctacccgcgtgatctgtgattgtcatcggctcatcggccatttcccattcgccccccttcttcaggctgaaggtaggtcacagacctagaagtcaatcgacaagctctatgcagctatgcctttatcaatttactttgcaatttcactgcttcaggtgttacaatgttacctagaaacatttgttgggtgctatacataactcataaggtcgcgaaaaagctcttttttataagggacatgggatatttgtggtctcctattaaggtgttcatactaatttgtttctatggtatttttagttgtcaattatactattgatattatttattaaagattaaattgctctatcgcaacttgcaaactgcttgatttattatttaccgtgttaaaaatgtttatttgtgtcactctatggtatatgtgctttatagagtatactgtatgtattagaagtaaaaaaaattagatataactccttaagggctaactctaagacccatagcgtcaagtctgcctagggcctccaaaatgtcaggaccggccgtaatgctactgaactatgatagcaaccaaagttttctgtcagtcccaaacgtcaaaaactgtttttttttccaaaaaatttgggactcggttaatagccaggctatcatataattaacgtacaaagtgggttcatcatgtgtatgtttgatccacatgtcaataccatactctagaatctgtaacgaattggactcaaatcgatgaatacttgttccatcctcattgtctgacctttcttgcttcgcttttatatactactggatgaatactcgggcagtggaaagtttggcagggggtgtgtttttcgcgcaaatagatttcagatttactagtcgtttgatctacaatatatgataatatgagtagcaccaatctcagttatatttttcttagtttactgtaattgtaaatcggattatctaaaacttgatgggtgtagctatatatatggcgccatatttttcatcaaaaaatagtcggtatttatttacactgtaagtccctaaattacatatgtaattttagtgtatttacaatgtaagtcacaaaattatatatgtaagtactaaaattacatatgtaaattcgaaaattacataccaattatatatgtaagtggggtgtaaatgaggtataactattgtgtaagtggctgaaaaaaaatcgactgtagcatatggcgccatatttctagcaactccgaacttagatatatatagcatggttttctgcaactgcataactattttaggttgggttatatgacacatgttaacacccctgtagatatatgtatcccatatggccttacaattattataacttagtgctcagcagtctgtacatgacaatgcatggaaatttggctaattagtcgcgtgaaatggctgtgcatgatttattttattgaaataaactagtttttgaaaaatatttaacaaaaatattcagttacacttaatttaataaactaaatttctctgaaattgggtattgttatgactcggcgcatctaacaaagcaggctcatcacgtgtaagataaatttccacatcactgaatacagatttattttttttcaaagtactctgatagattaaaaaattgagtatatacatatttttactgttgagttaaaaaagatttgttcaaatgaaagtttcaaataaaaatctacatatgaaaacatgatttaatttaaatatgtatgttctctcctcagaaaaaaataatttatatggtgcaatcatttgtattactgtttataacttgtaaccatggattaagccttctccagacagtattttcttatctgttccagctgaattttgtgtggcatttatatggtgaacatatgtaggccgaattaaccaggtgagcatcacaaatagatccatcttctcaaaacgttaagataattaaacaagttgcacatcaaaaggagagaaaagaagctgtaccatttttgggtaaatgcaagagctaccgtgcgtgcaggtcggagcaaccactgctgctaagtgtgaggcaggattcaatcacattaattgttgtctagctctcaccaaatgtccatcatcagatagagcatctttaatctagacattttctcgatctctttggcttggagttcctctcacttattttctcgatgcctctcattctcagatcttaactgaatacccccaatctcactcttatggtactatgatgcttgcacaattactcgattaatcatgtttcacccccatagttgtccaatctttcatgatttcctttcataggaccaaggtcaatagtgtggtaggggagagtttgatggttgtatgtttactgtagtatggagctgttgctcagttatcgtgttaggtcccatgttgaatgaactgaatgtggaccttggtatttatgcacgtcaggaaaacggtgttcgcatgaaaagtatgaaaaatttgttgttttgggataaattacggcttaatcttcacaaacatcaaaatgggaaaaatagataactcgctgttgtcgaatcaactgactaaaacagtgtttacattatgttttagtcagtaagaaatctcccacatgcgtacgtgcttctgtggaaataactaaattctagggaaattcatgttagtgttgaaggaccagattggttaattagtcatgtggaatgtctgtgctcaatttcagtttttgaatataaaaaaagagggtaaattttggaagaacagaacaaattaatatccattaaaactgagtttttcggtttcgaagttatgagtattaacaaaaatttcagttatgagtattaacaaaattttcagttagccaaagcctttaaaactgaatttttcggttttgaaggtaaaatcattgtttgttgggaaatttgatcaagtaccattaatttgaccaaaaattaaggattttcaatatctatttcaaaagcatgtgggggtaatttgaagtcacttacatgtctgaggatggtaatatcaatttatctacttctataaaagtgcagttgttttcctcacacctcaccacccgaaaaagaccggaccaatttgattgcacactttttgggaaaaaaattatagaaaaccaaatagttctatcgtactatgttggaaaaagaatggcccatataaaacgaatagtttatacaagagtaaagaccatcacctgtccctaaacttgtaccgctgtgtcatagcggtccctaaactcgcaaatcgaccgttcaggtcctcaaacttgttcaactatgtcatcccggtccctaaaattgcagatcactcatttagattctccaacttgttcagttgtgtcacctcggtccctaaacttagatttgaatatcatctgggtcaaataggacggtctaaagactttatattaaaaaataattcacccctttttcatgtgaactctaataaagacaaactttatatcaaacttgtagccctcgacacgatctacaactttatagttgattttttttatttcaagtcattttttgtcccaaaatgtaattttaaaattaaaatttcaaaatctataaacatgcaacaatattttgggaccctaaacagttttaattcaaaaacttatcaactacaaagttgtaggtcacgtcaagggctataattttgatataaagtttgtcttcattagggttcacatgaaaaagttatgaattattttttatataaagtttttagatcgtcctgtttagagaccggggtgacacaactaaacaagttggaggacctaaacgagtgatctgcaagtttaggaaccgggatgacacagtcaaagaaatttgaggacctgaacggtcgatttatgagtttagggaccgggatgacatagcggtataagtttagggaccggtgatatactttactctttttgttttttagtcggtaagaaatctctcacaagcgtacttgtactctgcttatgtggaaattactaaattacacggaagttcatattagtgttgaaggaccaaattaattggttaattagtcacgtgtaacggctgtgctcaatttaaattttttgaaaaagaattgtaaattttggaacaacataacaaatattcagcaagagttttttttaaaaaaaaacttcagttagctccagcctttaaaactgaagtttcggtcttgaagataaaatcatttttttgggggaaatttgattatgtcccttcattttgatctaaaactataaggattatcattatatgccaataacatgtggcaggtggggtcataaaggtcactaacattttcaaggatggtaaatctcaatcaatcaatcaatatatctaatatctaatgctggcttttctgccagtttctgattggtccgaattcggacctacgattttgcgacacgtcgcactaggaaagaggagtatgagctttggaacaagtaggaatactttatcagggcaaaggccctctgcccaagccggtgggccgagcctgccctactggtctggcctggtatcagcagcaatgctcaagttaatcggtttatttaggaaatttcaatcgcatcaattaatggattacataaatttcatggggaataaatcatttttatcaattaatgcaagaaatcatccaaatatagatcagattattactgcatcaatgtcaagtggcatagtgatatcaattttaagatttaaaactccaagtcaaccaccttcaaacaagcacagaaaaaactttgtcctgcatgccttaattttatctacaattttataatgaattttacaataattaacttaaaaaaatgtaagacttatattttttttgaacgagtttatgttatatacggctatacaccgtctcgcgtgcctattgggcacacctattttctagtttcaatataaaaagagggaatatgatcacattttactatttaaatggaatagatttagattatgaaaggactttataagactacaaatccgcacataccatttcacatgatcaaaccaagtattaaaattttattccagttttaaaggtttgagaaaagagtaaaatgtcataaaattatggctggagggattattttgttggacttaagtaatggacccgcatgtgagtgcctaatttgatctaaaaaaaaccaaatgttaaacatcaattctaacaaatgtgagcctgctctttcttctccattccacttggtctgaattagttatctatggcatctctggttttgcatatagaatctgaattgacagagcaacacaagtgaatacatttctcaaaatgcttgggtgaatcgcattgcacagataagtttgttaaaatggaagtgtctctcgcgtttttcaaaccaacatgacccggtttgtgctatgcacgaaaagacaatgagatatgcgagataatcagcatgcaacattattttcttttttggctataccatcatcagtcgccttgttcaccaaacacaccaaccatgaatgtgtgctgttcaaagcacccaccgctgctaagtgtgagacagacagtatggtgttaattaatggctatcaagcttctcccgtttgttcggcaccggtgagatactcttgcacattcaagaatcgttgatcaatgaggcatcttatgtttctcacttaattcctgcattcctctcattctcatagcactctgaatctgttatatacataattctgcccttgcacacaacaatataacttgtggacactctaatgcttacacaactcctcagttaatctttttgcatccttatcatctgatctttcttgctcacgtgtagcatatccttatgtagcattaataatttcatattaaaagcgtactcacgtgtgcctaatatttatatgcacttggattaaaacctatttggtgagttatttttaaataggaatgaatgtttaactttaacaaatcatcaaacataaattaggtgatatataattgaatagaaaaccaaaaaaaatgtaaaaaaagaattaatcactgacaaacttatcaagtatataatgtctaataagaatcctaattaaaaagcatgtcatgtgtagagaattagtgcaaatttagaagaggaatgaatcaaccaggatggttgtacgctatagatataccaaggcattaattatgttgaacatcatgtaagaagttataatataccaacctgttcactcaaactcctaactcaaacagttagctgtgactgagatcttacgaactaatggaaatcatcaaagttcgttcttttttttaagattaattagtggtaatctaaaacgagattagttaatgcaacacaaatcaagcatatagcccaaactatatagatgcacttaactagacaaccggaggcccttagacacctggggcccagggcggcctcactgctcgccctgccccagggttggccctggcagcaaaggctgaagcatttgcacctaagttagggccggcgctgggctaatgtggatggtgcgaccgtactaggacttaaaaaattaggagcctccaaaatatgtattctatggtaccacgctgctggatgagattgatattgacactatcatcattgattttgcatctagaattgttagaagaaattattttaaatgatctagagacatttatttttttattttaaacttattagtgtgaaattcgttaatgacaatgagtttttaaatattatcttgtatttttatagtgaatgggggccttcattttttattccacaccgggccaccaaaaagtcagggccggccctatcctgagtcctcggcgatggcgagcaccatggcttgaggcgctgaggggttcaaatacggtgacaatgacagtaagagcatgatggcccagatactctttagttctttaaaaactttttggcaatgtgcaactacttccgaacatccactacaccatgtaccaaaattggtgacaaacatcgtcaaaaaaattcatttttcgttcattagaaacttggaacaacaaggggaggtaaacaaaggaaaggcaaaggttgaggtcaaaggatcaggcaaaccttattgttatagatgttatactaaagggcatacaatgcaggaatgttcttctaggttttactatgagatttgtgaaagtgaggatcatgttgcttctcgttgcccaatttttaggtcatctgttaaacctgttgctcagttatgtggttatgctggagatggtttgggtttcttccatatacctctttcagctggaatgagggttaagcatgagcctaaagcggctatggttaaggtcactaaaggacagatgtctgtaagttctattatttctgagttggagaggttcatacctggtagatggaagtgggtggtgcatgataatggtgatgggacttttcgttcttctgcagctgaattaagtcgtatggtcgaatggggcaaggtacacactaaagttggtgaggctgaaatggagattgtggaaaggggagttgggaatgaggtgaaatatgtgatgccaaaagtgtgggtatagtgcaaaggtcttccttctgaattgagagagtatttaatcatttgggctgttggttccatccttagaattactaaagctgttgatatgatatttactagaaggtatgatatagctcgcttacaagttttggttcttgatccgtctctgattcctgatgtggtggatatggttattggtgatcacttgtatgagctgtttagagtagaacctgaaaatgggcctaaggagcctgtgcctatggagatggagaatttggatgatggggatttggaaaagaaaaaagaggggaacgtgaatcaggatctggggaagggggctggtttatttgattcaggtaatagctctaagatgggttctggtggtcaatttagtgagaggggttgtccttctgctccctcttctcagctaaatctgatacctgaatctgatggcttgactgtttctgatgaagaatttgatggtttagatgaggagactataatggttgacaaggcccagattcaggaaagtcttgtggcaaagctctctgttatccctgaggcagtaatctctccatcaaggaagagtaagagaagggaaagtgatagcgattagcttgttcttgaaagggccgaaaagttgaaggctgataagaacttggagaacctgcaggcttaaggtaattcagttaataatgtttcttttacacaattttcaaatgatcaaatatctgcacatcttcagaatcttggtgttataccttctagtaaaaatgttgttttagatgatgcaattaatgatttgaaatgtgtagaaaataataggataagcgaatatgcttgttcttctattaatcaagtttgtacccctaatgttgatactgagtcattagatgaccagttggaggataattttttactacaacatttatgtagtgaaattatggaagagatcatggattttagtgaggactgtgagaatagtcttaaaaacactttaaatcctatggcatcttctcctaactctaagaaaaagagtaaaagggggaaaaataagaaaaataataaaaatagtttcaaatgaagggaatcttttagaattgtgatgggtttaaggacccaaaataacataagtttatttctgacttgaccaaggaacatcaacttgactttatagcattgtctgagacggttaagaaagaatttactccagctgcacttaaaaatctttgtgctggtaaggagtttttgtggcattgtaaacctcccagaggtaggtctgggggtcttctgttaggcatcaatttactaaacgttgatattggtttaattgatgaaggtgatttttatattaagttccatttatgtaacaaagttgataagttcaagtgggctttagttttagtttacggaccggcacaaaatgaacttaaggatcagtttcttgctgaattagttaatttgtgcagtcatgaatccctaccaattctcattgatggtgattttaatattttacgtagccctgatgaaaaaaataatgacagttacgatgatagatggccctttctttttaatgctattattgatggactgtgtcttagggagttgcaaatgtcaggtacgatttatacttgggcaaataacttagcaaatccaacttatgagaaacatgataggattttgatgtccactgagtgggaacataaatttcctttatcctcggtggttgctcttaatagagatatttcagatcatactccactttttttaaatacaaactccacctcttcaggtaatgcacaacatagttttaaattcgaacttggttggttattacgtgatggctttgtagatatggtaaaggaggtctggtctagtgtacatgagggtaatactcctatggagcgatggcaggcgaagattcgccgattaagacagcatttgagaggatgggctaaacatacaagtggtatgtataaaaaagaaaaaaaaggagattttggataggttggatttgttggataaaaaggctgaatctgttcttctaattcacgaggaaattgattttagatggttttgtaggaatagattatctactcttatgagagaagaagaaattaagtggtatcaaagggctaaaactaaggatattttggagggtgattcaaatacaaagtattttcatttggttgctaacggcaaacatagaaaaactagaatttttcaacttcaagacggggatcaattgataaatggtgatgcaaatctaaaatcgcatattaccacttattataaagacctctttggtcctcctgatgattctgatctccagtttgatgaaaataattttgtggacatcccacaagtatctcaattagagaatgaagctttaatacaagaattcattgaaaaggaaattaaagaggctattttccaaatggaacataataaagctctgggtcctgatggatttcctgctgagttttatcaggtcttttgggatgtcattaaggatgatatgttggatcttttcagagattttcataatggtactttgcctttattctcccttaactttggtactattattcttttgcctaagtgtgctgaggccatgaaaattcaacaatataggcctatctgcttacttaatgttagttttaagatctttaccaaagttgctacgaatagaataatgagtgttgctcaaaaggtgattagccctactcaaactgcttttatacctgggagaatattatggaaggtgttgttattttgcatgaaactatgcatgaattacatcgcaaaaataaaagtgctgtgatttttaagatcgattttgaaaaagcctatgacaggtttaaatggtcttttgtacatcaaacgctcagaatgaaaggtttctctcctaaatggtgtgagtggataacttcttttattcaagggggacatgttggtattagagtaaatgatcagaccggtaataattttcatacttacaaaggtctaaggcaaggagatcctttatctccaattctttttaatatagtagcagatatgcttaccttattaattaagagggctaaagatgctggttcattgaatggggtagtccctcacctagtggatgatggtttatctattttatagtatgcggatgataccatcatttttttggaacatgacttacaacaagcgaagaatcttaaattgattttatctttgtttgaaaagttgtctggcttgaaaataaatttttataagagtgaattattttgttttggtcaggcaaaggaatattatgatgagtaattctaacatctttggttgtaagtttggctctctccctgttaaatatcttggtataccaatgcatgttagaaaactaaataatagagattggaaaatgattgagaaaagaattgagaaaaaacttagtagttggaaaggaaaacatttatctgttgggggtagactggttttgattaactctgtactttcaagtttagctatgtttatgatatctttttttgacataccgaaaggggttcttcaaaaaattgattattatagatcatggttcttttggcaaggggatgaccataaaaaaagtagacttactagatgggatatcatttgtcaacctaaggatcagggaggtttaggggttcataacttggaaatacaaaacaagtgtctcctgagtaagtggttgtttaagttgattaacaaggaaggtgtatgtcaaaatctattgaagagaaagtatctctacagtcagtctataacccaagttaataagaaacagggcgattctcatttttggtcaggtctcatgaaggtcaaagataccttcttagatatgggtttttggattgtaaataatgggaaacaaataaggttctgggaagataaatggctaggaaacctggcttttaaagacaaatatacatctttatactctattgtccgaaggaaaagttctactattgctaatgttatgagatctgttccactcaatgtttcctttaggagatcattagttggtcagaatcttgcatattggcacgaattgtgtgcttctattgtacatattcaattgaatcaatcctctgatagctttagatggaattatcatcagaatggaatattttctgttaggtcgatgtatctagctttaattaataatggttatattgagagaaaaaaagattatttggaagcttaagatgccacttaagattaagatttttatgtggtacttgcttaaaggggttgtgctaaccaaggataatttggcaagatgaaattggaatggcagtttaagatgttgtttttgtatgaaaaatgagactattcaacatctttttatagagtgtcattatgcaaaatttgtttggagagcaatacagttctctcttggtttataccttcctactaccatatctaatatgtttgatggttggctcttggaggtagacaagaagaagagtaaactcatatttgtaggagcttctgccatatgttgggctctgtggttgactagcaatgatatggtttttgacaaatcaccatctatctcatatatgcaggtaattttcagggcaacatattggctccgattttgggcacaactgcaaatgtgtgaagatgatcgagatcttatgaaggttgcatgtcgtaggcttgagataacggtcatgcaactccttgcaaactattgatggagattcacaaatagacttgaataaatgtgctctccttatcttagtttgatcttttattttgttgggtgtgtttaattaatttgaactacactcagtgtttgggtgttacttttgtaataattggctatagctctgatgaacaaaggccgggatgttttattccattatctaaaaaaattagaaacttggaaatgtgcatgcacttattcatctatgactatgttcacaagatcaaatcaatccgtatgaaggaaatggttacaattacatgttaactgttcatgtgtggatgcatccaacatgttctcgaaaaaatcaaatcaaataatggatacaaacgtaatcactatatatgatgcaatcaattatattactgtttatagcttgtaaccgtaggttaagccttatccaaacagtattttttttctctgcgctccacctgaattttctgtggtatttctatagtgaacatgaatagaccgaattaactgggtgagcatcacaattagtggatccatcttctttgtacgttaggatatatagcaacaaattgcgtgtcaaagggagaaaagacgaagctgtacgaactcatcttgtgttttctatcatcatcagtcccattttccagcaaatgcatgacctacaatgcatgcaggtcacaaccgtgggtaagtgtaagacaagccgtctccttcatataattttatacctctcaccaaatgttgttcatcgtgagttgcaaggggaggggggacacatgcatgccctaggcaacctgcgcgacgacccggggcctgtggcagaagccccatttagtacttctattgtgtaggacccaaacttccatggacggggctaaggccttggccaatttctagttccgcccttcagaagttcatctacaatctagaaattcggttaatccgtgttgcttagagttcatctcacttgttttctcgatgcctctcattctcagatcttagctgagtacctcaatcttactcttatgacactatgatggttgcacagttactctactaatccttccatcccatcgttatccaatctttcttgtttcacttttataggacaaggatgaatcgtctaggggtgaagagtttgatgggtgtatgtgtttatagtggcatatttattgttcagttggcgtgttaggtcccgtgttcaatgaactgaatgtgaacctttgcacttacgaacatcgggaaagcggtgctcaaatgagaaatatggaaattttgttgtttcgagataagctatgacttaatattcacaaaatcaacatgggagatatagctaactcgttgttgaggaatcgcttactagttttggtgaacactgtttaattttagtaggtatgaaatctcctacaagcgaacttgtactctgattttgcttggatggttagtctcaatttcaataacaaagaagagggcatatgatcaaaatttactttttaatataatagatttatataatccaataattttataagaatataaaaatacttttaagatgacgaatccacacatactattttatatgtttaaactaagtatttaaaaattattgcacttttaaaattttgacaaaataataaaatgtagtaaaattttgacttagccgatagatctatgtgtcagtgtatagtttgttccaaaaaatcatatgttaaaccttaattctaacaattgtgagtctgctctttctgctcaattccactggtcagaattagtttcccgtggcatgtctgcatttgtatacagaatctgaattgacagagttagcatcacaagtgaatacacaacacatttctcaaaatgcccgagacgtactcttgtgaaagctccgatgcaagcggttaatccaattccacggataaagtttgttaaaggggaagtgcctcttgcgtagttcagactattgatccaatttgtgcaatgctagaaaaagacaatgacatctggccaacttgcaagcttgtcttgcttttcctatacatcatctacaatgtctgcaggtcaaagcaccagctgttctaacggctattgatctacactgagttgtttggcactgttcagttcagatgctcttgcgccttcaaacttgttcgatcggtgaggcgtctagtgcttctcccttgtttcctgcatacctctcattctcacccacttacctctcattataatagcactatgatttcttctacaaatataataactctgccccctgcatcaactatagacacacacaacattaatttgtggtcactttgatgcttgcacaacaccttgactagtctttgtttcatactcattgtctcgtcttttttacttctcttttatacagcatgcatctcattgacatcgttgtcaagctctaaacagatactcgtaatgagccaaaatgccaaatattcacatggttgtcaagatcagcgaatgatcaaatgcctcgcacttctttcctgaatgccatcattcttacctgaatgcctctagcttttatggcactctcctgcttgcactacttatcgattaatcccttctatagagtagaatgaatcgtctggaattggagagtttgatgcgtctgtgtttgcagtactatgaatgaagttattgttcagttatatcgtgagaagtcccatgttgaatggactaaatgtgaatttgtgatcctttccatttatgtgcatcacgaaaacaatgtttaaatgagaaatgcaaaattttggtacttttcaaaaaaaaattggggcaaaaccttagtaaacagtaaaatggaaaatattaatctctactgccgaatcgaccgactagttggtacacatggcttatattatatttttagactgtaaaagatctcttacaagcatacttgtactctgcttttttggaattactactaagttctaggggaaaagcagttcatattagagttgatgatgaaatttggattctaaatagagtccaaggaccaaaatgcttctttccaccggtcagcacttgtttcttgtggcatctatacactggcatgtataatctgaattgaccgtgtgagcactgagcatcgtaggtaaacccatcttcgaaaaattctttgataacaatttacttgtacttctgtgaaaacatctaatggttaatctgattccacagataaaaaatttgtttatttaaaaggattgtgtttcttgcaagcttgtgatgctgttcagagtaatgatccaatctgtgccttctgcgagaaaatgacagtaaaaatccaatcaccacgcgcaaggtcatcttgtgtctcctgaaatcatcagtcgccttcatcaaatgcgtcgtctacaatttgtgcaggtaaagcaccactgctgctgagtttgagcaaatagtagattatgtgcttcacaatactatcgaattcacctcagaagtttgtcgccggtgaaatactattgcagcttcaagctaaccgatttagtgacgcatataatgcttctcactcatttcccgatggcctctcattcttgcccaaatacctctaattctaatggcgctctaacttactcaaggtaattctagcatatgccccaattttaatttgtggacagtctaatgcatgtacaacttcagaatttcacgaataatcttcattccatccttgttgtttgatctttcttgcttcccttttatacaaggatggattgtcaggcagtggaaagtttggtgggtttctattttcagtgagaagttattgttcagtaatcatgttatgcacttaggtcccatgttgaatgggattaaatgtgaatttttgcaatttatgcatatcagggaagctggaaaggggtgctcaaatgagaaaccatttttgcttcttcagaagatgacgccggtacaacttttgttattttgatgaaaatttgtggcatgaccttcagaaatatcagaatgggaaatttaggtcactgccaccaaatggttctctgctccacctgattctgtgtctggtacttgacaaatgatcattctgagtcgggtcgtcttgaatccggaagatcggttcatcggtgacctatcaagtgcctcccacttctctccggggactcctaactagcgcgtgctcgctgctagcgagcactctttccctattaactacctctattaacactattacttaatatacttaactacctctattagttaatatacttaacactaaagatagtaattaggaaagattcaggagatgtttttactaatagattgaaaattttttaagttacatttgaaaattttcgatttaaattttaaagtcaaattttaaaaactttcaactcagatttgaaaactttcaactcaaattcgaaaactttcaactcgagattcgaaaactttcaagtccagatttgaaaaatttgaaaactttcaatttgagatttgaaaactttcaactcgagattcgaaaactttcaagtccagatttgaaaattttgaaaactttcaactcgagatttgtaaactttcaagtccagatttgaaaattttgaaaactttcaactcgagattcgaaaactttcaagtccagatttgaaaattttgaaaactttcaaatcgagatttgaaaactttcaagtcaagatttaaaaactttcaagttcaaatttaaaaattttcaactcaaaatttaaaactttcaaactcaaaatatgctaaagattaaaaaaataatcacaaaaaaaggaaaaagcgaaaaaaaatgggtaaaaaatgaaaaaaaaaaaaagagtgggaggcgcgcgcgccggcgctgggccttatgggccagaaatgcgcgcgcggcgcgcgccgattagcaatcgcgcttttctcctgactcctgactgcatctcattccaacatggcactctgatgcttgcaaccactcctcgattaatcctgttccatctccattattatctaatctttaatctctctgatttcccttttatagaccacgttgaatcgtccggcattggagagtttgatgtgcgtgtgtttagaatattatgaaattattgttcagttacattatgaagtcccgtgttgattggactgaatgtgaacctttccttttatgcacatcaggcaagcggtgttcaaatgagcaatataaaataaaatataacacactaacacagatctttctatctgtgacggcctctaacaagcctagaaatagcgggccatcacaaggaagtcatctcaatcggaccaaaaagtgtccgattgagatatgatcgcacagacatattagatgggcataaaacttaaacccgtcacggataacacctatcagtgacgggccgtagtttagtcccgattgagataacattccacatctcaaacgggcctaaagttacggcccgtcacagatgaccatcatatgtgacgggcaccaactttaggcccgtttgagataacattccatatctcaaacgggcctcaagttgggacccgtcacagatgaccatcatctgtggcatgcaccaacttgaggcacgtttgagataacaattaggcccgtcacagatgactcatcagtgacgggctatatactaatgtccgattgagatgacttaatctctatcgggcatgaactaaagcccgtcaccgatgagtacttttccatttttcatatgaaatgtttatatttataagctgaactgtcgcgaccgggaaaatttccttttcccgaacgctagtgtattaatccccgtcccaggaaaagccggggtacaccatacaaacatgatataaaagacacatctttattatatcgataatatttacattattacaaaggcacttaaggcctgacaatcaaaaataaacagcagcggactagcgggcctacggctccatcttcacaggcgctcaactggggtataagccaggactccacctaagacatcttctccaaagcttctcttactgaagaggggaaagattgagcaagaatgagtacaaccacagtactcagcaagtcacaccggcagatgcatggttaatgcaagggggtacaaggagtaataatataggggttaagttttgcagaaaagcggcatttataagtcacttagttgcccaaagctattttataaagacgatcctagagctacacagtattattaaacaaggccgtgaaccctcacgaacctgccttaacccaaggcctacgatgattcggaccgaactggcaacccgacctgggtcccagctcgtcccaagccaacccaggccaaccatcccatattttagttgttgagcaaattttaagaattaaaacactgacttgggtacattgctaggcttgcccatatccgagggctcggctattcgaatagatttactctgatcagaggtgtacatctttacccacaagacacatcttcctcacgtgttgccacgtgccacataccaccacggtatacggacggaagacgtgacatagtttccaacccatcctagccttagacaagagtaccgacccaatcctacctacggccgggatacccgggacaggcaggcagaactgagccccctagcattgggcaccaaccctctgccgtatgacatctcgactaccgggccgcagctcgtgtagccttcatttgccctggagaatgtccatcgacccccgacttcatccatctccaatccgtgtacttttgtttatgaccagactgagccacaaactaagccttacccactagacatgtggaagtacggtagtgctttgcaacagaggcccgagcttaatccttatagtggccggggtgctacttcccacaactggcatgcacccaaaccccaccgaaaacaggttttaggggttttgaaagaggaagagaggtgtatgtccaattccaccataaaccaacaattccatagtgtccaaatgatatgagaattcccaaagtctaaagttataaaaccacctaatgttgtcctattaatcagcgaagcatctacctaaattcatactagtggaaccataaatagagtgtccactagttggggttttgtttattctagggtgaacaaggtaataataacaataacaataattgtatggtcataacaaaggtaaataggcatggctaaataaaacagtgataacgcgggaatttaaataaagcgataatgcattaatttaaattaaaaataattttgtaaactgggattcaacatgctcaaggatgatgtgacttgccttgctcgctttcccaaacgacggcttcaacttccacgaagagcggatcttccgaaactgcagcgtctacacgaccaacggaaaagaaaaggcttaaacactaaataactccacataacagcagaaacaaagcacaaaaatgggttcttgacttcttaaggaaaaattagagacttgaacggtccaattccgagttcaaatggccaagatatggccctttgaagtttatatgctctttaaatggatatttgcgaatttcttcatttaaattttaattaaaaatcccatttattgcgtcagccgagggagggggcgcgcggaccgggtccacgggggtgggggcccacgcgtcagccccacggtccacggtggaccgggcgcacgcggctggcggcggtcggcgccgtgggtcccgcgcgtcagccgcacccgcgggcgcgggcggctgacggccgggcccacttggcagccgcgagggcgcgcccgagggcggcctcgccggcgcggccgacgggagcggcgcgcccgcgccccgatggtcaccgccggcgaccaccggcgcggcggagcggcgcccgagagagaggagggaagggggaaggcgaacggcggtcctcggctcaccccgggacaacgacgacgacgagaacggcggccggagcggaggaagacggcggcgcggctcgggatgacgatggcgacggcgctccgacggtcggcgagcgaaacggaggcgcggacgaggtcgacggcgatgcggcgatgccgagggaggtggcgccgagtaaggaggaagtccggagcggcggcggcggcggaacggagctcggcggcgatggcggagagagcggagcacggtgcgagcacgaatccgacggcgagagcgagcggcgagcggcggaaacggaagagcggagctcgggcaacgtttaaatagcgccgggggaaggaaagagcggccggagagggaggaatcggtcgcggagatttcggccgccatagatgcgccggcgatgaatgcgggaaggaaatcggacgaatccgagggagagagagaggggaaaacgggggaaacgggagagggaatcacggggagtgattcccctctctttaatgcgcgcggggacggcgggatgcggcgcaatccgcggcggcggcggcgctaaggcacgggcgcggcggcgggcgcggcgggaggaaggcgatgacaggtgggtcccacccgtcagcgagagtggcgggcgggcccgcctgtcagcggcgcacgcgcgcgggggaggccgatgggccgcgggggaggagagagagagagggagggagaagtgggccgagccggcccaagagggaagggggggggggaaaaagaacttcttttaagattttctttttataaacctttttaactttgtttatttcttctcaattattatttgtgctctgaaaattccactaaaatttgagggctcctttttgaccaaggggaatttgacaaaaattctccgggccacatttgaatttttcttgtacgtattttagtgtttgccaatttcttttcgaattttaattaattctattattccttttagagaatgatttttaattcgggatgaatttatcaggacgtgacaggtcggtactcttgtctatggctaggatgggttggaaactatgtcacgtcttccgtccgtataccgtggtggtatgtggcacgtggttgcacgtgaggaagatgtgtcttgtgggtaaagatgtacacctctgatcagagtataatctattcgaatagccgcgccctcggttatgggcaagccgagcaatgtaccccaagtagtgttttaattcttaaaacctgcttaacaactaaaacgtggaatggttggcctgggttggcttgggacgagctgggacccaaggtcaggttgccagatcggtctgaatcatcataagcctttggttaaggccgggttcctgtgcggtcacggccttgattaataacattgtatagttctaggatcgtgtttacaaaatagctttgagcaactaaatgtctttaaatgctgtttactgcaactctaaccctttatattataattcccttgtactcccttgcatttattctgcatttgtgggtgtgtcttgttgagtacggtggttgtactcagtcttgctcaattttttcccaagcccagaagaggagctccttgaagatgaaggctttggtgtctagctcgtgcctgccgtcaagcgcctgtggtcgtcgccctagtcttccgctgtttcccgtttgtctttgtgtgtgctgggccttcgctgcccatgtaataagttaactatttacgcttccgcttgttaaactctgaattgtatcaacttttggtgtaccttgcctcctgggacaaggattaatgcacgcacgtcagggacgcccgttgggttatttccggtcgtgacagtggcttccttggttggaccggaactgcgctacctttctcttcctgtccattttgttgcgctgatcttcctgacagattgccttgtcaaccagcttctcaaagtcggcgtagtctccagagattaactggttggtcagctcgtcatccaggcctgctaggaacttctcctgcttctcggcgtcggtacggacatcctccggtgcatatcgcgctagacgattgaactcatggggatactcagtcactattctgttgccctggtggggtgcccggaattccctcttctcctctgccacaaccccgtctggcacctgcgccttcctgaagctacgacagaactccgcccaagtgacttctgtgcctggcgggtgggtagccatgtgattgtcccacaaagctgacgcgggaccctggagctggtgtgtggcaaaggcgaccttgtcctgatcattgcactgcataaggtttagcttcttctctatggcatggagccagtcattcgcctccatggggttggtggtgctagagaaaatgggtggcctgacgcgtagaaactccggcagtttggactaagggggaggaggaccaaaccgctgctgccgttgctcggcttgctgatgcatcctctggtgcatctgctggtgctgctgctacatctgttgcatcatggccgccatcatctgggtcttatgggccatcacttgtgcgagcgtcgggttctctgggagcggtggcggaccgttgctagaggcgctgttggggtgtccaccgtcagtgcgttcttcaccgctgctgcccttacctgctgcacggctgccattcctggtgttgaccatctgaagggagagcaggcgggggaagaaaaagaaaataagaaaaacagatgctcaggagctaagctttattatataggaatttaaactgcaattgttctgatctgaattaaaacacttaaaacggcaagcaaaatccttattaagacagccatatcataggcacatgatatcgaccatcgactgacccacaagcgaacaaacctagacacacaaactaacagacaattactaagcagtcggtaaactaagggaaagcgagcctaatgctcggaacggctcctgcagtcggtggagtcgaaggcgtcctcctgctcgtcaccaggtccctctgagcggctcctggagtctggcagatacgtctcgccgctgcccggctctgtgccactagaactgctgctgctatggtcgcggctgccactaggagtagcaggtaaccaacctccgttgccaccggttggccccctgacggctgacgctggagcgaaggagagagcggatgcgggagctgacactggagcaggagctggggctggagctagagctgcgggcactgcaggaactgcgtgagctgcgggaactgcgggcggatgtgggttcctgggcgcgagctgaatgcgcacaggtgacgtcgtcgacttgcgggacgtgttgctgacccggactcctccgggaatggggagacccttcaactgagcattctccttcttcaagcgtgctatcttatccttcagagctatgatcctcacgagcttcccgtcattcaaggccttggacgcctaacgcatatctgagtgcatcctgtccattcccctcattacggcacacatgtgaccaaaggtggtgtcgttctcaccggctatcggacggaaggtgttgacgtcatcgccacttgcttgacgagggtgaaaccggtacgccgtgttgcagaagatgtagttgtggcgctcacgaagtctggccatcatcaggtatgctgcctcctgacaggcgtgatctgctgtgcctccagatgcctcaaccaccatgttagcgaggcaggtgcccacatagccatgaacctccagacgaacacggtgaggaaactcgccactgagcggcggaacagtcgagtactccggcgcgttggggtagctcaccaccagtgtcatgcgagccaactctgccacaaagtcatccatgccttctccacggtggttgggtgggtgatcggctatctagagaagacaaaggggtaggatcaatgcatgctcaaatccaattttaatgaagcagtaaaagactcaaattaaataggcgaataaaagcggaattttatacacagatcatttgttttgcatgaaggcgaataaataagacggacttacatagcgataaaatgatgagaaaattaggtacatattaataataataataataataataagagcataaataccttgcaacccatattcctgaattaggacctaatgcattcctcccatcaaatcccgattgactgtcgaataaatctcaaacagtttcactaaaaccctagactgacctgatttgacaaatctctctttaacgagcgaccaagatttttcccttgaaccacaaaaacagatcccaaatttcccagaacaaatccaattgcaaagaacatatgcaatgaaaaggattcagagggctcttaggttttcccatttggcttgtcctacggtcaaggtcggctctgataccaacttatcacgcccagaaattcccgaatagaattccaagcagagtgtgcattaaaatccccatccaggacaggctggggtacacaaacgacaaagttgacatacagatccacgtcttacaaacattataaaagtcttacataagtgcagtggaaaaacaaaagataactggagctaagccttgacttgaacggcagcgggaacaccactccacaggcatcctcaacagcacggacgaagcctactcctcggagaaaccaccatctgacgcatactcaaactctagggttggggaaaaatagagcaagactgagtacaacccactgtactcagcaagtcataccggaaccggggtatgctgcaggatattgccaaaggatagctagagaggttcttttgcataaagcgagcatttataaacagtagttgaaagcggtaaaacaattgtactaattaatcaatattaaccatccactgttcaacgctacaccacattgtaacaggcccaaccaataacctgaactaatcagttccatcagactacactagggggagactaatcccggcgaatctggttgaccggccataac

SEQ ID NO: 4621 - DNA, 16841 bp, Oryza sativa
  unsure (1)..(16841): unsure at all n locations
agatgatcgagatcttatgaaggttgcatgtcgtaggcttgagataacggtcatgcaactccttgcaaactattgatggagattcacaaatagacttgaataaatgtgctctccttatcttagtttgatcttttattttgttgggtgtgtttaattaatttgaactacactcagtgtttgggtgttacttttgtaataattggctatagctctgatgaacaaaggccgggatgttttattccattatctaaaaaaattagaaacttggaaatgtgcatgcacttattcatctatgactatgttcacaagatcaaatcaatccgtatgaaggaaatggttacaattacatgttaactgttcatgtgtggatgcatccaacatgttctcgaaaaaatcaaatcaaataatggatacaaacgtaatcactatatatgatgcaatcaattatattactgtttatagcttgtaaccgtaggttaagccttatccaaacagtattttttttctctgcgctccacctgaattttctgtggtatttctatagtgaacatgaatagaccgaattaactgggtgagcatcacaattagtggatccatcttctttgtacgttaggatatatagcaacaaattgcgtgtcaaagggagaaaagacgaagctgtacgaactcatcttgtgttttctatcatcatcagtcccattttccagcaaatgcatgacctacaatgcatgcaggtcacaaccgtgggtaagtgtaagacaagccgtctccttcatataattttatacctctcaccaaatgttgttcatcgtgagttgcaaggggaggggggacacatgcatgccctatgcaacctgcgcgacgacccggggcctgtggcagaagccccatttagtacttctattgtgtaggacccaaacttccatggacggggctaaggccttggccaatttctagttccgcccttcagaagttcatctacaatctagaaattcggttaatccgtgttgcttagagttcatctcacttgttttctcgatgcctctcattctcagatcttagctgagtacctcaatcttactcttatgacactatgatggttgcacagttactctactaatccttccatcccatcgttatccaatctttcttgtttcacttttataggacaaggatgaatcgtctaggggtgaagagtttgatgggtgtatgtgtttatagtggcatatttattgttcagttggcgtgttaggtcccgtgttcaatgaactgaatgtgaacctttgcacttacgaacatcgggaaagcggtgctcaaatgagaaatatggaaattttgttgtttcgagataagctatgacttaatattcacaaaatcaacatgggagatatagctaactcgttgttgaggaatcgcttactagttttggtgaacactgtttaattttagtaggtatgaaatctcctacaagcgaacttgtactctgattttgcttggatggttagtctcaatttcaataacaaagaagagggcatatgatcaaaatttactttttaatataatagatttatataatccaataattttataagaatataaaaatacttttaagatgacgaatccacacatactattttatatgtttaaactaagtatttaaaaattattgcacttttaaaattttgacaaaataataaaatgtagtaaaattttgacttagccgatagatctatgtgtcagtgtatagtttgttccaaaaaatcatatgttaaaccttaattctaacaattgtgagtctgctctttctgctcaattccactggtcagaattagtttcccgtggcatgtctgcatattgtatacagaatctgaattgacagagttagcatcacaagtgaatacacaacacatttctcaaaatgcccgagacgtactcttgtgaaagctccgatgcaagcggttaatccaattccacggataaagtttgttaaaggggaagtgcctcttgcgtagttcagactattgatccaatttgtgcaatgctagaaaaagacaatgacatctggccaactgcaagcnntgtctgctttttcctatacatcatctacaatgtctgcaggtcanagcaccagctgttctacggctatttgatctacactgagttgtttggcactgttcagttcagatgctcttgcgccttcaaacttgttcgatcggtgaggcgtctagtgcttctcccttgtttcctgcatacctctcattctcacccacttacctctcattataatagcactatgatttcttctacaaatataataactctgccccctgcatcaactatagacacacacaacattaatttgtggtcactttgatgcttgcacaacacctagactagtctaaatttcatactcattgtctcgtcttttttacttctcttttatacagcatgcatctcattgacatcgttgtcaagctctaaacagatactcgtaatgagccaaaatgccaaatattcacatggttgtcaagatcagcgaatgatcaaatgcctcgcacttctttcctgaatgccatcattcttacctgaatgcctctagcttttatggcactctcctgcttgcactacttatcgattaatcccttctatagagtagaatgaatcgtctggaattggagagtttgatgcgtctgtgtttgcagtactatgaatgaagttattgttcagttatatcgtgagaagtcccatgttgaatggactaaatgtgaatttgtgatcctttccatttatgtgcatcacgaaaacaatgtttaaatgagaaatgcaaaattttggtacttttcaaaaaaaaattggggcaaaaccttagtaaacagtaaaatggaaaatattaatctctactgccgaatcgaccgactagttggtacacatggcttatattatatttttagactgtaaaagatctcttacaagcatacttgtactctgcttttttggaattactactaagttctaggggaaaagcagttcatattagagttgatgatgaaatttggattctaaatagagtccaaggaccaaaatgcttctttccaccggtcagcacttgtttcttgtggcatctatacactggcatgtataatctgaattgaccgtgtgagcactgagcatcgtaggtaaacccatcttcgaaaaattctttgataacaatttacttgtacttctgtgaaaacatctaatggttaatctgattccacagataaaaaatttgtttatttaaaaggattgtgtttcttgcaagcttgtgatgctgttcagagtaatgatccaatctgtgccttctgcgagaaaatgacagtaaaaatccaatcaccacgcgcaaggtcatcttgtgtctcctgaaatcatcagtcgccttcatcaaatgcgtcgtctacaatttgtgcaggtaaagcaccactgctgctgagtttgagcaaatagtagattatgtgcttcacaatactatcgaattcacctcagaagtttgtcgccggtgaaatactattgcagcttcaagctaaccgatttagtgacgcatataatgcttctcactcatttcccgatggcctctcattcttgcccaaatacctctaattctaatggcgctctaacttactcaaggtaattctagcatatgccccaattttaatttgtggacagtctaatgcatgtacaacttcagaatttcacgaataatcttcattccatccttgttgtttgatctttcttgcttcccttttatacaaggatggattgtcaggcagtggaaagtttggtgggtttctattttcagtgagaagttattgttcagtaatcatgttatgcacttaggtcccatgttgaatgggattaaatgtgaatttttgcaatttatgcatatcagggaagctggaaaggggtgctcaaatgagaaaccatttttgcttcttcagaagatgacgccggtacaacttttgttattttgatgaaaatttgtggcatgaccttcagaaatatcagaatgggaaatttaggtcactgccaccaaatggttctctgctccacctggattctgtgtctggtacttgacaaatgatcattctgagtcgggtcgtcttgaatccggaagatcggttcatcggtgacctatcaagtgcctcccacttctctccggggactcctaactagcgcgtgctcgctgctagcgagcactcttcccctattaactacctctattaacactattacttaatatacttaactacctctattagttaatatacttaacactaaagatagtaattaggaaagattcaggagatgtttttactaatagattgaaaattttttaagttacatttgaaaattttcgatttaaattttaaagtcaaattttaaaaactttcaactcagatttgaaaactttcaactcaaattcgaaaactttcaactcgagattcgaaaactttcaagtccagatttgaaaaatttgaaaactttcaatttgagatttgaaaactttcaactcgagattcgaaaactttcaagtccagatttgaaaattttgaaaactttcaactcgagatttgtaaactttcaagtccagatttgaaaattttgaaaactttcaactcgagattcgaaaactttcaagtccagatttgaaaattttgaaaactttcaaatcgagatttgaaaactttcaagtcaagatttaaaaactttcaagttcaaatttaaaaattttcaactcaaaatttaaaactttcaaactcaaaatatgctaaagattaaaaaaataatcacaaaaaaaggaaaaagcgaaaaaaaatgggtaaaaaatgaaaaaaaaaaaaagagtgggaggcgcgcgcgccggcgctgggccttatgggccagaaatgcgcgcgcggcgcgcgccgattagcaatcgcgcttttctcctgactcctgactgcatctcattccaacatggcactctgatgcttgcaaccactcctcgattaatcctgttccatctccattattatctaatctttaatctctctgatttcccttttatagaccacgttgaatcgtccggcattggagagtttgatgtgcgtgtgtttagaatattatgaaattattgttcagttacattatgaagtcccgtgttgattggactgaatgtgaacctttccttttatgcacatcaggcaagcggtgttcaaatgagcaatataaaataaaatataacacactaacacagatctttctatctgtgacggcctctaacaagcctagaaatagcgggccatcacaaggaagtcatctcaatcggaccaaaaagtgtccgattgagatatgatcgcacagacatattagatgggcataaaacttaaacccgtcacggataacacctatcagtgacgggccgtagtttagtcccgattgagataacattccacatctcaaacgggcctaaagttacggcccgtcacagatgaccatcatatgtgacgggcaccaactttaggcccgtttgagataacattccatatctcaaacgggcctcaagttgggacccgtcacagatgaccatcatctgtggcatgcaccaacttgaggcacgtttgagataacaattaggcccgtcacagatgactcatcagtgacgggctatatactaatgtccgattgagatgacttaatctctatcgggcatgaactaaagcccgtcaccgatgagtacttttccatttttcatatgaaatgtttatatttataagctgaactgtcgcgaccgggaaaatttccttttcccgaacgctagtgtattaatccccgtcccaggaaaagccggggtacaccatacaaacatgatataaaagacacatctttattatatcgataatatttacattattacaaaggcacttaaggcctgacaatcaaaaataaacagcagcggactagcgggcctacggctccatcttcacaggcgctcaactggggtataagccaggactccacctaagacatcttctccaaagcttctcttactgaagaggggaaagattgagcaagaatgagtacaaccacagtactcagcaagtcacaccggcagatgcatggttaatgcaagggggtacaaggagtaataatataggggttaagttttgcagaaaagcggcatttataagtcacttagttgcccaaagctattttataaagacgatcctagagctacacagtattattaaacaaggccgtgaaccctcacgaacctgccttaacccaaggcctacgatgattcggaccgaactggcaacccgacctgggtcccagctcgtcccaagccaacccaggccaaccatcccatattttagttgttgagcaaattttaagaattaaaacactgacttgggtacattgctaggcttgcccatatccgagggctcggctattcgaatagatttactctgatcagaggtgtacatctttacccacaagacacatcttcctcacgtgttgccacgtgccacataccaccacggtatacggacggaagacgtgacatagtttccaacccatcctagccttagacaagagtaccgacccaatcctacctacggccgggatacccgggacaggcaggcagaactgagcccctagcattgggcaccaaccctctgccgtatgacatctcgactaccgggccgcagctcgtgtagccttcatttgccctggagaatgtccatcgacgcccgacttcatccatctccaatccgtgtacttttgtttatgactagactgagccacaaactaagccttacccattagacatgtggaagtacggtagtgctttgcaacagaggcccgagctttagtccttatagtggccggggtgctacttcccacaactggcatgcacccaaaccccaccgaaaacaggttttaggggttttgaaagaggaagagaggtgtgtgtccaattccaacataagccaaccattccatagtgtccaaatgatatgagaattcccaaagtctaaaattataaaaccacctaatgttgcctaatgaatcagcgaagcatctacctaaattcatactagtggaaccataaatagagtgtccactagatggggttttgtttaatctagggtgaacaaggtattaatatcaatagcaataataatgtcttaacaaaggtaaataggcatggctaaataaaacagtgataacgcgggaatttaaataaagcggtaatgcattaatttaaatcaaaataattttataaactgggattcaatatgctcaaggatgatgtgacttgccttgctcgctttcccaaacgccggcttcgacttccacgaagaacggatcttccgaagctgcagcgtctacacgaccaacggaaaagaaaagggcttttactctaataaactccaaataacagcataaacaaagcacaaaaatgggttctttacatcttaaggaaaaattagagacttgaacggtccaattccgagttcaaatggccaagatatggccctttgaagtttatatgctctttaaatggatatttacgaatttcttcatttaaattttaattaaaaaatcggattattgcgtcagccgagggggcgggcgcgcggaccgggtccacgggagtggggcccacgcgtcagcctctcggtccacggtggaccgggcgcacgcggctggcggcggtcggcgccgtgggtcccgcgcgtcagccgcacccgcgggcgcgggcggctgacggccgggcccacttggcagccgcgagggcgcgcccgagggcggcctcgccggcgcggccgacgggagcggcgcgcccgcgccccgatggtcaccgccggcgaccaccggcgcggcggagcggcgcccgagagagaggagggaagggggaaggcgaacggcggtcctcggctcaccccgggacaacgacgacgatgagaacggcggccggagcggaagaagacggcggcgcggctcgggatgacgatggcgacggcgctccgacggtcggcgggcgaagcggagcggcggacggggtcggcggcaacacggcgaagcggacggaggggtcgccgagtcggaaggaggaccggagcgacggcggcggcggaacggagctcggcggcgacggcggggagagaggagcacggcgcgagcacgattccgacggcgagagcgagcggcgagcggcggaaacggaagagcggagctcggggagcaattatatagcaacgggagggagagagggcggccggagagagaggaaacgggcgcggagatctcggctccattgaatacgccggcgaggtttgcgggattgattccgagcgaatccgagggagagagagaggggaaagagggggaatcgggagaggggattgcggggaataattcccccctcattaaggcgcgcggggaaggcgggatgcggcggattccgcggcggcggcggcgctagggcacgggcgggcggcgggcgcggcgcgaggagggagatgacaggtgggacccacccgtcagcgagggcggcgggcgggcccgcctgtcagcggcgcgcgcgcgcgggggagaccgatgggccgcgggggaagagagagagggagggactgggccgagccggcccaagaaggaatgggggggaaaagaggacttcttttagggtttttctttttataaacctttttaactttgtttatttcttttcaattattatttgtgctctgaaaattccactaaaatttgagggctccttttagaccaaggagaatttaacaaaaattctccgggtcacatttgaatttttcttgtacgtattttaaggtttgccaatttcttttcgaattttaattaattctattattccttttagaagatgatttttattttgggatgaatttatcaggacgtgacaaatccaccccccttacaagaatctcgtccccgagattcgaggaggctagcaagaagataggttgggcggtcttctcttcttgtctgacttcttccgttgcgtcttgacaaacttccagcaaaacttcaccactcggaactgcttggcttgacctcctgttgaggatggaatcttctcttcacctgacttggaccagggtgcaccttttggctgactcagactaggttgcggtagtgcagtgatgcttccgttccagaacttctcatgattcctatcttcggagtcaacctcagacaagttaccacttcacgtcatgcgtcaacactagcttgtcattactaggatactatgtttgtcatcataagaatatcatgcttgttattcacttctaacttgccatcaactgtctcatattagctttcctggtctccggtgctaggtacttcggctattcgatgcaagggtcaaccactctaactataagttatgcttcccaagagaaccaatttatcccacttgacatactttgacgtcttctccaatggctgtattgctggatttgttattgtctaatcattaccctgtcaaatctgaggcttcgttgtaagaggtgattttaatctgacctctatagactatcttcgaacatatcactggttctataactgggaatggctctcacgaacaagcagctcggattcactttctttacattcagtttacttcccattattatcttcaggttgtcctcagttagtattcaacgtattcctttacacctttaaccttgatgtgttctttcccattggatcatctcccaagacttggcattacctggtaaccggtgcttgcacttttcacttcgtgtagcatctgataccgagtggaagatttcactctttgccttcatagaaacacttttacctaggtcatcttgctgacttaatgacaaggtgactgttgcggggcaattacaatcaggggtcttccgtgagcgatgcagagcatgtttctgtttatcaatcacctttcggcctacttcttttatgctggagaacatctttgccaatctcttttatcaatcatctttcggcttatctctaacaggtggtattctttaatgtgggttgcggacgcttctggggacgatgaggtcctttggcttgctgcctttcagtgaaaccttgatgtggtttgtcaaaaagctgcactgactaccttcagggaaatacattgcttgctatctgtatctatgccactagggtttagtgcttcctcgagatggggagcatccatattgttcttctgccatatcacctttgacccttttctgatacctgatcgactaactaccaaccattgactattatgttctcgaatattgatgtctcctggatcttcttaactgtttgcaggtatatccgaacttatcaatgtagaggcatggcgggtacccttatgggtttcatccaacaatccttatcttgatctgtaaaaggcgtatccaaactcctatcctcaactactgtctcgttggctttttaacccaacacagtttaattgtttttcttttccatccacaggttggttattaactcgaggttagaatatagttcctctgacacgagaccctaggtctcctttgtcagtaaacaattatacacatgatcacatatccgcatctttcaaaagaatcctcttagaacttgtctgcattacacatttctcccttattacacgaatacaaggcactgccttaaacaaaaagagacggtgcttaacatcggtacattgtatcctcaacatgaatcatccataagcatagcaagctcactgtttatagacatgaatatatttatgtattacatgattgctgcaaactttcgattacgcaatgataggtagcgaactgaaaaccacaaacacggctgctcattttgattccggagagatatagctggcattgttctagtgactgcatccttgattggttctgtgatgatgtgataggactgcataatgctatcattcacaggagaagattccttctgattgctggttgaagcggatgacggtcttctgcttggtatcgccttccggaggttgattgcccttggctcggcctggagtaggtcggggagagacacaacttcttccatctacgacaattctttgctgaggctgtcgatgcagagagtggttgctatgatttattgccgagtcaggtgcagcaggaggagcattggtgcattgtttctgctataggttctgattatcacgaggccttacgggtacggcgtttgctccagtgaccacaatacgattggaatgtctgcttcgtgtaaattggcggtaatgtggaggtcgattttgccttggttggggacagttttcggagtaatgcccttcttcactgcagttgtaacaaacaataactttcttacactcgggttcttcatcttgtacttgatttctcagctgctgtattggaacctccaaaggtacaacgcagatactggcctctgtcttgtcagctggtggctggggctgaaattgagcattgacaccttgtggtagtgcattcattggaattggagctgttgcaacgcgggctataggactgcttcgggatgcatggatgacaattcgttgaggtgcaagcttctgattgcagggagttgcgtggactgacgtgccggcagctatgtttctcggttttgggcacttgtcggcgaaatgacccattccttgacaattgaagcaacagatgtcttcccggactcggcattttcttttctcatttcgattcctctgtcctggcactggagttaggctgaaactgtaatcttggcgaggattggtgttgccttgatgcttctctccgttggaactggcgggttggttagccatcttcttcgtcagcagaaaactgaattgacaatcttttggtacatgatcagttccttcacaaaagaaacaagtgatcctgctcgttggacacctgtcgggtggatggtcttcctcgcaatgaacgcatatagtggcacatgagctggcgacatgaccgatttctccacaacgagagcatgccttacgttccatttcatcttcatcatctgaggagacttgatctgaatcttcactatcagacactctacctccattagctaaaagatgctctgtcaactgtggtgcacctcggaaggtatttcttctctgacgtctggtcattcctggtggaggccattctgtgctagtaatgatcatcttacggacttcatcttcggttcgcattggtgtttttcttttctgctgaggacgctcccttgcatagtgcccttgctcctcacacataaagcaaatgttacttgcttcttttgggtcaacatgtggcacgtcaccatgggtccttcgggatgctggcggcatgctgacttgtggtgtgagtgcttggactgcctccaactgcacttgaggtcgtatttgactcgggttcagaattggcgtctgatgctgctgtagtatctctataagcaatcggttctggttaatcaggtgttggaccagtgtcacacaactggtgtctggtgcttcattcactcgggagcttaaggtactaatgtcctgacttctgaccttattgcctttctcattgtcagccatctgttgcaaaggtttggagagggagagagggaaaacaaaggggagagacagattagaaactaaggataggaccttaacagatctaagtcttttgctgttatgatgtatgttaggcttattctgcaagttgattaagcaaacaacctagcatggttacatcacaacccactgatgcaaaccacgcgctacacacacaagcaaggaaacacacgacaaacgaaacactagagggtggcttaggttctgcgacgggttctccaagatcttcgctcctgcttcacagctggcttcactgcttcctttgcttcgctagcggatcctgcagccttctggagcgtcggcaaacaactgacgacatcttcttcttcgcaaagctgaccatctagtacttagttgaaatccgaagaaagaaaagagtaaaccttttgcaaatagcattaggggaaggagaaaaagaggaactttcgcaaatacttttatttataaaatatgtccttaggttttatccacttggcttatcctacagtcgagatggctctgataccagcttgtcgcgaccgggaaaatttccttttcccgaacgctagtgtattaatccccgtcccaggaaaagccggggtacaccatacaaacatgatataaaagacacatctttattatatcgataatatttacattattacaaaggcacttaaggcctgacaatcaaaaataaacagcagcggactagcgggcctacggctccatcttcacaggcgctcaactggggtataagccaggactccacctaagacatcttctccaaagcttctcttactgaagaggggaaagattgagcaagaatgagtacaaccacagtactcagcaagtcacaccggcagatgcatggttaatgcaagggggtacaaggagtaataatataggggttaagttttgcagaaaagcggcatttataagtcacttagttgcccaaagctattttataaagacgatcctagagctacacagtattattaaacaaggccgtgaaccctcacgaacctgccttaacccaaggcctacgatgattcggaccgaactggcaacccgacctgggtcccagctcgtcccaagccaacccaggccaaccatcccatattttagttgttgagcaaattttaagaattaaaacactgacttgggtacattgctaggcttgcccatatccgagggctcggctattcgaatagatttactctgatcagaggtgtacatctttacccacaagacacatcttcctcacgtgttgccacgtgccacataccaccacggtatacggacggaagacgtgacatagtttccaacccatcctagccttagacaagagtaccgacccaatcctacctacggccgggatacccgggacaggcaggcagaactgagcccctagcattgggcaccaaccctctgccgtatgacatctcgactaccgggccgcagctcgtgtagccttcatttgccctggagaatgtccatcgacgcccgacttcatccatctccaatccgtgtacttttgtttatgactagactgagccacaaactaagccttacccattagacatgtggaagtacggtagtgctttgcaacagaggcccgagctttagtccttatagtggccggggtgctactttccacaactggcatgcacccaaaccccaccgaaaacaggttttaggggttttgaaagaggaagagaggtgtgtgtccaattccaacataagccaaccattccatagtgtccaaatgatatgagaattcccaaagtctaaaattataaaaccacctaatgttgcctaatgaatcagcgaagcatctacctaaattcatactagtggaaccataaatagagtgtccactagatggggttttgtttaatctagggtgaacaaggtattaatatcaatagcaataataatgtcttaacaaaggtaaataggcatggctaaataaaacagtgataacgcgggaatttaaataaagcggtaatgcattaatttaaatcaaaataattttataaactgggattcaatatgctcaaggatgatgtgacttgccttgctcgctttcccaaacgccggcttcgacttccacgaagaacggatcttccgaagctgcagcgtctacacgaccaacggaaaagaaaagggcttttactctaataaactccaaataacagcataaacaaagcacaaaaatgggttctttacatcttaaggaaaaattagagacttgaacggtccaattccgagttcaaatggccaagatatggccctttgaagtttatatgctctttaaatggatatttacgaatttcttcatttaaattttaattaaaaaatcggattattgcgtcagccgagggggcgggcgcgcggaccgggtccacgggagtggggcccacgcgtcagcctctcggtccacggtggaccgggcgcacgcggctggcggcggtcggcgccgtgggtcccgcgcgtcagccgcacccgcgggcgcgggcggctgacggccgggcccacttggcagccgcgagggcgcgcccgagggcggcctcgccggcgcggccgacgggagcggcgcgcccgcgccccgatggtcaccgccggcgaccaccggcgcggcggagcggcgcccgagagagaggagggaagggggaaggcgaacggcggtcctcggctcaccccgggacaacgacgacgatgagaacggcggccggagcggaagaagacggcggcgcggctcgggatgacgatggcgacggcgctccgacggtcggcgggcgaagcggagcggcggacggggtcggcggcaacacggcgaagcggacggaggggtcgccgagtcggaaggaggaccggagcgacggcggcggcggaacggagctcggcggcgacggcggggagagaggagcacggcgcgagcacgattccgacagcgagagcgagcggcgagcggcggaaacggaagagcggagctcggggagcaattatatagcaacgggagggagagagggcggccggagagagaggaaacgggcgcggagatctcggctccattgaatacgccggcgaggtttgcgggattgattccgagcgaatccgagggagagagagaggggaaagagggggaatcgggagaggggattgcggggaataattcccccctcattaaggcgcgcggggaaggcgggatgcggcggattccgcggcggcggcggcgctagggcacgggcgggcggcgggcgcggcgcgaggagggagatgacaggtgggacccacccgtcagcgagggcggcgggcgggcccgcctgtcagcggcgcgcgcgcgcgggggagaccgatgggccgcgggggaagagagagagggagggactgggccgagccggcccaagaaggaaggggggggaaaagaggacttcttttagggtttttctttttataaacctttttaactttgtttatttcttttcaattattatttgtgctctgaaaattccactaaaatttgagggctccttttagaccaaggagaatttaacaaaaattctccgggtcacatttgaatttttcttgtacgtattttaaggtttgccaatttcttttcgaattttaattaattctattattccttttagaagatgatttttattttgggatgaatttatcaggacgtgacatgaactatagcgaaataattaagtgcagtataataatttattttatgagtcaaaataattttacgggtagtaaatgatttcaaatggaaaaaatgtcaacaacaaagttgtctaacttatcaatatttacaacttttagtttggtcatttttctatataatattttttgaacagtttgaatttgaatttgaaaatatgacaacttcaaacaacaatttcaaatactaaatgattccaattgaaaaagtcatcaacaacaaagttgaataactcatcaagatctaaaacttttatttttgttatttcttcatccaacaaaatgttagtaacattattcataaattttacatatatgtgttataatttataaaacagataagagatatgtcaattttgtgaacaatgttactatcactttgtcgtatgaagaaatgatcaaaataaaagttttagatcttgatgagttattcaactttattgttgatgactttttcagttcatat

SEQ ID NO: 4622 - DNA, 41468 bp, Oryza sativa
taagataaacaaatcaagatacaaaacatcacattgtgtgcatatataatctgagctcagatattaagatagaacagttgatttactgacccaagaataaagggaccttgccatgcatgctgtgatgaggcagtggatggcaaagttaatcagtatatactctagaaatgtgatgttctgttctcatttcatactgcaaactttcaggcttttctccccacctattcttcacttgatattcaggaattgcagaacatttggtattcaggaaacacgaaagatttgagcattcaaacaaggggacctttccgctacctccgatctgaactcgagtttctttcatctgaagctgtcactttggtctaatctttcattgttcatcatgtttcatgataagagtaggacagaagatttcatccaaaaatagagtttcgacaagagaagtggtactctaaaaggacatgagcaattgagcatcaatactggctgcaattaagaataacaaagtgacaacaaaatgtgattttctttgaatgtcagcctgatcaaaagggttaatatatgcctaaacagaaagggcagagctttatgaatgcctcaccagaaaaggccatcattctcaacttcccaatagctcggaaaatcaggaccaaagatgagtaatgatgatgaagaaattaccctattcaattggcaactgcagaacaagttcatcgaataagcgtatcaaattgatttgctaccccaagttgagttctcttattaaatagcagagcatgttgccatgacaacagcataatctgaatatgcagcagttttaagataaacaaattaaaacaccaaacaccacattgtctgaatacataatctgagctcagatattcagatagcacagttgatttactaacccaagtataaagagacctactgtcttaggtggtgttcttttctcctaaagataaagatgaagatgaagattaagttttttatacaaaacgaggtggtattaacatatgattgattgagttttaattattataaacttggaaaatagattaatatgatattttagagaaactttcatatagaaagtttttgcacgaaacgcaccgtttagcagtttaaaaagcatgccacaaaaatcttaattttcatctagagaaaagaacatgaccttactctaaaccttaggcatgtataaagggacctactttcttactctgcaacttcccaacaaatttagattaaatcatgtctggttatatttgactgttaatctccttgcagtattctcgtgcaggagaaaggtaacaacattcttttattacctattaaattatgctaacaaaaataataaatttggctgtgaatattcatatactgaatatagtttaatttattacttttgttataacttatagaagtcgaatttagacataccggtagtaatataatatatattaatctatcttatcatttttttaaaaaaattgtaattatttaattaacatgcaataaacgagtatacatccacctatgtgattaaaaaagtttcccctgatggatgactaattgacccatactttttcagttgatttgagcaaaatttagaggtaattagagggaagatgaaaaagtctgtgtattatttactggtgaatctgtgtaattctgtgtgaaatgtgatgaggtaaattcgcatggctaagacagttttcagtctgggaattctcgttcgagttcatcaaacgaactatgactgagatcatcagattctgaaacaaatttggcagtcaaggttgtcgcctctcccaacgcagatcactgatgcggctggttaaaattcatattcaaattgatcacaaaataataattcagatgcaaatttgaagtaggttctctggagtagcatttgagatctggtgcttgcctctgcttggtgtgatgaggcatgtgatggcaaagttaatcagtatatacggaaatgatgttctgttctcatttcatactgcaacgttttcaggcttatagcctcagctagtcttcacttcatactcatgaattgcagaaggtttgagtaatcagaaattgcaaaagatttgaggattcaaacaaacctttgcggtttacgctcctttggtctgaactcgagttcctgtcgtctgaagctgtcacttctctttcagtgttgagcatgattcatgataagggtaggaagacaagatttcgtcgaaaataaagtttcgacaagaaaaaatagtaactaaaaacagtaccctgataagacatgagcgccaaagctgtccaattaagtgtaggacaaattgaagttagaacaaagtgacaactaaatgtgattttcttcgaatgtgcaacttgttcaaaagagttatatatgcctaaacaaaaatagcagagcttgacgaatgcctcaaaagaaaaggccatcattctcaatttcccagtagctcaggaaatcaggaccaaagatgagtaatgatgatgaagagattacccttcttaattggcaaaagcagaactaattcattaactaagcgtatcaaattgatttactaacccaagttgagttctcttattaaatagcagaactaattcattaactaaggccctgtttagttccaaagtttttttccaaacttccaactttccatcacatcaaacctttcatacacacaacttttctatcacatcgtaccaatttcaaccaaacttccaaacttcagtgtgaactaaacacagcctaagcatatcaaattgatttactaacccaagttgagttctcttattaaatagcagtccatgttgccatgacaataacataatctgaatatgcagcagttttaagataaacaaatcaaaatacaacacatcacattgaatacataatctgagctcaggtattcagatatcacaattgatttaccaacccaagtagagtcgagaatttcgagttccacctgaaccataggcaagtataaaggtatctattgtcttacttcacaacttcccaacaaattttgattaaatcatgtcagattatatttgactgtaaatctccacgcggtattcttgtgcaggagaaagatacaaacattcttttagtacctataaaattacgcacattagcacacatggttcaagaacaaatacccacaggccatatgttattcacagaaagaaacgggagcaagaacaatttacacttcacggcaaggcaagaacaggcagacttaagattaaaacttgtggatgactgatatttacaaagacataaagaaccagaacacactgataaccttggaacagtgaatgtttcatcctctaaagaaagtttggagtgcctaatcttttggattctaccagttctctttgacgatttttgacttctcaaatatgaacttcccttccttgtacttctgtgtttcctcataggctctctcgtacttccagcccaacacctcccggcaatcattgcaatagatatcagcaacagtgtgaagccccgtcataagttgcctgtcctccttcgcgcccacaacaacattcatggcatgagagaacagaaaggcacggccattcctcccctaaaataaccaaaataacggtaagtagaaggcatcagccttcaagcatttgtctaaaggcccaatgatgcagtatttcttcagaaagctactgtgcttgtgttcagttattttgagttgttcttttaggaaagcaaaggtataaattttaacaaatataagactgcatttttttgttaacttttaggctttagtgtcaagttgtttcattgtaagcatgaattaaactgaggaataaaatgcagcacaccgaattgaggtgctggttctttagcataacatacacacaaccccggtagtaaggtaagcaaaaggcgtgctaaatactacctcaaatctttactgaaatcatgccaatttacacaaagggtatatcatctacagttattcttatacagtatgcatgactagaaaaaaaaaaaagagtttgcaaccatcgacagctaatcacataatgactcataaaccgcacaggcaatcagaaaccaatgccacatccaggttttttgttagtccaattaccgttaccgcaatgatatggactacttgatcactgcatatccaaccatatcccactaaaacatacgtagtgcggagtagtaacaagcatgtatctcatctgaacaactactgatcatttcttcgatcaagcaggagccctaaattaggcaggcaggtaattagctcctaggaacaaaaaaaaaaaaaaagaattcaaggagaaggaaaagctccccggctgccgagggccgacctgaaaagccttggagatgatgtcgtcgtggaggcagacgtggttccggcagttgcagcagctgtacacccgcggacccaccagctccgccatgaacaccatacctcgagagcaaaaatccctcgaggcaactcaaccaatcctgcaaagaatcgagacgcgaattacatacaccatctcgtggctagtaataataaaaaaagaggaatcgaactagggaccccaaatttcaccaagaactttgggttccaagaacccttggaacccccgaattgcgggaagaggggagaagcagaaatcgggaggtttggactgaattgaacacggaggtgaaagggagggttccgagtaagtactaaccgatcgggcgtgaccggaggtggggggcgcggggagcggagaggaggcggcgccggaggggattagcggaggagtcgccggagtttgggagaagaaataggtgagatgatgacggtaaaggcgcggttttgttgagggttagttgagatatcataggaggcaaagcaagattttgtgagaaatctaggaagtaaattgcacccatggtgcatcaccttagcaggtgagcgttctagtacaacaatttggtagacaaatataatttaatataaaatctttataagtaatcatataaatgtaacaacttgcaagatatgtacgattttcatacaataaactaagaagttatagcgacaacttaattatttggagcattttttatatagattcaatttttaagtaattatttttacaatatactagcgtggatttgtataagcatatttatatttttattctaataactaataactaaaagtcaattaaactggatgtaaattatatttcggttgatatttgagaaggtgaagaaaaaaatcttaaggtaattggatgtaaactctgtgtgcagtataattcttcaagattaaattcaatgtctaaggtaatatctgtaggattactatgtaattgcatattgacatcgtgaaaaaaaactcgcctagcatatgcttagccaagttgatacaccaaaatactaaattgtcaagttattgtattagaacgcacccacttatcaagttgttgcactcggacattcaattctcaagttcttgtaatatatcgcacccacctgctaagttgttgtaccgttgatgcaatttgtgtgataattaaaaatttaccactgaactcacatgtcatagacacataagcgtccacatatcatgtatcatatcattgattgtgagtgacaaatccttaattaccgcatcttgagagcatcaccaaactgtgtataatctcccaaaaaaattattattggtttgctaaactgaagataggaaagaaaataactgatctcttcaggagaaaacctaaattgtatccccaaaagctaaaaatgggctattctattaaactaccaacagaatttccattagcacgctacctcttgcgctccctctgaagccacgccaatctcccaagcacggtgcgggagcaaggtggtagaggcgagattgggagtggacgagggcgccgctttctcccacatcaacagagcgaatatttcgggagaacttcaaaaatcatgcaatagagtaggagatctgttggattgttttttttctactaaatccctcagaattggttttgggatgaaatatgaggactgttggtgattctttaaaagtggcaaattgttaaatgccccaaaatctaggtgcagttgtcaggtttacttcatggtgtctcgctttttatcgtgggatatatgtaaaatattatagaaatgatgaaattacttgaatttgtaaaatattgtgaaaatgattagggaatgatgatttagcatatgtatgttgagttttagaatgaaataaaattataaacataattaatatatttgtatatgagctttgagtacttactgagttgatgttgcatgcttgcatgttgatctttaggagtattaataaataccataattacgtgttgagctttaggtgtagtgggttgaaactttatagaaggtatagataaactaatcaatgagatgataagtctaagtctaaacaaatatactacatccgtcctaaaatataacaacttttagctctgattaagaacatatttttttcagctttttttaaaaaaaaactcataagtttctgcactattaagagctaagttggaataatcttttttctaagcacaatgaatacaggacttcacaactaaacataatgcttgaaagccatcaaattataaattcatataagccgaaaatttggcttaaacagctaaatggtggatggagcgttggatagggcgacattaatgatttaagcatgtgtggtcttgttgagtatatatatggaatggaaggggtgaaaacggagcggatagtttccgtccgctccggtcaaaaacggatacggatagtgttcagagcggattttttttcagatatttcgaatacggatacgaatacggatatttttctccagatacggatacgaatatggtaacacagtttccggcgaatacgaatatggagccgaatatccggagattaagatgcgcggatatccgcgtaacgcttgatgtctctccagcctccagcccatcccttcaatttcagcccatagttttctctcggctatctaaaccctagctgctagacaggcgacggcggcggcggcggcggcgacgacggcagcggcaagccggcgacggtggcggcggctgtcttagatcaccttggctccttgctggagttgctgggcattggccttcaatccccctagtgtttgtttgtgcttcctatctccctaaatcgtgggacagtgggaggctaggagccgtcaccaccgccggcggcaaggcctcttgcatgcactaatctcttaggtaatccattgatttgttcttctcctgtaccctttgttttgtgcctttcatgagatcgataaactgatgtagatcttggatgtgcttttttttactttgtgtctagattggtgatggagtctggtagtgcaagtagtgcaagtgcagctgcaagtaccactgcatcatctccagttttgcaactcccagcacctccaagccatgctacggcagctacgcaggacacttctcctgctgctggtgctttggtaatgaagttttgttccatcaagctttctattgctgattggtgtaacagtacagatggaacaataaaaaccatggcaaacgccatgcaaactaaatatgataagtactgggagaagtcgaatatggctcttgttgttgcatgcttccttgatccacgttacaaaacaagttcaatagagtactatagtatgaagatttatggtttagaagctgcagaaaaatttgatgagttcaatggggttatcaaaaaattgtttgatgtttatgctactagtgcgtgtgcaacatcaaagaagaaaggtgctgaaatgcatgtgcatcaacttcaaattcaatctgatcctgttcataatactgatgagtttgatgatatctttaatgagaatgacagtagccatgatcatgagcaacatcttcaaagatttttgcttgagagaagtcagccaatttgtagtgataaaaccgagttacaaatttacatggaacaaccactgttactatggacttccaaagatccatttgatattttgtcttggtggaagctcaaacaagcagaatttcctatcctctgcaaacttgctcgtgatttcttatgtattcaagtgtcaactgttgcttctgagtcggcatttagtgctggtggccgtgttgttgatccatttcgcacccgtcttgatccagaggctgtgcaagctttagtttgcaccaaagattggattaaagcagctaacaatggtacactttgtgtctgtgttcattgcttatttggccattccttcttgtatatatcaatatatgtatagctgatccatgatctgatctggcatcattcttaggttataagactcaggctattatcaatgagttggacattgaaagcgtagagaggcatctggcaaacttattgatagtggtgagctattttcttattttacctctatgaatatttttcttaatataacaacaatattattcgactcctgtaggaaaaagaggagaataatgatgacatggaacaggatgatgttctgatggatgaaatggatgaataatgatgttgcagctttcatgcatcggactgcaagtgtactgaaaattgcttttgggctaattactattttgatcttatctgtgttacctatagaactcgaactcaatatatgttgaacttttcaacgtgtttcgatttgaacacgatacactttgtttaatctgtgatgcgtcctacaacgatgatatttatattaaattagataaatatatgtggtgcatttgtatctacgagcagtttgagtggtctttgtattccgagaaatattcgttttcgtattcgtgtccgatcatattcgatccttattcgtatccgcgataattcgtattcgtttccgtatccgagttattcgtattcgtttccgtatccgcctaacaatatgaaaacggatacggtaagagcattatccgtccgtattcgctccgttttcatccctggataggtagttgaaatcatttttttaacccatatggtaaatatttatgctagaattaaatgttggaggtcaagcggggtatatcgtgtgaatggacggtagaggtattgtgatttgtgaacaaagaactgagatgatttgaaatgacaaaaagtattagaggaatcccaatataattcagcataccgtattgctatttctcacatgtacgattgcgtgaacaaaaaagtattaattaatttatattgaggtatccatattgatgtaaacctaagttttacgatggaccaaacttacacgcacatttcgctaacaaaggcccgttagttttcaatgatgaaaatgtagttagggcacggagtacaacaaaaccattagtactgattaattaagtttttagtattataaacttgaaaaagaatcaatttaatattttaaggcaactttaatataagaaaggtttagcacgaaacatactgattagcagtttaaaaagtgtgctaacaaaaatcaaggtggaatatcttactctgtatttcaaatcatctcagttctttgttcacaatacctctaccgtccattaacacgatataccccgcttgacctccaacatttaattctagcataaacatttaacatatgtatctttatgctcagttataaactagattagtgcttcaccatatgagcttgggatgggagatgaggtttgatggtgattggtaaagaatgtagcacatgggagtttctgcacgtacgatgagaccaaactgcgtggcaaaccaatgtcatatggatagggtgcagtgcaagtgatcggctgagtctgaagccaatgtggtggaccaaacggggagccctagataatcgggttttgaattttgagatatcaatattgagaaaacaccattttaacttaattttggccaaatacgccacaccaaatgtttagacagggcattaaatggaaaaaaaaatccaattgcacagtttgcatgtaaattgcgaggcgaatcttttaagtctaattgcgccatgatttgacaagcaatgctacagtaaatatttgctaatgacggattaattaggtttaataaattcatctcgcagtttataagtggaatctgtaatttattttgttattagtctacatttaatacttcaaatgtgtatccgtatacttcgaaaaatttacacccaagaaactaaacacacccttaacataaaaactaaacaccaactgaaaaacttttagaaagataaatagctaggtaacttggttttcaaggataaatatccatctttatatactatagtccgaaggaaatcatcctttattgccactgtgtcccgcttaatgtttcttttagaagagctttagttggtcagaatattgtatactggcatgaattgtgtgtttccattgtacatatttatttgaatcttttttctgactgttttagatggaattatcatcagaatggtatgttctcagtaagatcaatgtatctagctttaattaacaatgcttatgatgagagaaacaagtatatttggaaacttaagatgccgcttaagattaagatttttatgtggtacttgcttaagggggttatgttatccaaggataatttggcaagacggaattggaatggtagcttaaggtgttgcttttgtatgaaaaataagtctattcaaaatctcttcatggattgtcattatgcaaagtttatatagagagcagttcagttttcttttagttttaaccttccaactagtatatctcatattttttatgggtggcttttgggggttgacaaaaaaaaaaggagtaaactgatacttgttagagcttctgtcatttgttgggttctatggttgagtagaaatgatttggtttttgacaaatcaccatctattttatatatgcaggtaattttcagggcaacacactggctcctgttatgggcacagctacaaagatgtgaggatgatggggagttcctaaatgttgcatgccgtaagttggagtcgatggttatgtaactatttgccaattatggatagagattcacaaatagacttcaataataaatgtgttcttcttattttggcctggtttccaatgttttttattggtgtgttctttttatttgaattacactcttttttggagtactactttataataattagctgtaactcattttagcatagggtgggatgttaaattccattatctaacaaaaaaaaactgaaaaacttttgaggccaaaaaaaatatcagttgcccttttatcgatgtttttgcaccatttgcactttaaaaagagtgagcatagctgcattgctatggccatcttctcacctaaaactttggctcccatgtccaagattggggagtgcattgacttggctgctgcctccttcctccccctcccccgcaaacaccaacctaccatgtcccttctcccctctcctctctgagctcagctgcatccatccatccaaactactcacagatgccactcttcctcaaccaccctcccatttaatgccctccacctcctcctcaagcccaggattcgggaacctgctagccatttttgctccaggacagtacagccagatgctgctgctgcagctgctgggttgctgcggtggtcaggtcaccccggttcttgattcttgacgaaggatggcaatggcgacccctacgaccaacggcagcttccttcttggatcaggtggctatcccggtgcccagattctaagcttctcctcctcaggtcacagcggcaatggtagagaaatcaatccatgttcttcagcattgctcatatattttttcttcttcttatcgttcaaaatgatgttctttttttttatgttatggattttttttcatgctgttgggtggtgaggggactgttgcatctgttgggggggggggggggggggtgttgcattggtggtgtggtggtcaccttgatggcagattcagttagtttattggttgcttgaccctcccaatggcatcgtggcaagaaaaaaaaggataactggttttaaggtcttgtcaagtgcaaaaggaggagctgtttgcttccccaacttttgcttttctgcatttggcactgcagagatgtgccccttgtcaccaaagatgcagagtcttttaaatcctttggagatggctctcactctttttacacttccatcttcaagtgagagaggtcaggaaagaggagagagctagttcagtagcaaccatgagtgaagctaggagcactagagtagtgtccctgaactcaggaacctagatgctgtttcttcctcaaatcttgcatgctacacagccttacaggcaatgctgttttgcacttttcatcactcatatcatctcatttttcatttgctttgtggtcttgacattgcatttttttgttgtcatcgatccattttttgcagggttggattgtggaagctcagatgtggcaagaatgcagggggttttagcaagggttagggggccattcacaccaacacaatggatggagctggagcaccaggctctgatctacaagcacattgtggcgaatgcgccggtaccggccggcttgctcctccccatcaggagaagcctccatccaccagtgttcccacacttctcctctggtggcattcttggctccagctcctgtaagctattgtgccattagttttggtttgtcccaatgtgatacctatttttaaaatcctggataaagcaatgatacattgggattctgttatggttagtattttggttttgtcttttgagggaaaggtgtgggtttgttaactatgattagcttattggggattgctattagtttattcagggatcctttttgtatcctgcaaaggctttggagtttggatcttaaaaacgacactcacattattagagatttaaatatttagtagagaacatgtgacacttgagcatactttgctaaacactgatggattagtgttagagatatactccctccgtttcgaaatgtttgacaccgttgactttttagcacatgtttgaccgttcgtcttattcaaaaacttttgtgagatatgtaaaattatatgcctacataaaaatatatttaacaatgaatcaaatgataagaaaataattaataattacttaaattttttgaataagacgaatggtcaaacatgtttaaaaaagttaacagcgtcaaacatttcgaaacggagggagtatatctttataggtctgcacatccaaatattaaatcatggttctttcattttacagtgggatgggggtcatttcagctgggctattctgggagtgctgactccgagcccgggagatgccgtcgaaccgatggcaagaaatggcggtgctcgagagacgcagttgtcgaccaaaagtactgcgagcggcacataaaccggggtcgccaccgttcaagaaagcatgtggaaggccaatctagccatgccgcaaaagcaacggttcccgccatagcacaaccacccattggtgcatctaatggcaaattgtcaggcagccatggtgtgtcaaatgagctcacgaaaaccttggctactaacaggtgaggttatctgatcttacatggtttaatcattatgtcctatttggtaatgagataatttcttatgtcttgatacccaatactagctggtgctgctgcagtattgtgactgctgcccaatagactcttacctaatttgatttcattgcactacagtactacacaacagttatttgactcaaaactcttaacctgaaggacagtttttcatcatgtctctagtcttttgtatccagtgagtgagtgaatgcattagggtgggagggagggacttttacttcacaaatttgctcaaacgattttcatttacaagaaatacatatctgagagaacatttttagttaaattaccgtaatttgattgcagacattccagggtgacatgttatattcacaggagggaatacaatgtatcttaggaagtgcgacattatagtgataccagtaatctttttagtggatgtctcataagtatgtttttacttgacactgtttttaccttgtttactggaaattatctaattatttgagtggaacaatgtaggctttgtttttgctacatcgtattatatcatagtagtgtcaaaatgcatctgacaagaaaaaacattctgcaagttttgacataatttgactggttaccttttttttttttacaaaatatgagttagttattttttatgctggtagttgccttaacttttgttgattatctagatttattaatgtaatctgtcttctaacacagatattttttttatttttgtaggatgatgttggataaagcaaatcttattgaacgctcccaggactacactaatcagcaacacaacatcctacagaacaacacaaaaggtgataattggtctgaagagatgtcctcacaagcagactatgcagtaatccctgctggctctctcatgaacacaccgcaatcggcgaatttaaatccaattccccagcaacaacgctgtaagcagtcactctttggcaaagggatacagcatgatgacattcagctgtcgatatccattcccgtggataactccgacttacccactaactacaacaaggctcaaatggaccatgtagtaggcggttcatcgaatggcggaaacaacacgcgagcaagttggataccgggctcctgggaagcgtccataggtggacctctgggtgagttcttcaccaacaccagcagcgcatcagacgacaaaggcaaaagccgccacccgccatctttgaacctcttagctgatggacatactacaagtccacagctgcaatcgcccaccggagtcctgcagatgactagcttcagttcagtgcccagcagcactgttagtagtcctgcaggcagcctctgcaatggcttgctcacttcaggcctggtgaatgcccagactgtccaaacactgtgaaaccgccggtctgatcatcagggaacagccatgaggctatctactgatgtttttgtccccagagcacaccctgtatgatttcctagctcatgtattatttttctttaatctttatcacttcatgctttgagttccctccgtttttaagcgagcggtaatgtggtattgtactatctcagtttcttgtggaatttgttctatgttgctgactgaattgtcataatttttgtcatggctgcttaacctggtctcattctgttgtctgaaacaagatctgaaattccgaatctaccagtgacttttctgaaatcccggatctaggtaaaagatgattatacatatttgcccttaactgcacaaataaatcatcaaagtaaattacaattttaaccttccaccttcccagtgcattggattataggcgatcaacggccataatcaatttcaaccagagaacaagcaatcttgaaacagactaaggccgtgtttagatttaaacttttttcttcaaactttcaacttttccgtcacatcaaatgtttggacacatgcatagagcattaaatgtagatgaaaaaaaaaacaatttcatagtttgcatgtaaatcgcgaaacgaatcttttgagcctaattataccatgatttgataatgtagtgctacagtaaacatttactaatgataaattaattaggcttaatagattcgtctcgcagtttacagacggaatctgtaatttgttttacaggcggaatttgtaatttgttttattagtctacgtttaatacttcaaatgtgtgtccgtatacttcaaaaaaaaaatttggcacacgaactaaacacagcctaacctattggatttacagcaacatggtaactttgctcatagttcttgatttgttttctccctttagacttcactactactgctcagctttagttcactgcagatcaacagttaacctgacgagagcgtatgagcgaaagcttatgccttgctcatcgtcgctcctcagaactggcactgaaatcatgctactctggtgacaactcctgcaatttctgttgaatgaatgaattgaatgaaacaaacctttcctgaagttctgagcaagggaataggaactaaaagcatctttccagttatctgcaggcaccagtgtgtgagtactagtgttctttccaagcattttccagctgtgtgctcattgagatactccatgcaagacttgaccctctccagaattcagagaaagctacaactacaagtgagtactctgtctactatcatcatttctctctttagctagcactgttctcaaagcaatggttttttccttcctcttgctaatcatctacttcctccgtcataatatataacaacttaagattggatttgacatatcctagtactacgaatctagacatgtatctgtccagattcgtagtcctagaatatgtaaaattcggtcatcggttactatataatgggatggagggagtacttcctgatagtgtgatattaccatggcatgcaacacaagcttgggagaaatggataatgattggtttttgccaatgtgccatagcccagaggacaggagctagtggacttcactgtggcagttgctgcaagctgctactgctgctgctgctagcttgcaggcagtgaggaggagcctttgaacagctgtggccatgatgttctgcagtccacagggtaatagagaagcaaaagatatatactgcatgatgcaggagtatgaaatagtataaatgaagtattccgtccggtttttaatatataataatatcgttggcttttgaatatacgatgaaatccttcattttttttaatgattttgaacatgagattaaacctcattgtttcaatttcctttgaaactccaatgcactatctctttcggctccaccatttaggcttcagcttataagcataagaaaaaaataatttaaaacttaattttagagttgcttcttggggaattttttatcatggtttatttttcattatttgcttttaaataactatgaacacatatatataaagtttcactcataaattattttttaattgttaataagatatttcacatataataagtataagcgaaacgatggcatttttctctctctcaactatagtctaatagagtacctttacggcggtggttatgctattggtattatcactgctacaactaatcttaatcattgttaatttgatgagttctactaccagtagaaataaatcgtctctcctctcaactatatcctaatagagcgtctttacaatggtttctgatggtaatattctgcaatcggtattatcactagtagaactaaccttaatcattgattgatcagttctactaccagtataaataattattttactacaaatagttaagatagtactccctccatctacttttgatagtcatatttcaaaatctgaaaattttatttttgaacctattaatgattttctcgaatttaatgcgtgagtctccattcttccatacataattggctgcatgggcattgagaaatgtaaaatattaattaatcgcttatttacgaggaatgactagtggcatgtttaaatggatgataagtagaattacttatccttggtctgtatgttaagatgaaatatgactatcaaaagtagatggagagagtagtataaatagatacggtgcattattagattagaaaagatgaatagtctagactgatttctactaccagcagatactattgtaaaacatctcattctaataatattttttcctctaaaattcatgtgcgttttctatggaaatggttgattggactaattcctgttttttagttatgcatatgtcatgacatcccattcctgcatttttccctcgttcaaaagtagcccaaaaatgttattcttttattacataaaaaactcaagggtgtatgcgctagtccactgttttataactgtaacatagtttatttgtactcctaattatgaaaacaatttagggttacttcaaaacacatgattgaaaagataaaggaatatgaattaaaatcacatgattttaagaaatgtaaatacaaaacaaagaatttcaaaacacaaaaaaatgtaggaatggcaatttcaattaaatagactgtcggaaaacatacgaattgtacgagagagataggctgaaaggaaattttccaagagtttagagctattactaacttatatctaaaatccgtccattaaaaattcaatggaattttaaagaaaaggatatgattaaatcattttgtttaaaaggctttcctcggaaggcctcattcatccatctcactgggaagttggggtaaaaaaaattattcctaaatataacactgtaataactaatagagtaaattttacttaattttactttaggacatcttttattgtcaaatttttgctttggaacactttttaactaatatttcactttgaatcggatagtcttgcttttatttcactttagaccactcgactcttctcaagtatatgaagttgtaacttataagtagaccattcattcatttaacattgttaaataataaattcggtggagatgagtaaaaaagttgatgctacaaaggtaaaattatccggtccaaagtgaaagtaaagggtgatccaaatcaaaacaccgacaataaaaaaggcccaaagtaaaattcacactaactaataatacccatcagtaagggaggaaacacttgcgaaattccgttcaatgcatttggctggttgcagccttacagctgggttgccacaatttctttgttttttttttaacttcttgcaacaattctggtggattcaaattagggatttcaaccgtacggataccatttctaaaaaaatatattgtttccaattgttattactgtaaaatttagtttttctaatttctaatttctgtctgtgttatgttgaagttgtcactaattcataaatatagaaaatttctgaccgcaccaataccctttctgaaaaataataaaaaagatatcatatctaaccgttttcacccctaattcaaatgtaagggttggaaacttctccaacacgcatgaaaatcgaaggtacttagtacatgattagttggcacggacggaaggtgacggtagtggtatcccgaagcggcagtggcagtggccacgaaactcgaagatggcgtggcggaggcgagacacgagcttggggacaaactgaggtacgacaagggtgctaccgagatcgaagtcggcttcgcgcggacggacggtgtggacgggcggacggagtggcacggaacgaagaaattcgcaataaatatgaaaggcttgctaatgaagtggcaatctaccattgatggcaaatactgaaatttctcgcccaagttccaaagggagcaggacgtctgtagctagctaggaggctcgagcgggccatccaagcacggtctgaggctagcaagcagactttgggcctaattgtggtgggctttcggccgaaaaagcccaggcgatcgatctctctccgtgtccaaaaaaaaaaaaaagacggttattttagaaaatcaaacacacatcaagcaacagactaaaacactaccacaccctttattaatatagagagatcagaaaacaaggagaggagagaaaatctttacctatggacgtgactacgatgaccatagctggattgtcataactagttacctcacccttagtaccggttgctattggaaccactcccatggttgacgtcgcgcaataaagcaatatcgagatgcctcgccgattagtttttgcgctaccggtataggtatgcgtgtgctcgcgctctttgatgcaaggacatgcaactctgcccaaaggagatgcaacaccgcacacattatcactttggtctaatttcgtccttgtattctattgggcaccgatcctagacacaaaagaaaggtatcttcaatagtgcctcaagcttctgaaaactgaaatggctatgggaagcaagcacggtcgtactttcctaatcactggtttccatgcctatccaatgatcaaggactggataaggatgactcgaaagaaaacaaaattagggattctggccctatttatatttcaattttttttcttcaaactttcaacttttccatcacatcgaactttcctacacacacaaactttcaatttttccatcacatcgtttcaatttcttcaaacttttaattttggtgtagaactaaacacagcctctgtttgaagtatacaaagcattttgaatttcaggcattaagcactaacatcagttgcacaagcccaaagccccaaaaccatcatcgaagtttcacacaaattgtactgctcacaggccccatggttttcaactaaactgcgactgaaaattgcgagttattcactcgaaacaagccgcgcctcagtaatcactaaaactgaaactgataaaccacatggcacatgaaagcactagcttcaatgggcaaatgctcctgcaatttccactaaactactaatgaacagaaccctgtatcatcgatgtgagtgatggatggactcgagcagttttcattgaccgagaagcacttcttccttctgaatattcctcaccaagaggccaccttggacgcaggtcatactgtgttaagacaattatcaggcatgataatagccagtcagtcttataaaacatagaacttacactgtattaacgtcaggagtagagtaaaattaccaagtacaagattccttccataacataaatacacaacaggtcgatctgaagtgtgttctattttaatgtaagaaaattagacggcctgattctgagttctgacaatgtgcgaattccatcttccatgatattaattataggaaaacatttggataaaaaataactcataaactgatcttcgtggtggatctgccaccatcacatggctactgatatcataaatattgactagctttgctcacaggccaagcttatttgatcaatccccccagagtgtcaaactgaaggagacatgaggaatataaaggcagctataggaatggggaagatggtgaaaatgtggattgtttgactggcttggatgcaattttgacataacacaagctcacctgttcgatgaccatatggctctaagcttataatatggtaggccgcaagatgaaaataccaccaaaaccaaatttggcaggtaatttgctagttttgagatttgagtattgaggtttgggagtcgtgggtgaaaaaaaagactctggatgacttgatgtaaacgaaattatcgaacttcaactatagtgccaaatgcagttacttgggattaaaaggacatatatgccaaatttacccaaattaaggtcaagaacacgatataatctatccaagtctcacatttcaatgttcgttgaaatgccatcggtttagctttacactcttcctccttatcagtagcaacaccaactgccttttaacaagacctttttttattgtagcagcaaagagttgatcatgtatcaatgcatttttaaactaccaagttataagaagcaaaaaaagctttctgtgcttgatggtgcactttgttttgttcaactcatcaactgagcatattaatttgtcatgttacctgcatatcatcaggctcatcaacagcaggaggatcatcaaatctgcctgcaatgaaatgctcaataccagtccaagcaatcatgacacctgcaaaagaagatgccagaattatgtgcaaactgcttaagaataactaagggaattaggaggaatctgtaccctgtatggaagaaacagtcaaaaataagttctcaacaagtcaaaaggacagaaaataaacagtataacaacaacatagaaccaagacacaaaaataaataaataatgtagagtctagattgagataaaaaatgaagatatgaaatgagtggcatgaaaaatggcattaaatcataaatacttctgttaataatatgattgaatattactgatttactattcaattgatcatgcaaataaactttttaccattgtcagtgcaaagctttgggggagggcatacgagctgtaggccattcttctcagcgatctgattcaaatgagttctgacatactggtttgatgcaacacctcctgaaacaacctttaataactgagtcaataacacactggatgaactaatgtaaaaatgtaaatattctaaaatgaatcaacatcaagatatctgaattacaaagtatttaatagaaggctccatcttcaatgcccattcaactgctcgctggcatctttcttccaaatgtaaaacagcaactcgctgcagaggtcaacatcagaaaactaccaaaatcttcatgaataatgaaaatacattgcctatgatgtaaaaacctgaaaagaggcagcaatgttcgcccttatttgtctgtcatcttttgtcgcggatgaaataggaatatcatctgttgatctaccatagcacaaaaacaacagaagagttacgagaccaaatgtcactaccgatgagactgccatgtctgtttcatgtaataattaaaaatgttccttcgccaataaagaaacagaaacattctataccttttctaacaaccagttttctagcaacttgcaacctcttgctatttgttaaacattatcgttcccactttgtcgttcttgttatttgatctagcgcatttcaagcacaggttattgtatatacgctatagcataatgcctgggtgggtgttctttaattaataaaaagaacaacgaccttgcatggttgcaatagtttcatgttaatttcctagtgcttgacataaaaaaaatttcagtaaaattaaaaaacaagtattgtagattattgagagttaaagtcaagtctctgcttgttaatctagaatattatagtcaaggagagcaaacagcatgccaaaatacactatttatttgacacaccagcaggcatattaatcttacaatgaagacaatggcacaaggactaaaacagccatacatgtttctggattcaatagccaatcgaacttgagtcttcagaccagcataagagaaattgcaatctttgtgttgtcgcattggaacctggaagttcacaaaaagagaaggcaagcaaacatcatgttgacctaacagtcatgataggtggataacacaacatatctacccagtggatgcaaaatatctacgtcggcaaacttacactaaacttaacagcatttggatcaccttctagggcaagctgttcaagagcaggaccgccacctttccgcatatcaagacctaaccatctcgctgacttgtcataagcctcaccaattgcatcatctattgtagttcccagttgaacatattgaccaagtccatgagcaagaacaagaagattgtgtcctcctgaacatattaactggttaggtagctgcccgaacgtcataaaagaaaattcaccaaacacgtaatgtttcaacataagtatatctgttgtattagcacatactccctctgtcccaaaaagaatcaaaatctagggtttgcgatggaatcgatttactgcgagtggccttgtggttggtttgcaccggacccagtcgagttaaaataagttcgaccaagggcaaacttgtctttaatgagtatttctctctccaattcctccaaaaataataaaataagaccgcgagtgtccaacagctaattacaagttttttatggtgcccgatagaatattcgtgttcttgcggtgtctaccagctaattgcacgttttttggatgccctgtagcaaatttttctgttatgtttgggtattactccctccatcccaaaatataaaaagttttaaggttggacatggttattaagaaagtaggtagaagtgaatgttgaagggttgtgattggatgagtagtggaggtaggtgagaaaagtgaatggcggagggttgtgattggttgggaagagaatgttggtggagaagttgttatattttgggacaaattctgagggctaaaagttgttatattttgggagttaggacggagggagtatttgttatcccattttctatttgattgagcttattccatactcgcatattgtatcaatgattgcaatgggccatcataagattgattttgcattctgaaaggaggaaataaatgaaataaaagtagtttttcaaaactggatataataaagtatcgagatgtagcaaatggagttgcctgccaactagcactgcttaaaaatgtttatttccctatattgtagtttgactatagagacataaattaaccatgaagattgttcattacacacctcgtatatttgtacatagaacataaaaaactacatagtccttcgaaaagaagggtatggtggtggagcttgtgaatatctactccacctcctttatgttataggttttatgaatttcccctagtagttcttcaatatcatatgaaagttattctacatattgttatcttattatttggccttctaaaatacaaatttaacatggaagggtccaagattcacatgtacatgtacacaagctaatgttacaattataactgtgtgaacatgcgaagggtgcctttatgaagaaaatcacattcatttatttcacaatactagggaatgtatgattagtgtttatccatataaagcacgggtgtttagatagtacttccaaactgtggcagggacggaacaaataccccatcaggtcaaaagctgactgactaggtgtaaggacaagcctaatagggttcaatcctagactaggcactgttgtccatcaattttatgagtacagctacgtctagtggtaaagcgaatggtcatgcttagcggactttgggcaactccataattttgaagcgtgtagaggacatgcacacaatcatggggtcaattgcttgacatttgaagtttttatgtattttagtgaaaatattagcaaaattagcactacatttcaaaagaactgcacaacatggtggcactacttccaaaaccatgtgattgatgatgtattcaaactggaaatataaataaatttatgcaagttccaatggaatctatgttatacattcaaagtctaccaaacatcaaatatttttcaaaagagccttattgttactgtagagatgtaactcaacaaaaaattgatagtgccacagaatatagggataaagtcataaaacactttgattagtatatacctgaaattaggagggccaaaaatgggaaatcaagatccttgttcactaacctgacatcaatagaactacattaatacaaatgcatcgattatagcaataacaataggttaggtggctatgatagcatttttaggattatataattactttaagtataggcatgattacaatagtcttagggcttagggtcttagcatttctggtaaaaaaagctcttctgtaataataatttaaatttcataccttgcatttcatcacaatacattcattttgcaaaacatgtagcactgaaaaataatttatagttgcaaatttgttcctgctcaaatatcgttatgtggtttttacatagcaagatgttggtcaaatgttcggaagtaataccagtagaaaaagaaatcattcacttttcggttcaaaaattgctaatttaccaacctaatggacattacaaatatacaatagaaaaaaagtggaagtgcaaaagtacataacagaaaccagtcgtgctctagaactaaatccacaaaaataaagagaaaaacataaaatcccttacaaatggacagtaaaaaaatcatcgtttcagctaaaaaaatctactattgcttggcagtgaactgataaaggaacttatgtttcatcagttgagaatgtcatcttcataactcagaaataaaaaccaaggttggatacctggaaactaatgcatgtgcctccatatgatgaactccaacaataggcaggcgaaatgatttcgctatttttcgagctttgtgaacaccaactgcaatttatatggttcattaaatagccttcaaagaaatgtaagagagactcagcgaggttaaaaagtaaaatcaataaagttcactctgactgtgtaaatagtagtatatgcaatgtatcatttcaacaatcgattactttacaggttgacattgcgagtgactgcacaagataaagaactactaacaagtaacaccatctaaagggcaaacaagttaatgatgagaaatgccctgcatctaaaatactcagcgaactaatagtgagaacacagggtttggggtggggagaatgattgaaagatgcaaacaagattctgtaacaaactgaaaattcagaactatgccagcatataagatataataacagtaaataccagctaatcctattgatcaggagtaaacatacaaaagctgatacctctgaggcataaactaagtcctggtcctacggtgacagccactgctgaaagatcattttctgacacatttgcatcatcaagtgctttctgaacaacctgcaaggaaaatacaaaatctataacataaatgtcaaaaacagcaagattgaacagaaactctgaaactgaaagccaaacctgatcaatcgcaagagaatgagcttcctcggccatcttcggagcgacgcctccccacctcacgagtaaatcttccttccaaatgttgtaagcacaaaacaatacaatcagcagcgcacagagcatagcatgaccaataatacagaaacaaagtgtaagtgggctgaacagggaagcagggggcatagtatagtatctcacttgggaagataccacctggcttaggatctcgccatcgcctctaacctgcaaccaaccaaccaacaaaaacaacaaagagccaggcactaagcacaaacaaatcctacacaccgactccaccactgctacaagcggtctgaaataggggagtgagccgcgcgtaccacggcggcggcggtgtcgtcgcagctggtctcgatgccgagcatgaggaggtctgcggcggcggcggcggagggcattgtggcgagggagcggaaggtaggagaggaccgtagcggaggggagggggcgggggcgaggaggagtcggaggaggggagcgggaaggggtgaggggaacggtggggctcgccggaggaggagggcggcggcggcgcgggaggccggcggcgataaggtggggagaagagtggccgccattccactctagctcgggttacactggggtctctcaacaaacaccgatctttttgcatccgacgcacatgtgtgcctcctttttccaaaagtctaaagaaaaaaaattactgacgaaaatgcatgatggcatttggttgtattattactatagtagggtacacaaattctttgtgatgttaagctcataataaaagtataaaagtgcatactcctttgtcctttaaagggttaattggatccataccattgcaaatttatctattcagaaaaataacactacaatttgtctatttgtagccttgccactgaaatttcacaaaattagaaccgtgtcactaccgtcacgttttccatctattctcttcattttccgtttcttccttccttccttcctgtcttccaatttgtgcggtgcggcagcgacactggttcgtagggggtaggggtgaaaacggtacggaaacggacggaaaccatctttatcgttttcgttttcatattttttttcggaatcggaaaccccggatacgaaaacggaatcgaatattatcgaaaccgaaaacggagcgaaaacgaaccggcgcgaatacggtaacgaaaatttatcggaataaaaaacctctcaaactgataaatccaattgaataaattatctatgtttaaaagagtaatgttgttgataaatcccaatgtaggacaaaaaaatattcttatgtaattttagatttgcataacaaatattttttaaaaaattaacagccaaacattcactatttagtgcttaaaaaaagaatccagagtatttcagtcacgaaatttctactaattccaagaaaatttccagaaattccgagaaaattttcggaaagtttccgaccgatttcgagttccgacggaaactgcccttatcatttccgattccgttcccaagaaaatatttccgaattcgtttccgtttccgaaaaattccgaccgacagattccgttttcgaaaataggtctggaatccggaaagatttcgtaccgttttcaggcctagtagggggcgatggggtgcacggcgtccaaggtggagtagtgtcacgcccagaaatttagcccaaatttcgagactattttgtgtattaaatccctgtctaggaccagccagggtacacaaaacgacaagtaatatacagttccaaacgtaaataaagcgtaaaatacttacaaaagaggcacctagtcctcacaccgaaacagaacgacagcagcggaaaaaggcgatcctagcggagcttcagctccactccacaggcaaaactcaactggggtctgagcattggtcctctaactccatcttcagctcagaagcactacacttctaaaaagggggaataatagcaagactgagtacaaccaccgtactcagcaagccacaccaacgatgcagatgtgcaaggggatacaaggatggtttgtggctatttgcataaagacggttgtaaaacattttattgagcaaaacagtaaaactgttgagtaattaaagtaacattaaatctccactgatcaacgctacaccacgttgaacaggcccaaccaacccacctgaactacagtgtattgggtcgatttattaagatgggactaatcacggtgaatctggtcgaccgcccataaccgcgggcacggctattcgaatagctttactctgatcagaggtgtacaactgtacccacaagacacagccccacgacacgttaccgtgcgccgacatgtcaccacgacataccgaaaagaggccgtgacaggacccttcgcataaccccctctaaccaagcacaccacatctcaggtttcacccccgtccccagcgggcaacgggcagtcccctctcgtgcctaggtgaatccggaagcgacagaggccgtcgcagggcccgccccgctccatcacgcccacccttgcctggatgcgtcagctagaggaaagctacactacaagcccagccgttgcccacgctggcttgtggtaagtacgataagttcttccagggcatcccgcgaaccggtccttaattgccatgggtgcgactagcaaaaccatgcacccacagcccaccattcagtcgcattttagttggataattacgaccacgaagcatggccagatgtctcgagcacgcagctcactctgatactaaaaaggtctaatactgtaattatcccatcaactgagctagtggtaattaagcatagctaagcatatagttctagctaggtcacataagtaacatgagctagtcgattcattacccaaggttgacaaagaacagatatcaagtaaacatggcacaagcgagcagataggtaatacccggatcccatgtaattagcaaaacatgcatatttatttgtaaacggtaaaacatttataaattgggatcaacatgctcaaggggaatgtgtgacttgccttgcttcttcacttggatcttctgaactcttatccttgcgaatgcgatcttccgaaacgacgggaactacacgctggcacgcaaaacgaggaaaaactctaataaagaccaagaaaacagtacataaaaagtaaacaaacatgtagagctcaattttagatgaattttgcaagttgaacggctcaattcggagttcgaatgaattagatatgaattttagaagttttgagccatttaaatgaatttctataattattcacgaattattgcgcaattattatttattttctcaaaggaaaaggctgtgctgacgtcagcaaaggagatgggcggcgccggcaagcgggccccaccggtcagcggcacaagggcgccggtccaccgtggaccgggaccaccgaggcggtccaccaccggtccacgggaaccgacggtccggatcggcccaagccgatcgggcggccaggggcggcgcggctggggcacagcacggcacaaagccggctggccaaacgacggcgcgcggcggcgcggccacccgcggcgacggccggcgacagctcccgcgggcgaaagcggcgcacgcgcgagcagcggcgcggcgcggcaagggggaggcggcaaccggctgcccggcaccaccggcaacggcgcgggcacggagcgcggagcgcggcggcggcagcgcgtcgcgaggacgcccgggaggcggccgacgaaggggaggaaaagggagagggaggggagtgctcaccgagatgcacgacggcgaaggggcggccgacggcaaggaacggtggcggcggggctcctcaggaagacgatgtgacagagctccggcgacgggcgtcgctcaggatggggcggatgggctcggcctcgatctgaggaagataaaggaggggttagagaggagaggactggtgcgtggtgaccggtaacgacggccgaccgcgacaatatgagaaggatctcaccggcgaccgaggaaggaggagctccgacggatttccggcgaagaggggcggcggccgaggtcctcctcgtccttgcggagctgagggaggcaacggcgcgggtcggcgtcgaccgaagcggcggcgcgacgcggctggagtcggcggcggtggcggagagaggtggttcgcgtggctacggcgctacggaggtggagaggggaaatggagcggtggccgagcttgcccgggcggcggcaaagctggcggtggcggcggagcagtgcggcggcgaccctagcgacgggaaacggcggccggagttcgccggagtgtggcggcgcgcgggagcggcgtggggagctcgagagagcgcgcgggagggggcaatgagttgggggaaacggatgaggggaggtcggggtgcatttttataggccccggagggggagatcgtggccgtggcgggcggcaacggccggcggatggagcttcgacgacgtgggcgagtggggctcgaacggcgccgattttttggggggggaaatgggggagaaagtggaggaaggggaggacgtggggtggaccacgtctgcacgcgcgcgggagcgtggaggcgcgcggaggaagcagcgtcgtggggtggctcaggcggccatggcggcagttggagctggaggaaagggatgacaggtggggtccacgggtcccacctgtcggagagagagggagggagaggccggctggggaggcagaacggacttgagggagagagagagccgagcgggccgagggaggaggccggcccgagagggagagaaagggggcgcgcgggtcgcaggagagaaaggagggattgggccgaaaggggcccaaagagaggaaggaggattttatttgttttctttttattttaattgatgcaatgatctttgtgctattaaaactatttctcgagctccgaaaattcacggaaaattccggagagtacattagggcacaaagaatattacaaaatattcccggccaataatttttaaaggaaatttttaattccctcaataattcacttgattaagttgatttaacttttatttaatttccagaaaatgtattattaattgatttttattcccgaacgaaaatcggggcgttacaagtaggaggacatggtgtggtggtgcgaggagcggcggtgacacatgaaggacacggtggcgtcgcggtagcagctcgcctcggcccacgccgactaactccgtgtcccaccacactgcgccagtgctcctcaccacaaccacctagcctcctctgttttcctcgctcccgtcaccgacgccgctgctctccaagcaccacccggcgctgccgccgccaccgccccatagtcacaatagcagcagcagcagcagcctcgtcacatagcggtgagggctccccgcggcgggccgtgttgcctcaaggtgcctcacatcctgtccgactccagcattgctcgcccaacacggttgtcgttccggaagctagtggtctagacaccgtcggcagcggcatcgtggaactgggagaaaaggggaaataagaaggaagaagaaaatgacaagtggggttagggcatttttgacttttcacgctatttatctctcatattcacctgaaaattaataatttaatgggcgtaatgtctactagcaaataaccacgtttagatagtgtttttccccaaaagtgaattcgtgcggtgtccgactggtaaaatcacaaagtcttgatgtcctgtagcaaagtttgcctaatttttatgtttttagtttcatcatgagaaatactttcataacatatataatctacacgttgttaaactatacgaacttttatatcgatgattaaagataaaaatgttttaacttataataaaactaaaatgacaattaatttaaaactgagggagtaaaggtagaagtagctcggacgtccttgtcgagcccaacgtaccccaatagtaaccggacaacggcgctgtgcgtccgtgagggttgattggccacgagccaaggacggaacggaacggaatggaagaaatatgttccctttgcttgaacccaaagtgtcacagcgctatacaattcatcccatccgtacacattttgctgccctgccacacgtgtgcgtcgtaggattacgtacttgtaccaccaaaaagttggttggccagaagaaaaaatttttgcacatgaatcctctcaaaagaatacaaatatattaatggccgatcgatggcccggcgtccttggtagtcgtcgaatacgcgatgaaattttggtattattgtaggtgttactaataagacacatttcctctatgatgcaggcctggtttagtttccaaatttttttctcaaaaacatcacatcaaatacttggacacatgaatagagcattaaatataaattaaaaaactaattgcacagttaagggggaaatcgcgagacgaatcttttgagcctaattagtccatgattagccataagtgctacagtaacccatatgtgctaatgattgattaattaggctcaaaagattcatcctgcggtttccaggcgagttatgaaattagttttttcattcgtgtccgaaaaacccttcagacatccggtcaaacatccaatgtgatagccaaaaaatttcttttcgcgaactaaacaggcccataatatgatttgtctggtctctaaaatgtttttaaaatgtcactaaatataagactaagtacaatagcaaactataagctagctataaatatatgtggaggggataaaacaaagagagaagagaaatgaactatggatcttagcacgttatgtgtataagaggtgggactagttattaatgatgtaacatatatttataagtaactactgtaaaaatagattattagattactataaatgatttgacttttgaaaaaaaagtagttgattataatattaaacttgctctatagctctgtagttagtgggactgtttctaaaatagaaatggttgaccgggggacaagcgctactgatgtagtgatgtgcccctgacttatagggaattgttaatgatctcaagtcttaaaacctctatctcctctatttacagcctcatcgctaggcttagtgagaaataaaaaaaaaagcatacttgtaaacgataatttatgaataaaacttttatatacgtgttcttatgatttaaaagtaaatgatttaaaagtaaatgatagaaaataaactacgatgaaaattctcaaaatcaactctaaatttaaggtaaaaaatttaaattttggctgataaggataaatataaatgaaaaaaaagacgttaaatatgtgttagatattgtgcttgtgaatgtgtaagtgtagtgtgtgtatactgtatagatggtgcatgtaccaatggatcatccacgtaatcgaaagaaatggcttcatggatcttataaactggagtacatagcaggagagaggatagcacggatcaactatgcttgtgttgatgtcgccatatgaacttccagatcaaaccaccatgcatgctggtttaaatagttgaaacttgtctttcaaagaaatgaatgaaactgagagatggcccactcttcaaaattatttagcaggttaattaggcaaaataatgcatatttttctagagaggaaataatgcatgttctcacctaatatttttcttttctgtgtgtttagtgggaaagctacagaatcaaatgcctttggtttcggaaacatatgttatactcaaatatatttggctgataccaaatcatgtaaaatacatccacatcaatccaattatatgttacatagtttgttttttttttcataatggaacattgcagcaatttttcacttgtgttaaatatagtaccatatatacaactctcctaacttgataattttggcataagagaactcatgccaagaaacagaggtagctacccagtcctaatagcagcaactactactaaacatattttatactataattaatacacatcaactacataatcatcatcaccaccaaaagaattaagattaatttaagttaaaattaatgtaaacacatatcaacatcatcaccagcaactctgttcagcaacaaccacacacctcgcatcgtcgtcgatggcgtcgtcgtcgtcgtcatcatcgcatcgcggccgtccgttgctccacgtcagcatcagcgccgccgcggcctcctccgtcagggactccagcacggcggcggcgagctcggcgccgacgcgccgccgcgcgtcgccgacggggcacacgctccacccggccgccatctcggcggcgatgaggccgtgcaccttggcgatctccgcctcgagcttctcctcctcctcccagtagcgtgaggcggcggcggaggaggaggaggaggaggaggagctcgtcgacggcgagcttgctgtgtggttgttgacggggtggtcgggtaatgccggcgtgtaggccgccgccaggagctccctgaagatgactatggcctctgcgatggacgaagtacgtggagcgagtgagctctgagctatccacgtggcggcagcaatggcgccgccgcgccggagacgaaggagacgcgaggtgagtgtacacgtttgcttacttttcgagtaggcaggcgacgctggcggctggaacgggctctgctccagcacggagacggggctcagctgcttctcctcctcctcctcctcctcgtcttccatgtcgtcctcgccgatggccgccgccgcagccggctgctgctgctgctgccgcttcccgccaaccttcttggccgccgcggcgccacgcggtagaaacttggagaggatgacgctgagaagcgcgctcgccggtcgccgtcgccgccgcctcatcgcccgcgcggcggccggccagcaggcggcgtcgaggagggcgggggagcagcccttgtcgaggagaaagaggtggagggaaaagggctcctgctgctcctccagcagctctgaaaggcggcgggcgccgccgccatcactgctgctgctgcttcccgacgccggcgacggcgagaggagggtcgccatggggggtcggaccgtcggagagaggaggtaggtggacggcgccggatggatgaatggaggcttataaaggtgggggaaagaagattgaaaatctgagactctgaaatgtctactttggttaccaaactatatatctccttttgtcatgaaaatatactttaagctactgaacttttttaaaaatatgactatatttataaccctataaaattatgaaaaaaagttcaaattaccaacccaaactaatgtgacagtacgaattacctcatcaattcaaaattagacattcttcaccctcaatttttcataccggacaaattgtccccttagctaattccgaagcggttttggttttacgtggcataagtcaacataagaaaataagtagtgtggcccacttatcaattctgcctcttctctcggtcaccacatttgggcccttaacttttttttatatattttcttatgttgtatgaattgccacatgtgcatcacttaggattaaaaccgctctggagtctatcaaatgagtaatttgtctggtataaaaagttaagagtgaaaaatatctggtttttgaattaaggagggtaattcatattgccacaatagttcagtgggtatttcggacgttttctcaaattattataaaaatgatttatagatacatcatcctttcacaacttagatcactaatacatttagaaaagaaaagttaagatttcatttgtaaaaattatattagtagatttatcatggatatgtggctagtaataataaaatgggtattgctatgtttcagaggtgcaattttagccacctaaaaattacactttcctacgcctaaaattgcagaagtatgcaatgtgcaattttacttctttttagctttatttttcctgttctatatggttttgctttacttttagctaagtttgaatattgtgtgcatgtacttgtgtaatatgaattgtaatttcttttttttagttatgtgttttttgaaaaattttgcaggttagaataatttattgctaaactttctatgtaagaaaaagggaggagtgatggaaaccagtggactgttaccacagggataagaaaaccgactaaaatttttgaaaatcacagtcacgacacttcttagtaaaatatatatattaatgtactaagactatggcaatatcctaaacgataagtaaatctctactacttaaaaaataaaaaataagatgcttccttcgtccgtcaaaaacaaaaaaaatagcagaaaaataaaaaaaaggtctctactacttaaaaaataagatatgcttccttcgtccgtcaaaaacaaaaaaaatagcgaaaaaataataaaaaaaaaaggtccgactcctattcctctggtccgactcctattcctatcagaaaccaaaaaaaaaaatccggctctatccgattcccccttataaaaaggaaaaataaaagtcaccactcctctcggtttgagtctgagatcacaggcaccctcctttctataccatgatatctcatacatcttggtgaaaaaaattgatgtgccgaattaaagatctgtttgcaaaaatagaacctacaggtcgagagcattccatttttatatgattttaatttttggatttgtacttttgcattcgagtccctgtaatttttatatttacatttgagttcctataatcttgcaaaaaaatgaaaagggcgaaataaagtccgatttctaatcagtatatatctcttctctatctctaatctaatctaacaatttaaaaatagaaaatgcacgagaaaataaaaattgttcaaataaaacgcgtgagaaaaaagttagaaaaaagcgcaaaaaacacgctaaaaaggttttacatcttccataaaacaaaaaaaaagcgcgagaaaaattatttccatcgctggtaaaaaaattttaaaaaaacatgcgaggaaaaaactgtaaaaaaatgcgctatttctaaaaaaaatggtttgaaaaaaccacgcaaggaaaaaaacaccatctattaaaaaacaaatcgctctgacaaaactgtcagaaaaaacactaaattgatggacgcttgagtcggatagaatccatcgattttttgccatctactacacggcttttatttcatcacatattctcctgtattggaaaaaagcaaaaaaagaacatttgaaaaaaaaggaaaaaatgcgcgagaaaattattgttagaaaaaacatgcaaaaaacacacgagaaaataaaagcaaaaaagggagaaaaatatggttttcatcgtcagtaaaaaaagcaaaaaaaaaacatgctaggaaaaaactattagaaagaaatgcgccatttctgaaaaatagtttgagaaaatcgcgcaagaaaaaaagcaccgtttataaaaaaacaagccactcatcaaaatacaaacacatattattattagaacttttttacccgttacaacgcacgggtatttttgctagtaaagtataaagtcaatctatactataaaaggttgaattttttggttttgcccttctattttgggaggacggggaccaatcgaaccgaaattttggaatattttggaccgaaataatttaacattttatcatattttgatcaaattttaataaattgtgctaacataaaaaaagtggagtgggttgaaactttggaaatttcattccagaattttggactatggttactagtagtataaatattaaaaagatactaatggtaatggttttaaaaagtttaattaattacaaataccccataggcccagacaacctgcttttcgtgatcggacaaatgagcatcatatccgatccacaccctagctttgcttctgtttcacgtatgtatttatggtggtcatacccatatatacgatcatacgtacatagaggtgagaaagtgacactggggagatcaactatcacttttaagatcggtacaaggtactggtactgtgtgctgtttgcaaaaatctttaggctgtctgcagatggaatttcacatcactcctatacatgattacatgaatgtgtactccttttatttgcaggtgaataggcagctttgtttggtccatcggttttcgaaagtagtgtgggtactatgtgccgtcgtcgttacccgtcacacatacaatgccgtcctttcttttttgccaatggcatcagaacaaaaggaggaggaagaggtggttgcttttggttgccattggcatctatctagaggttggtaggagctgagctgatgattctggttcccacccctggaaagagataggacgattacttgctaaagctggagttatatatcgagctttggattgtatccgaacacgtatctggagaaaaaaatagtattatatataactttcatatgtttactcttagtatgcatagaaccggcttataatacgagagacttattcaatacagcggaaaataattctagcatatgaattttatatttttttactatcagtctcagcagtctaaactcgatactaacaaaagatttaacaagaatgcttaaaaggccgtaagaattcgaagtgttatgttttcttttctagcgggctgattaaattaatgaaaaattaacacatttgaggtctaaaggcatagcaaatcgtacatcatctatcggtagcaaatatggtacacccctcaaatagttaggtcctctttgtaatgtaggattgggaaacacataaatacaaaacagatatcccctaaaaaaagaaatgaaaaatatagaatttgttgtatgtttctctaatcttacaagaatgaaaaatatgaaacaaagcagttatgttcatatgaaattgagccatatgaatgcaatcatatcgaaaattttctatcaatttctatgaatactagaatcccaatgaaaatcctcctcatgtttgcaatgtaatttttgggaaaagtaagatgtaactgtgttgtttgttttttttttaaaaaaaaagatgtaactgtgatgcaacagcttaactgcgtactttcatttgcttcctcccaacgtacgaataaatcatgttctacaaaggtgagcacactcaaaaaaacagagttctttcatgattcacatgttctttattaaaagacaatcaatagctagcataccgctcaaactagcaattaacaatatttttatatataattttggtcaatttgaattgtaaactgtgaaatatacatcactaaaatcattaaggacatttgttaagaactgaagttcctaacaaccagtacgtatgatgagagatatttctcagatatctatatatagtccaaaacataaaatatacagtaaaatatacaccataatttaataaaattgagatatactttatacccagttaattatatatgcctatataattagtgtagttaatactccctccgtcccaaaataagtgcagttttagcactgttcacgtccaacgtacgaccgttcgtcttatttgaaaaaaaattatgatttatatttttattgttactagataataaaatatgaatattattttacgtgtgactaatttttttaatatttttcataaatttttcaaataagacggatagtcaacacgctaaacacggatatctatggctgcacttattttgggacggaggtagtatttttttctcttctctcattaaaccacaacacttcaatatttataaccctaaataattaaactatggtgaaaattgcctcttttttcttctcccgtataaccacaccaccatagttgtctttggatgatccatatatattagttccttcattttcttctatcgtgaagtggcatcactttaattttgcaatctatatatgatttaaattgtcataaactaataccttctaaatggtttatcattttttaacatgatcgatcaaatatgcatattatatcgtcgagtaacaaaacaaatctgtcgtacaccttatttctatatatcactatcatacaaacttttccccacggcaacgcacatgattttatctagttactatgtgagagcataatatatatttttccactatatatctatctatctatctattattatatactaaaagtccattaaacttcctacaaacgctcctaagccgccacgtgacaattctataaatgctcctaagtcgccatgtgacgttttaatatattagaaacatctgaccctcgattttcatttaaattggtgggtccataattttgcactattagattagattaaaaatagacccttatacgtatgcctccctcaccacctgcaagtacgtacgtacaagtacgaacgtaacataccccctagacttttttccttttcttatacaccttcttttattattttgctttacctaatatacatccataatattattggtgtttgaacatatgtttatttactaaagaaatatgtaattatcatttattttgttatactctgtcca

SEQ ID NO: 4623 - DNA, 29925 bp, Oryza sativa
ccctcctcaatcccagtgttaggttgaaggtgactgaaattcctagcaatttttttagggaattcctagcaattttaagtcacctaaaaactagtaattccctttcctatgtaaaaggatccgctatatatttaatcaaatgttttgctatataaggattgagtatatgcattcgtggatcttttgttgagccatatttggatctgtaaaagttagagccctaaatgcaccccttaaatacatttttcttttgaaaagaattggtacagaaaatatttctgcaattaataggcgtttacccttttaagaccctcggaaattggctacttacacagatataaaaatttgaacattttccgctgtgcttggtttgttgctgacttgtgcgtgtcatcactagctagtacagagcaaaataaacgttgaggcatgtgacaaccaaatttgacacaaggacaaagtcatagtaagtttggccagatttggaataaaccggagttttcacatggggaccggtcagaccaccactgtatggtcggttggaccaaatggtgaactgcggtcaaaccgccattgcggggctggttggaccgacagcctcgagtccgagtccaattaaggttattctcgtggttccttgcttggttccaaggtttcttatatcctaagtctaataggcatggagaaggtctatggaggcaagaaaaactcatttataaggacgatggcagattcaattctagaccaacccctatataattaaatcgttcttttacctttactttttagccatgttttctactttaccctttatcatctatctttatcaatttgcatcgtaaatcatccatcttcactgtgagaatgtgatatcctttgtaggtttgtcctgtaaaacttccgattcatccatgagacgggtggttatctccttattgatctaaatcggcctagagaatggttttgatccctcaattggctctgctaaccaatttaatatctgaaacccatcttggtttagagttttctaatcaaggtggttggcgactccgttaacactaaatgtatgttcctattcttgaatgatgaaattttagccgatataatgtcaaagtaatattattatctaatgatatatcttgtcatgcactcacactagatgacaaccactcttttatatttttaatttttaaaaattttgagctggctccagttgaaaaactagtaaactactagtcaaattcaaaaaaaatagaaaaggtaaaccaatctgttaacaatgaaatttggtaagcccctaagagaataatcatgtcgccaatagtcagattccttctatattcggttaaggaaattaatctattaaaggaaactaatccagatgtgaccgagttcaaggagaatgcggcatggcagtttatctattaattaggtagtatttgttagtttccttttatctttaggaaagtgtgtttagtgtcccataagtactttatgttttccttttatcttttaggaaagtttttttcttgtcttacaagatctagtatctacccatggatataaatatgtacacccggggtcattgtaagagctttccacgatcaacacaattcggcacatcgccacctttttatcttttctactttttatcatccggcggaacttggcacctaacgcggggctgcatcggctttcgatctccggcgaaggggtaagccctacgttccgtcggcgcaggcaattgtattggctatattggcgtcgttcaatgctgcatcagtacattcgacctcttggatttctctggtttggttgatatatttacctacctatttatcatatatcttagttaatctagtttagaatcttaatttacttgtatcagctgagatttgttttagggtttatgctggtgtcggctaaattatcttgctagattagattagctaaggtatccaccaccatgaaaattagtcaaaggcttgattgtttagactttatgcttctttgcatacttagtgctatatcagttgagtttgatctattaagtcgtgcttagaatcataaagtctagcatgtctttggttataataagggtttcatcggggtttcagccgatgaggtatctggacgttacatcggcttataaggattgcacatataagttggattcagccgatgataacaaatgtttcactgtttatctaaatcgatttgatcttatgacatcggacctccagctgatgtatactttaaccatcggatcagtgcttgttttaccatctcattgttagccaattggtttctattggatttatattgttattatattatattatattatcatcagccgattgtctttatatcattatctacattagacatatagccgattgctcaaaaccctatcgctatcgactggtatcagcatcggctggaatcactccatcggcttgtcagccgatcggctatttgatctactgtttacatatcttgtcagttgcaggttcaaactaactagcacggccgcatctcattaacttttggacctgcactagagctaagcagatctcccaggccagtgtgtgtttttcgcatcaacacaatcaaattaaaaaagtaaactaattttttaataacatttatctgaattttatccatttccaaaagtttttcaatgtttttcttttcgaaaaccgctagtaatggctttgtgaaccctgttcatacttcatatgttttctagccgagccctaaagcttcactctagggttagtttagtcactagcatttggctcaaagtagttcttcgatccatggaaaaggccatgtgagtgtgccatgccatcctcgtatgtaagtgtaatgatcaaataaccattctattattatatatatagtattaaaaaagaaagaaaaaacaaaaataagaacctataactcatgatagaaacaattttgagctgtcccgttatttctgttttgtttttctttatttttctttaatatggtgtgtgtgtgtgtaagggtagaatggtcattttgttgctataattatatatgagtatgatatgtcacacccacgtggccttttctatgggtccaatgactacatttgtcggagcgaggatcttctttagtgggaaggcatgataccccttttagagtttgaccagggtgcacattccgagctcgtgcactgggcacgtatgggagtgagtacacatggtttatacaggttcaggccgctcgggaatgtaacaccctactcctgtgttcttactctatgagatagtgtcaatgttacagtggaggatgatgatatgttctaagtggaagaggatgaaccctattgtaacaaggagataatgaaccttcttcactgagtttgatatatgaatctaacttatagcctatttcagtctgtccaattccaactcccctctctgtggcatggatcctccttttatacatcaagggggtccaggtgcctatgtatgcatacaaaagtggggcccaacccaaaggggttggtatgctagcttggtcttgtagttgtccatccaagcaggctgaccagatgtgatgaactcacctaccggccaatatatggagcggggcaaccgacgtctttgtcccaaatgtcaatggacccgcccgtcagcctccgatgctagtgaaaggggggcccgtggggtagatgttgagcatgtgccgcgtcacacgacctcttttcgaggcaacatgggcaagcaagaggagaaatgcacagtctcgttacccccacaccacccgtgatatgtccataagatgcgtatcactacgcaattaatgcagaatgacatggtaaggtagcgcataagaccaggtcaaatctccttaatatggtagattctcttgaagagtcctcctggcatagtcatcggggccttgatccacctgtagtggttctcaggcccccaaggtaatagatgcttgtcccaggcaacggttgtcccctagtcgtcttcaacagctcaagacgacacttgttacttcacttcatcttctactttgtacacggtgggtcctatggtgccccgagcattcaatggatcatcgttcccatatctccaacaaagttgaaccaaataatagattttagacaaattttgctacagaacaccgcaattgtgtgtatttagctcagggacaccgcgaaagtgaacttttgggggaagacatcccataatcgtggatatttgctgatggacactgcgccgtctcctctccacttgacgtgctgacgtggcaaacgggaggctatttttttgacgcggtcggacgtaagtacccctgtgccttatctcctcacatgcactcggtagacagagcagcggcagagccgatggcactcggcgacgttgtcgccgacgccggcggcgatcggtggcggttctgacgatgcggctaaaagagaaagtggagagggcatccttgcgaatctataggtggtggttttgtgcaatatggtggccggaatagttgtcggcggcgacgcgagcggcagtgactctcggcatgccgagctccggctcgtttccatgtgagtgagtacatgcgtgcgtggctacaaggctcctggagattcactgaaggtcgtctgaggttcggcgatggatgggcggtgatggcgacctttgaaatgctccagcagcggcagagaacggcaggtcgacagcgtcggctccttctggccttcgggctgtcaaagggaggaaggaaacgattcaaagaccatatgaggatgctacatgtgtgaggaattgcgccaaagctcacccgggagcgaggaatcgaaggaaagagccggcggccggacttgaggaagaaaggttcgatctccttaacggcagtgcctcggatcgattcctccggcagacctccttctaggatgccggcgatgcttttggcgtagtggctcggtcaacgatggcttgagtcgacgggaatggcgaagcgacgcacggcggcgccctggacaccgagaacgccgacgagcgcatcttcatatgcttgatctgcggttaattaggatgcaaggacatggctagatcaggtagaggaagtagttcacgttcccatggataaaatgcgacgaagctcaccagaggtctctaagattggatcaaacaccttcgagcagagaaatgaggagggtgttcttggagataaggcgcaggggtatttacgtccgaccgtgtcaaaaaaaagcctctcgtctgccacgtcagcacgtcaagtggagaggagacggcgcggtgtccatcagcaaatatccacgtttatgggatctcttccccccaaaagttcactttcacggtgtccctgagctaaatacacacaattgcgatgtcctatagcaaaatttgcctagattttaagtacttgtttggaaaaactgaattatcaaggaccaaattgatcccgcagaaaaaaaaattatttaccttgttggctatttaccattccatttacatggacaccattgaccggtaccactcaatttttatcaccaataattttcaagtcaacaaatttgaataaacgaaaatcaaatggttatatttaacatacaccaaacttcgctaaaatagtagtagtcatagttcggaaataatagtgcagggtgttgagtagcagtatttaggaacagaggaagcaactgtctatttttttttagagaaggctttttttaacccagcctctatatccaaccagatatatatagccatatattgggaagcaactgtctatactttacagtgaaaacataagcaatttttttcactattattattttattttcctattatctgtgcagcatgagtgattttaaaaggagaaaaatctgagctttcttgcccctggatttttcaactttttgaaaacttattttacaaatatacccctagaaaaatttattccaacgatggatccttttcacagcgccttgttccaatatgtaacggcccgtcctctagaaccatgcagtccaacccatccgacaagcaagcccatatacacatatcatcccacttacactttcatcatcgcttcgggtaaaaggttgaacccggaacaagaagtgatatggctggaggtataaccccttataagttagttccaccattgctaaactagcattgtgatattaaacatgcgtacacaactttcatgggtcacacatgccaaatcataattggccagaatttcacacaacatgacgtcgccaatgatattggcgttgtctccctcgcactcccgtggaagctaagtcactgatgtgaaagggatcaacgttatgtacctatttataaaaagagtaaattgcatccacggtgcatcaatttggtaggtaggtgcaatttggtacaacaatttgagaaataaacgttctagtgcaacaacttggtaggtaggtgtaatttagtataagaactttataaatgattgtataaatgcaaataggtacgattttgatacagtaaactaagaagttatacgacaacttaattatttgaagcaatttttttatatagattcatttttaagtaattattttgacaatatactagcgtggatttgtataagcatatttatatttttatcgtaataatccatagctgaaagtcaattaaactggatgtaaaaattattatatttcggttaatatttgagaagataaagaaaacaaaaaaatcttaaagataattggatgtaaactatatgtgcaatataattcttaaagattaaattcaatatttaaggtaatattcgtaggattactatgtaatggcatattgacatcgtgaaaaaattcatctagcatatgcttagccaaattgatgcaccaaaatatcgaattatcaagttcttataccagaacgcacccacttgtcaagctattgtactcgaacgttcaattcttaagttcttgcactatatcacacccacctaccaagttgttgtactatgggtacaatttactcttataaaaatttcaaaaaagatatatttgtaataaaaaaatatgtataaatatgtcctcgatgctaataacgatgtcattaaaaacctattgtatatattttttttaatttcaaatagatcattggtgtcaatgtcatttgtaaaataagtttttaaaaatgaccaaaaggtaaaaaagattcaattctcgacaaactaagaagtattaggctgtgtttgatagtagagactcattagcgtatgattaattaagtaaaatacttaaaaatatatattaatatgattttttgaaaataacctttttataaaaaaaatttaaaaaaaattacaccaatttgaaaaatatgtgcgcgtggaaaatgagagtaagttggaaggatgggaaatgaacagagcctttagtatatgggtcgatcggatcggatccgacggctctgattgcatccagtcccagcaccgcccggactcaggaggagagtgacctacctacctatacatctcctaccaacttggaagagagaaatcgtgtcaaaaaaaacaaccaaaaaacagccaaaaaagaaaaaaaaaactcggagagcggaatagaggccaattccaaatccgccatcgcatccttctctccatccaccgaggcggcgccaccacctctcgtccggcggcggcgcggcgcgacgctccatccccggcgaaaaggccgccggattccctgtgggggcggcggagaggcgtcggaggaggctggcgccggcgcggcgacaaggttagctgataaacttttttttttttggggggggggggggggggggatggcctgtggggtggggaaggcggcgaggtgtgtgtggcgcgcatacccgcatcaccgacctagaagttagccatctttcgtgcaattcctctcgttggggaagaataggcaaccgggtcgtttctttgacagcaaatcagacgttcttgttcttggtcaaaagaataatctaatcgatgcccctgtttatcagactaatcatttcaggtgattcaggtgaggattatttggtcctttggttggttactagatgcgtagtaaacgccaagagaaatcctcacagatgtcaaacaatttcatcttatgtctttctgaaattacctttttcagctagtacatgtaaactggagttgtatatatatgtatactcgttggcgttgattgctttctccatccattatgattttgcagcttaattaagcaaattggattcggatcacaaaggaggcggtgcctgtagaaaagccatggcttcttcggtgttcaaggcgatggcagagaaggcagggccgtctgtccgaaagcaggcccttacgctgaccgatgcagcggcgtcgagggtgcgccagctgcttggcgtacggcagcgtgcttatctccgtcttggcgtcaaggcccgtggttgcaatgggttgtcgtacacaatgaattatgctggtattcggtttccccgacgttttagatcttgtttatcatcttgatatgcgaataagctctgggtctcttgttctactgttgcgaggaaaaatttagattccattgtcactcttcctgaaattcctatttgggtgctccctgataatgtccattgcaaattccttttagagccttgtgacaagataggtcaaaaccataaaagaggtattagcttgagtatgcgaataagctatttgtctcttgttaaactgtggtcaagacagatgtaaattccattgttaccctttcttaaattccttggatgcttcctgatatttgagcttgatgcaaaattgtcatatctgatcatattcctttcaaattccttttaatgccatgcccagcatcacagttgtcttgcaagcagtagcaagagagagtgttctttggtgtatgtctggagccagggctctcaatgagttattgtgtgatcgcttcctttggatggttagctgctcctaggaggtctttttgttgcacatcgctttttgtgatgctttttttttcctctagagggttccttctttatggatcacctctgttgtacatatttctgcttcttgatgaaatgaagcgcaagcctcttgcgttttcgagtaaaaaaaatgtgttaaaaccgtcaaatttgtttgtcactatccacaaaagagttattagcttgagttcataataccagtggacatttgttgtgtctacaaaggtcatgcttccctaataatatcaggtggaacttaagcgtctagaaaatgaaattagttctcaactggattgagcgatttggctttgtttgttcacatccttgtcttttcagctctctagcattagcacatataagttagccttttaggatgttggttgattccatatatgaactttatattccaaaaggtacctttgagccaaattaacaatggtttacctgcacatgttttagggtgtctctcttttgtgactgggcactgaaggaatatgtatgcatgtttatttggaatgacacctattcttcttcacagcttctgagattataccatcttgctaaaatgtgtagttatttcaatcccatagtcacttgtttgtgccataattaacagatgggcttatttctgtgcttaattgtttggctacaaacgatccagttaatctgactaatttatgaaacttatactagtattgtaatttatgctcattatttctcagatgagaagggaaaattcgatgaacttgtggaagataaaggagttaagatactaattgatccgaaagctcttatgcacgtgattggaaccaaaatggatttcattgatgatccacttaggtatggttattttaacgtcttttttctttttcttcttttgcaaattgccattagtgattctttgtcttgtaggtctgagtttgtgtttatgaaccctaattccaagggagaatgtggttgcggcgaatcatttatgacatcaaccaaaaacaaaggcccggcatagtccaccaagttttggcagcgatttgttgattatttgatgtatagaagtatgttgctaatttgctatacacttcagtgacccattgtagaggaaaatttcatttcagctccattgagctgattatccttcgtcactcagcatggttggcacttgttacctttcacctctggattggatcatctgcagcaaaggaggatactgccattcccctctagcacgaaacatccaattgcaagatgcctcctgattgcatactctggtgagaacaatggaggtcagcgttccagcaactcgcctgagggatcatataacaggattttcggcattccatccactcgctaagggatcatataacagaggtcttgtttacatcttgtaagatggcatccaaggatagatgtggcattgttttttttcctcttttgcaccatgatctgataatcaccttgctgcatgttcatactgagattttgatctctcatgtaacgggattttatgccatttatgcttttcctggttggaagttgatgttaaatttaaccatgattattaacctacgagctgtcctgagtaatcatcatatcataggattaggttgtgaatcatattgttccatgttgatgagataaaaatcactaaagatagatgggtagatcaatgtcctaaacatgacacttaagctgtcgtcataagctaccatagtttgtattagtaatggtttagtagtagtttaatggacaaatgcaaagttggctgatgcctcctggatgacctaagacaacctgtttccaacgatagggtttctcctcgtagatcctcgggtctacatgtcagtgagggtctattttcacatgtagagagcagtactgcatctcaattggtttcgaacatgaacccagttatccagccatcatcatccaacagaagcatgtaatctgatagaacatataaaacgaggaaaatagaacccatttcattaactgcaccccatgcacatagttcgatagaacatttgaacgccattccattcgagaatccaggttcaatgttgggaagaaaccgccacctgaacaagctaaaatatttcaaagttatgaaccaatgccaacttctcgagctagttaaggggcagacagcctgcaaaagcatattcaattcatctagtggacaaagttgaaccctagctaatctacggaacgtcgctgaaaattcgcctaaaaacaaaaaaagaaagaaagaactcaacgcaaatggaactagaggctttctccagtgtatttactccaatacttgttgaaacacagattttatcatcatgagtttcttcccaaactgtcccccagtacaaatcgagggcaaaacacccgttgcagtcagttgcgaggttgtatacagctgggtaaaaacatgagcatccttatgcctgtcactccacagcatatgcccactttgatgtcacatggcagcgatctcaggcagaaaatgcatatgttcgagtaacatatgctgatcttaatatgttaagttccaagccaagtgctcactttccagcacatcgctcaaaatcacaaatgatctctcaatgtcatcaaaactaaccttcaggccgaggccttttatagtctctttcacctcgctcatgagcagtatcatgactgtcatggtgctttgagccatgggaattgcgctgttctttaatgtcgtccattggggcatcttgagcagtctctggtgtattctgcttgccaaggtgcccattgcctgtaacttgatcagcatttctatgatccccccgatgcataacatgaggggaactctgcttcctctcctgctttatcttattatcctcaacagccaattcaatgtcatgttctagttgcctctcaagatcatcatcatcatctattacctctaccttcctagcaacatcacctttcagtttcctttgcttttccatttgtgctttcaccttatccttgtcaattttatttaccatcaaggatgtcacattcgtaccatcattgccattgcggttgacatctctgatttcactggagttgccatgtgatggaagattcttattttctgtcatggactgtttgtcatgatgtaaaccatcgttggcaccaaaatcaactctacttccactctgattgcttcttgttttgttgctcccatggtcaccattgtcattttgaagcattttctggtccacagtttgcttttctagatttgagtgctcgacaccatgatgacttggagcacctgttgaatgctgtgaacttgactgtttcgactggtgaggaagaggtgtttcctcggattttacagagactcgctgattaggaacactagcagagctcccttcagcttcatttccatgggacggttgtgcctgtgctgcacagttttgctcatacagctccaacatttgattgctaacttctgcaatcaagggagacatgcattattatctgatttaacaagaacccagaaaggaatgtgtcatgatcaaattgtattatcaaaaagttaaataagtataactagtgcaacaagaataaaaagacttaaaatatacagcacctagtcaatgtaaatttggattgctcatagcaacttagcaagcacaaatcaggttgcgcaagatgacacgaccaaaagaaaccggtttctggaccctatcaaattttcgaaaactggccacaattaggcttttccagaatttctgtgtatcctggtcagctttcattgtaatgtttatacttaatatatagtttggcaggtccccactaagaaaaataagtgcattcagccagttcagttaaccattgcacatcagcaggccaaggtatgaagataaacccttgtgaactctaaaattgacccctaatgcagtgcttatgccaactgaccccaaaaattctagccatcagatcgaacacaattagcacataaaccctcagatcctaaccaaccagatgctttgattagacagattgcaattgaaagcgtgtgcttatgaaaccacgtgaactatttatgaaatcacacatacccatggagagatttttaatagctccctttagaaggtagaacatacaaatagtaataacaaagatctgagaatctgtatgctagtaattcattagaaagactactacataagctccacattatgacccaaatttcaatcaatacagcagaaaataagaaaacaagaacatgctaatgaaaggcacaattactattccaccaacacccactacgaattaatccactacgtaaatcaagcctttcgcaagcaaccaattatctgttcaaagcagggcatagcagatcagtaaagaggcgaggatctgagcatggcatcacacagagagcaatgccaagatggtcgtgccagaggtcaggatggaaaccagcacctcagtgctgcaggccacagtgtagacctcagacagcatcagcctcagcaggccacatgctttgctccaggtacatcattcccagaatcagtgaggggatgaagaggggagaagaaagaagggcaaaaatgatgaaatggtataggtaagaagttttagcccaagttgtggtattactacttggtacccagaaaaaattaatattttttggtacctggccaaattcttgtgaacttttttgtccttgcctttctttgaaaaaccttgtgtatgacggtatgtcagtcttaacccatccccccagaatgttgcagaaagttaatgtagaaaacaacggggtgtaaaccttttagaaaaaggacagctgacgatgtgaaatttaaaatcgaaaatctgcacaagttgaatacaaatatgtacttttctgaaacagaggattatcaaaaaggaagccgcgtagtgtgaaaagtatttctacaaaccatgaccaaacatagcatctgatgattgcaagatgatgctgaatactttagacttatattccctgctcttctgatgattaatttctatttcctagtactactatggaggcatggactaataaaatagaccattctaaatccataacaaacctaaggaacaatgtgttcttttctagatgtatattaatttttgtgcaaaatccaggaatgaaatctgttgatgaatagagtaataaactaatgcatcagaacagattctccattgcttcaactagtatacaaaatttaaataagctgcagcgcaacattaactgcttcagcagccagcagtaaggtaccaaagcaacctagtcaacatgctcgttaaaaaaaatatgcggtttaaaactcaggagattgttgtaaaccgtcatatggaccagatagaagtatagaacacaacattatctaggcaccaaccttccagctgtcttggagtcacatcaaactcctgccaccaaaccttctcaccatcagatggaagcttcactttgagaaatttagcagccaaaaagatagcacctgctgcaatatgatgaggcttgaactgcaggcaaagcgaagtacgcagcctgtacaatatacgccctttttaacgtgttatatacatgattgagtgatatctctaaagataataagggtatcaatagcatacccatcattgacaaaattccatgcaacctgagcaagcgcattttgagcaactttaaattttcttattgcttcaaccaaaggcttgtatggatgatgcacattcaaatcaaacccaagagttgcaagtacaactcgctccgcaagtaaaataagttctttttgttgatcatatacttcctgcagagacaattacagaccattcattaaagcatcccagtggaaatcattgcctggtgcaggaagaaaaataactccgtccagacaatctcccaaagcaggaaatatcacgtgcagggaaaaagcctatactactatcaggagtcataaacgctataaccctatatgctagccttggattgttttcaagaagcattagctgagaatagaagcatacaatggtgactatttacttccatttttttttacatatgcacgcagtaaaaccaggacggaagtaattatcacaggcagatgccttgatggttaacttaatcacaaccaacatgatataatacaatgaataactgtcagatgttgaaatttgtttacatgtaatttaacctcacattcttgattcttccattagataaattctaggattcaaaaatgccgcaaaaaaatcaaaaaggcgatgggtaatagttgccaatatagccagtaatgtttaccaggaaattgaacagtcaaaatacttagaacatcaaagaaaactaaatatcaggcaaaacggatggtcctgctgccaaatgcagatcagagggatttttttttgcaagaaagaaaacaaattcataaaattaaagtatatagcaaaagaagcatctagtttattgttaccttctgcttgattctctgaccagcagcaggatcctttttatgaataatctcataagaaaccagaataacatctttcaaaggcctaggcgtctcttcaacttttccagccaagaacatgcaaactgtggcaattgtctgtaagaacggtcagtacaaattataagttctctcttcaaacaggtacagatctataggacaacacttaacataggagtaaaattaagatcatgcaatcaaaagtttgcgacacgagaatgcaaggaaaatgagaatagaaaattatttcgtttgatacatggtacaaaatactaaacaatctcaggacaagtaaaacaaactcacatgcactacaatactgtctctttccattggcagtaagaatttgtattcatttctctttctggttatagctctgagcttttgacactacaatactatagacatagcaagttctacattatatttgttccagttaattccaacatttaaggcattatccggaagcatctcccactttttcatgtgattttcaatgctttcatgtgtattagcttaaatcaaatatgaaagtgttgtattatacatgtgatggctaaaagcattcaagattcgccagctggtctgcacacagatagcgcagaagattgaggtgttccgtttgagaatcccgtggtagctttataaatgctttaccgccttagcggtatcatatccttgcttggtttccattcacattggttctctcgttcattttatagcaaaaccttgggaaatgtaaaaattttccaatgttacagtagggacaactttttcacaccactcaccaatgctcccctaactcctaactacatagaagattgataatggggcaaccactggtcaactttaatctggatcattaatccgtaacctccaccaacaactatcaaatatatgtggtacttttatctcataacaaacagtgcagtcaaaagcacaaaaggcgctcgcctagatgcaaaagcaagcgaagcgcagggtcgcaactaaagcacctagagtagcttaaagcacaatgccgttggtgagccaactttaggcttaagaacaaggcgctcagacgcctgctgccttctttttttctgccagcttgattcaggactcatattttgggcatcttttgttgaaggattaggttattaacttcttagcagaactttattaatgtggcacgctatgtatattatagcagccaaaaactacttgaattgcagtttgctagtctcggaccttatccgttatatatttcttaactattagtttgtttttggtcagctgccagaatcaggcatggagcttcctacttaggggtagacatttatgtttttatattgtgctccatgtgtctaaggcacacactttttaatgctttgtacctgaggcaatataatactattgcgtcttagtgtacttttcgctttaactgcactaataacaacaacttcagtccctataaattaagtaatgaagtccccatagctcttgtgatcgtaaaatgcaaatgtcaaagtatgtacttccccgcgacacaacttctatatctataaaatattgcagttttcatcgctcctacattactatccatacagaaggaaaccattttcttgttaaacatgttttagaactagataaaaaatgcaaatatgtcgttgtaatataaaggctactaactaaaagagaaatagccatccataaaaccacaaaaggaggaacgaaccaagcattgaaagtacttactcgtctatcattttttgcatgggactgacgaaggtaaaaacggtgacagaacacaatagctgtagcaatagtgacttgtggcctaccacagaacaaaaggcagtcattgattggaagtagacagaatgatattatactccataaataagaaaaactaaacaatatgtagtattcacatgaccagaacaatttgcatggcaatcaagggctaaaatcaatgatataaagcacacattctgcttccatattttgataatatacacattcaacaagtcgaaaccaaacaattaccaggtcctcataaatttgaaagagataaaaaaacatcttctgcttctatgttgattatatacacataaatggatctcacatggatgtccaaacaaaggggtaaatagattgatcaagcttattagaacaaatcagaccaaaaataagctaacggcttacaaattacaaccacaatagatatacttcagttaagtttagcatcctttgaaaataataaagtagaaatgcatgcatcatggtaattgaagatcataataatgattgaaaggaacaagttaacatcaacaatgaaaaatataagttaaatcaactatgatcttacactttaagcctcatgcccaaatcttgtagaaaagtacaatatgattttcggaggtaagactctttcttcaaatcaatgccatccctcctggatggagaattctcttctatttcctttctactgaaataccatgaagcaccaagttcaccagtctcctcattcctgccctgggtagttctgtatgggctattttctacaattccatgatgtgatgaatcacttggcatcatagccatgtaaactcgctctcaactatattgagaaaggactgatgaagatattacttctttatctattgaaagtggcctgagcagcactgaacgaaaaagatacagtaagtgtttataaatttactaaggacaaaggacaggataataagatacagtacaagtaatgattaattctaaagtactaacatatggctttatgctcattccaatctgtaagttcgaaatagaaagagcaataggatgataatcatgctttacaagtcactagacccattaataccccactaccagagaaaatggcaaaaagccaagaatacgtctagtagtacacgttgtcgaactatgaatgcagggaactaatacagattatggtttataacattatcgggattatgctgtctaaagtttctaaagcatagaactagacaagtaaaatttaatcagcaaccctcgttacttccctaagatgcaaacctcattcaaaagcataaatcactttagatcaattccaatgtctatgtacgtattggtcctgatacaccaatcaagggtggtcgcctggttaaacagaaagatttaaatcgattattgatttatattatgtttgcaggctaacgaagccctatccccagtgatactcatcacccacaaaatgcatcatacatctcctaaaattgcccatccagtcaggctctttacacgaaacctaattacagtcttacacatacacaaagtggggattcaagatcttgcaaaaacatgacccccaataaacctattcgagcatggcaaacaatcatcgattcattctgacccgcagcctggctagctgcgaaccccccatagcctggctgacgtcgtccacccgtctagctgacgttctttcctattcacgcagatccgcgattcgaccctactcttctcctaaaaaggcgatcttgagcccaatacatcccgcaagatcacaccttgaatcccccatacccccgcacgaagaccatatatcgagccgaaatggcaccaatcgcgacacctagggtttcggaattcattgaaccgcacagctatcgaaaaatggcaagaacgccgcacctagggtttcgattcccctccccgctccgcgaatgagacccgccatcacgagacgcgagaatcgaaacagagaggcatcgacgcgtacctcgtctccccccgcgctagggtttcgcctcctcctcctcctcctccgcctgagcccgcccgcggcggggcggatggcgccgaggcgccgggggcgcgacgcggctccgccccccccccccccaccaccaccaccgagctttgcttgcccctctcgcgcggcgtgcgtgcggccgccgccttctcctcctcgtcgtcggcgagggctgagagggcggaagggggaagagaggaggaggggcggcggcggcggttcgggtgcttctcgcggataaaagcccccgcgttgcaaaaaccctagtctttcatgtgatttttttttggttcccctttggtttcagagtttgtttttctttgttttttttttcctataggttggggttttgattgagaatgataatttattttatgtgttttatatgaccgtagtgatattatatcgattgatggtttggtgttggtgttccgtataaattattattatgcgattggaagttttgtttatctgtttatgggccatggcccatcagcagtgacgcggtgcatgttctatttggcgttacgcttttcttactttcctgataaacttcttctgttttttctacatggcatgtttcggtacatgttctatttggtgttacgcttactttcttgataaacttcttctgtttttctacatggcatgtttctaaagagagtgaactttttttctctagcgctgcatcaacaaagaatggaagacgtcactaccatatggcttcagctctagccactctcttgtgtaatatactttattaagtgttttggtgagcaaatattttgttgcatcaaagattattattcatttaacagaagctttatttcaattgtaacacgttttttccttgttacacaaatattttgttccaacgagattttcgtttgttacattaagtatttttttaaatagatacttttattttctacatatgtagttaaaaagaagtgttcaacaaggaatttaatttcttatagaggagtgctgctcattttgtgtcatagatattttttggctattgctttattgtattgtgtgatatatgaagatcactgatgtaattttttgaaagaaagaaattgataaatggatgtattattctagggataatttagttgttgattattgtttaatagaggtggaaaaaccatagcttggtactggttgatgcatgggcctatcgatcaatttgacaaaatatttgtgctatagatgaaaatatgttatatgctgcatatggcgtcattcctaccccgcgtcatatttttgttgttcctattcttttcatacctcatggtcttctttccatcatatcattattcctatttttaccataaagctttgcgctacctttggaatctttcatgcatgataactgcccctcctagacaaacagtcacatagatggaagtgaatgtgcaaaatccattcatcatatcgttattcctattcttaccataaagagggccacatttgtaatctttcatacgtgctaactgcccctcctagacaaatactagtcacatggatggaagtgaatgtgcaaaatccattggaagcaacattggtaagttatggggtttgtaggcaagtgaatccacctaattgggttcatgtcctcaatttggataggacaaagtataaattttgtgagacgtcctctagttgttaggcaagtgtcacagagacacatcacacactgggatgtattttgatgtgtactatatctctcttcccaagaaaataatttgtaggttgcccaaacaaaacatcaatcggaatagattttattcggtttccatttcaatgtacgactaacccaattcaattttgattcccattttcatttctagatggacttgaataacccagttcagtttatcctatgtaatcgtataaacaaaacggaagcttgtagagacaaagggctctaatacaatcactatttgtagtaacaggttatgttctagatgtttaacaatgttttttggggtatttttttgacaaagcagagttttatgtttaatttatagtattaactgtttcttctgctgtaatttgtcatttaaagcttaataacattgcatcccttgaaaagaaatatatcataactaaaatcaacgtcatgtttgtatattggcttctggactaaaaccatgtgcacctaaggctattttttcaatgaaaaattattcaccgtattattaaaatggcttaattgttctatactttggaaaataaattttcttctactatattatttagaacagttgtttcaagctatttgctaagtttatttcttaaaatatttaatttattcttaatagtctagtgaaaattaataatctatttcacacgaacctccggtaggaaatcaagagggaaagcccgtttctaccacttgaccaaagaattacatttcatttcttttccacttattttgtacagctagcaattctaaccagcaagcaccttctctagcaccaaaacagctatcccaaattcaacaaccataggagtatatgtagcagcttctagcaccaaacttacctgaactcatgatcacatcttctcatcattagctcatcactactcagtactcactcctctagaatcatgtcatgtggttgatgccaaccctgatcaatatcgactgactcttgtcatctctgttcctctactttgtcacctctgtagctataagctgccgtattgggaggctctacagcaagcaagcaagacattgatggacattggacaagatgccatggcaatgcagcagccatggccggcatttttggatccacgaggatactgttgggcaccctacgagatacacaagcgagcagcaacaagggtaagcaaacgacggttcgtgcagtatctgtgaagatgtgtaccactcccaacattgtacagttgcaggcacttccatcaatggccgtgtttagttttcccatattctcaactttccatcacatcatatcacatcaaaaacttttatacacatataaactttcaattttttttccaaactcccaactggccgtgtttagttttctccctattcccaactttccatcacatcatatcacattaaaaaacttttatacacacataaacttttaatttttttccaaactcccaactttcttcaaacttccagattttttcaggaactaaacacaatcaatgtgtatcaacgcaccctgtggtatctcgtactccccctattttaaaatataataacttctatctcttaaaatttatctcaaaatataataacttctccaccaatattattttctcaaccaatcacaatctctttccatttaattttacatattctcttaatagtcatatccaactctaaaaccttttatatgtgatttaatagtatgttcttgtgaagaattcagactgcaacccgacgcagttgggcacgctactgcctgaatgcagtgtccactgtccaatggaggtttttgcatgtacggcatgtaaaatctatgaattaggagtactctgctcaatgaatttatgatttttgtgttaggcgtccggtatgtctataggaaatacatgccactcagtgacataacccgaaatagttttgaattcaggcaaattttaatataattagtatttgctaaaaaaaatttcatcatcaatttactaatcaatattaaatcttaatggagttttcatcgatgagctcagacagctgctcgggctagctagccgggcagtggctccacgtacgtacccccgatgctacttgacttaaagctgagtacttttgagcagctcctcatgataacttttttttttccgttaacactttttaattgcttaatgatatgtttctatataaaagtttaataaaaatatcaaataataaatcctttttaagtttaaaatagttaataattaattaatcactcgttaataatttatgcatgaaacatactagcccaaaccaaattgttgaatggaatagtactaccctaacacttaacacgaggacacatgcagagaataaacctcaaagattgaaagtttgaaactatccttgagatacatatatgactaggggtggacaggaagctcgtggctcgttagctcgctcggctcgtgacacgctcgactcggcttggctcgtttaaattttgtaacgagccgagccaacattttagctcgttagtcatagcgagccagctcgagctggctcgcgagccaaaacgagctgaagcccaccagtggacagcccatcaaacgaggcttagtagcagcccaatcatccacgaggcccaccacagcccttgatatgccaaaccctaggctaaaacaagcacacaagcaggttaagcaacgccgccgccgccacgcttcccacgcgcagacctgcgcgctagcgatgcgtcgtcgtccttcccatccgcgcggctctcgtccagcgcccgacgccaccgcaaacgccgccgcccgcgccgctcttccacggcgcccgacgcggccatggacgccgccgcccgcgctgttcttcctcggcgcccgatgcggcagtggacgccgccacccacgcccgacgcggccgtggaccttccccggcgcccgacgccgcagtggacgccgccgctcgcgtcgctcttccacgacacctctccaccctttgttcgctctctcttgtccagttgtccccaaagctcacgagctagctcgagcttacaaacgagccgagccgagcttgatttctagctcgttaggaagccagaccgagtcgagccgagccagctcgacatccacccctatgtatgacgtatttcatccgtcctaaaaagagccactcctatattccatatgcaagtttagtagtagcgtgaaaatactaaagtgcccccaataactacttccgttccgatactgttgtttctctaaacccaataattacacagcatatacgaagaacacaagcgacatcttgcgaaaaaaaaatccaaaaattcaaaattttcacttgccgaaagaaatataacatctccaatctgaaaaaagaaatgctttggacggtcaaatgcaagaattagcaagaactaactaccaagaacagagattaatcgtttgccttcaccaccgtacgctcgtgcatcctcttgcattagatcctctgcctccgccactgattgcgtcgcatccacccgtagcctccacctccatctgcaaaataacgagatgcacctgcctcaaccaccaccgccgccatattcgagccgaatccgtccgacagtgccatcatctgtattggatccgcctcctcaaaagcctctgcctctgcggccacatccaagctgccgcatcagggtgcaggtgtcgcatatgagctatttgcgaggatggtgggagggaaggaacatgggtagagcggttcatcgccaatgggaggggtaagagatgggtggaaggaggagagcgacggacgagacaagacgagaggaaagaggatgagtcaattctgtttttggttttttttttttaatcacgcttgggtgaggagagagacaaaggataagactgcccgctatcgctgtttctcgatgtatggagtagaaatcgttttttttttttggacaaagcctccaccccagtgctcagaaatcgtttttttaagatggaaggagtgcaagttttatgtataagaaactacgagactgggtttctttcaaagttggaaatttggattgaaattggtacgatgtgactgaaaagttgtatgtgtatcacaggttgatgtgatagaaaaagttggaagtttggatccaaacacagccaagattgaaaagttaatttgaaccagtggaacacaagaaaactcacaagagcaacaagtgcagtacactggtcctactagagcaagtgaagtacccggtaatcggtgccccggccggccggacaccatggcgcaaagctctgactgcctcagccttttcacctggcgatcgactggcgacgcaacacgacggccggcgagaaaccgatgcctcgtccggtcccatccatccatccatccatccatctcgctcgacagacacggggacgcgacgcgatggttcgacgacgacggatggcgcggggaagaaaggcatatatggcgtcgcagccagcagagagcacccacgcggggaaacaatcgcctgcaaaaatgcaaagcaaacctttgcctgctgcgctgcctgcgcgtgcgtgtgtggatcatcgatgctcgacggctcggtgccgtttctgcatgcgtctttggcagatgcgtagattcggcgacaggggtaccacaggacatacttcctcagtcaaaaaaaaaaaaaaaaaaaaaagacaaaccctgatatccgtgtccaatatttaaccgtccatcttatttaaaaaaattatgaaaaaaattaaaaagataagtcagcataaagtattcatcatgttttatcatctaacaacaataaaaatactaattataaaaaattttcatataaaacgaacagtcaaatgttagcatgtaaacccgcggtttgtcttttttagggagtatacgcttcagggggtgcagaatttttggcgcagaaaattcctgttcgagcttgtgaatatcttggccgtttaacgcgagtttcagtgccgctgctgggtcagagatgagttatgccttaggacaaccacaacatgcttaaaaaaaagtaaaaaaggaataaatatattgatgaagtgcaccttacacattgtgtaagccagcaatagaaaaaagtttcttgtggtgcacctcaaggttacaatcggccatagtgaataaataactatttttttctcctctacttactctctctctccccactatcccaaaaaagttagcagccatctcatatttttattttatagtggacctacgttaaagactatatatgttgtgcatcatactataacaaatagctaactatttatggatcataccttaagatgtgtatgcacattatacactgaccttgccattatggtacaagcttttatttactgtaacggatcaatttcgtatgcccttatggtacaagcttttatttactataacggatcaatttcgtatgattagagattgactgagttggtaaattaaggacaaagcacgggctgagtccatatatttgggattagttgggtgtgtgggttgggaataaagcacgtgtcagtctcatataattagagattgactggatgggtgcattgagtataaagtatagggtagatccatataattagggattggttgaatgggtggaatgaggagaaagtagttaggtggtgtttggttggaggggctaaagtggggctaaacttcagttcatctcataaaaacataagtctatgagagaaactaaatttagtttctaacttctaaacacccccttaatcttatggtggttacacacgtacgaaggagcgcacgacctcttgcgcatgatgagaaggacaggatgaatagatgagctgtggagcactgccaacatgctcgaaagtacagttattagtagtagtataaaggactacctatttaattacttctagctaattcaatgagctcaattttcttatcatcttgcatgccagcctatatgttttaaaaagaaatagaagtctcctttaattgcaaactaagaaagaagcccgcgcagatgtgcgggtattttgtttaatgtttatgtcaaaagcgtttcctagattcaaacataaatcactatgtcccggttatatataaatttgtctaatatcgccactacttattattattattattattttattttattatggatacttattatcgttcttttgaaacctgagtgattatttaatagatgaaactgtatttgtaatatcaaaataagaacaatacatcattaatcgactaaaaaaattatctccactactaacctaactgttcatgtcgatctgacttatttccaaatctatgtataaatattccaataatattttatcaaaaaaatatattataacaatatcgcttgtatgagttaataggataatactgttaaaatttgatatgaatgcccatctaacggatgaagccgaacatactaccaaggctttcttcctcgataccttaaaacatgggtcacatatcgacatagtcgtgcccatcaagaccatcgtggagaatagttttaacggctaattcactattagtaccctcataaaggattgcatcgttaagtacccatggtggcttaactcatccaaatgtatgcctttgctatatcatggtagtatagcaagctttattatctatgcttggcacccttttgagaatggaaaaagagaagacagaggtgattacaataatcctttttaaagttttgtggtatatagtagacacaatttgtttatagtgtaaatcaatattactcaaatttcaataatacatatacaatattcttatttgaaagtgagtgaggttatcatgttagtagagtgtatgacatacatccatcaactatgcccgacacatcggaattcctgaagtataagaaaatatattatgggtgttactggattgtttatttgttgccaaaactatatgacaaacaaaaaacctacatatatgaccatagttctcatgatggattaaggggttgtagtatagccatatcactcgctagaagtatttttaataaagtttatcatgtctatgtatcatgtgtgcttctcacttttcaaataccaatcaaatagttttgaaaaattcaaaaaaaaatatttgagaatcgtaatatctcacatattaaaattagataagatctacttgaaaaaaatataactaaattctgttgttttcatttttcatttttacatatgtagattcaaattatttgtcaggtgatattgtacaccataattatttgaaaaattattatgacattaattattatgtgccattatgtatttatcagttagcactaactactataggtcaataatagttcatttaattaaaggaatacatcagaattattgaaattgatatatatttaatagatgaacacttacagaccattgaattcatattacatctttgatctagtttaactgcgtatattggttgggtaatattttttatatcatggaaaatcatagtttagagaccattgattttctctgatcatagtatgtatgtatatttttagctatatatttttacttgtgtatatatgttactttgctttttcttacatgggagattttgtttttttttgggggggggggggttgttttttcaatagacctaatttaacggtataaaataacgggttcactaatttaaagtttgtagagtaatatattttagctctatatcatagaaaatgcaaagggtgatggtatggctcacactattttttaatttataataaaacatcaatatatagatttaaattattgatttaattgtcaagaatataaagaactaaattgatcataaaaccaacttatagttttcaaaagttaaaacatgcatggagccctccacgaagatgacactgacctaatttaaagttcgtagagtaatatattttatctctatatcatagaaaatgcaaagggtgaaggcatatatatggctcacactattttttaatttgataataaaacatcaatatatagatttaaattattgatttaattgtcaagaatgtaaagaactaaactgaccaaaagttaatacatgcatggagccctccacgaagatgacactgaccgtgataaccatgaaagtctacattcaatcgaagatataaatcaaatgttgtttagattttattatgctttagatatctcaacaacctaaaaataagaagagcagataatgcatatacgtgcttgagccgtgagctgatggtgattatcttggctggtcgtttgggctggtgcttttataattaatcttggcagtgatttttttcaatcatagttatcaatatctttggtttttatttcgttcgtacatacgtatagcttttgcctttttttttttcccggatgaattgtacgcaaggattttctcttgtatgtgaataggatattgggagtgagagattatttttttagatttaataatttaataatttaattgtctaaaataatggtctcttagctttaagtgaaaatcgaggattaaatgttttattttctctaagaacttctatgattttctttaatttattatagcgctacttagcaacgtagaagcatttgtagagtgacacatggtgacgtgagagcgtttgtaggaaatttaatggacagagtataacaaaataaatgataattacatatttctttagtaaataaacatatgttcaaacaccaataatattatggatgtatattaggtaaagcaaaataataaaagaaggtgtataagaaaaggaaaaaagtctagggggtatgttacgttcgtacttgtacgtacgtacttgcaggtggtgagggaggcatacgtataagggtctatttttaatctaatctaatagtgcaaaattatggacccaccaatttaaatgaaaatcgagggtca

SEQ ID NO: 4624 - DNA, 50324 bp, Oryza sativa
ataagagatatgtcaattttgtgaacaatgttactatcactttgtcgtatgaagaaatgatcaaaataaaagttttagatcttgatgagttattcaactttattgttgatgactttttcagttcatatcatttagtatttttaaatgttgtttgaagttgtcatattttcaaattcaaattcaaatggttcaaaaaatattatatagaaaaatgaccaaaataaaagttatagatcttgatgagttatacaactttgttgctgatgactttgttgctgatgactttttcagttgaagtcgttcattgatctaaaattctatttgaatttttcaaactttgaattttaaatttcaaattatttaaatagagtcagatggagaaatgaccaaaataaaaattttgcacctcaatgagttctacaactttggttttggtgacttttcgatttgaaatcatttaataaccccaatttttgttcgaagttgtcaaattttgaaaattcaaaatttgaatctttcaaatgaatttatttgtacagaaccgatacaatagttttagatctcgatgagttatacaattttgttgtttatgatttttgcatttgacacacaacaatcggcctaaaattaaatttaatgttctcatctgtgacgggctttatttttgacagatctcaatgagttctacaactttatttttgacagctttttcatttgagtttttttagtattataaaattcaattcaaaattcattttttctagaagtctgatttgcttcctcttcataataatacttgctaaatataatatttgatccaattaactcggttttgctaatataatatgtgaaatatgtgaatggatatgaaatatatgatcaaaatggatgttatgtgaatgtggttgtgttaaatatattgatggttgtgtatatgaatgaatgtatatgaatgggggatgttggggtgtgacatcctagcctagggcttaataggattaatagaatactcataccaagaatttacaactattttttcggaagccgatctccaaagaactttgatgttaagcgtgttagccctggagcaatttcgggatgggtgaccaaccgaaaagttcatcccgggtgcacatgagtggggataaaaaagtcacccaccggaaagttcttctcgggtgcacatgagtgaggataaaaaagattggcatgggagaggcgggatggcatggcatggctagccaaaaaatgaaatttattttttttttattatactcatctgtgacgggcattaacttatgcctgattgagatgagagtcatctgtgacgagctatagttaatacccgtcacagataagggtcatctgtgacgaacgctagttgtggcccgattgagataggtcatctgtgacgggctatagtttgattagtcgtctgggtcaaagctatcggtgacgggctttaattagggcacgattaagatagattcatccgtgacggccgtttgcccgattgagataactcttcacagctgtgacttctaacctgtgacggacgccatgcccgattgagatggggcttacggtccgattgagatgatggtatccgttctagtgacactttgttgccatatcgagtgactactagtgcttctgattctcatccgagaacctctgtatttgggatgcacctagtgcttctcacttactacctccatcctaaaatgtttgacgccgttggcttttttaaaaatgtttgaccgttcgtcttattcaaaaaatttaagtaattgttaattctttttctatcatttgatttattgttaaatatacttttatgtatacatatagttttgcacatattacaaaaggtttttaataaaatgaacggtcaaacatgtttaaaaaagtcaacggtgtcaaacatttagggaatgagggagtatttcctaaaggcctctcaatctcacccgaatacctctcattttagtggcactctaacttactcaagataattctggcatctgctgcaactacatgtgctacactcagaaatttaatctaagagcagtcttatgcatgtaaaacctctcgagtaatcttcgttccatccgcgtcgtttgatctttcttgcttccgcgtagtgaaaagtttggtgcgtgtgtattgttaatgcgatgttattgttctgtaatatatcttattaagtacttaaatcctatgttgaattgattgaatgtcaattttctgcaattatgcacatctgttctgaaattagaaaccctcgctctttttgcttctttggatgatgactcttgtgaaatttctgttattttgaaaaaaaaattgtggaatgaccttcagaaaaatcaaaaatgggaaatttaggtcattgccaccaaatggttttaccatttgactagtttgggagctcaattgtctctgttacgatagtcaggagattggttaattggtcgcttggaattctacattgtcatattctcaacatttttgagaatattctacattggtcgcttgaactcgcatcacaagtggatccatatcctcgaaattcttgaataacaacagagttgcaaaaaaactgagttgtactgttcagaaaacatcatacagctaatcaaaatccacgcaaatttgttgcaaaagcaatgagtttcttgcggacttgtgattgatgttgttcagacttatgaacccaaattgcacgacaaaacaattgaaaactgcagaggggagtcgtagaaactacactcagaagtttcctatccccatcggtagcattttttacagaacagaatggatccaccatgtaggcggttgaaagcacctactgctggtaagcatgaggctgtgtacttctcaccatatgttggcaatcaatcaggtcatgttgaccttccgatcctacttgatccacaatgaatcttgttcttgtcacctgtttcctgaatacatctcattcccaccctcgtgtacctctctttttttttcaaggcattctgattttctttagataattctggcgtctccaccaactatatatagatgcagataacaatttgatatttgtatatgtggatgcttgcacaacttctcgattaattaatctttgctacctcctcagccatgttttttgcttccttttttagaccctgacgaatagttagacagtggaaagtttggtgggtccattgtgaagttgagggtctatcaattaattgccagatttttctaatatccgagtgtttgagagaataggaaaagagaagattgagaatatgcgtaaaaagaaggaggtgaatcattagcgcatgattatttgagtattatttattttaaattttaaaaatggattaatatgcttttttttaaagcaacttacctatagaatttttttttttaaaaaaaacacaccgtttattagttcgggaagcgtgcacgcggagaacaagagaaatcttctctctttcacctgctgctgaacgcagattagtcgatatagctggtatcttactatgcatcagatctgatacccatcgatatcggctgatacccatcagtatccgatcttgtacctatcggacatcggtaccagacccgataccctcgttaccagctcaacgatgtcacctcctccagtaccagctccttgttgtcgcccgcacgtgtagcattgcgtgccttaggctacaaaattccaatcaataccgccggcgaagaggaccatcaggactgcctcgaacaaggccttgatcatctgcccctccaactgcctcctccgatggaggtgctaattccaactgcaaaatcgtgaaacatagatgtgtaggcgtgtagctgccatcttgttcaactccgatggacactgtgctgtccttcagcgtgcagctgctccattacggagcttgagataccgcggagttttagttggttatttcctatttcaatctttacataattttttgaatttttttctaacaaaatctaacatttaaaatcttttagtttctactgaaagttttcatagaatatttttagaaaaattcccatgcaaaaatctaacttcctattaaaggtttattcccttttttaacagagcatctatgttttatcttaaagttacataaaaccctactccatgtaccaaaaaaataaatatatgatatgatgtaactcattctactactacgaatctggacaactctctgtccagatactactagaataagtagtactaaaatatgtcacattttgctttaggtgtgttttttgtgcgacaaaggaagaaggtattataaccggtgatacataacctcggatattatggttttaaagtttcataaaaccccacatctatgtatgttgagcaggaatttacttaagattctaaatcttagagtgtatatgaaatttttaattattaagttcttgataaggttgatagtttaactcttcactactttgaaaaaaaaatgtttcaaacatgttgcaattaatcaatatttgaatacgtgtggttttataaaatagttagaccataaaacctatggttaaataccataagccataataactatagttttctgtaactttaatcataaaactagaaaaaagacctggccgtgtgttgcaatgggaaaataaacattacaatattaagcgatgcttgctttactggcttcgcctcctaccagctgctttacccaaaggctacctttcggtgcaaggtacgccatgatgtaatccatatgacaactttctgctcttctctcacccgcacacttaaataagaattggcattgatgaccaccataataccagtttaataaaaaactaatagtaatatcataagtgtcgatttaattctgaaagctagtttgattagcttaatttcgtgaaggggatggacacacatatatacatgtctacgtgtacatgcaagtgttcctagcaatatatctgtgtagtcccaggcttgattaattcaatattattttattttggtggtgataatgctggtttagttagctacagagtgacacattcatagcactcgcagactcagtcttatttctttctcaactcccatatctctttcttccctgtcccatagccacacatagccttctctcgatctctcccgtgtaggatctaacaacaagaattaagccaaccagaaggggtgaatggttgtagaacccaaaaaccataacttttatcggaattaaaagttactctcgaatttgatatagatcgatctgaccggagtatatgcgtcggtttgaccgctcgaagaccttcgatctgaccggtataattgctccggcctaaccacccgatgcgtcgaagtcgctagtcgtcgccgccggtctgaccgccgtagtgttgtaggtctgactgcgccgatgtcgtcgttctgaccgccagtgtcccatcggttggaccaccactcccatgcaagatctctcaaagtagattgaaacttcattacttctattcgtgtttataaagtacaacaacaacattcctgacaaaaatctcgactaaactcgaaaccctaacttttctcacaactcaactatctaaaaatcgatatcagaaggcgtcaccctccctctctatttatacccaaggtaagcacaaaaggcacaaaccaaccttatacaagaagttctaatcccctagaaaaacattcccaaataagaaacaaacttaacaaattccaattgtaccaaatttggactccctccaaatttaaactcctcatcccatatgcacacaatatctctgtcgtttgccatatgaaatattcatcaatcacgtgcattgatctctagcctaagtatcccacaagatatcccgatcgtccggacgtcatcatatcccaagttgactcccgatccatctccagcaatgctcttccaaggcatcaagactcacctacacatgaatcaaacacaaaaccatatccgagcacaagttctctgcaatttagtcacaaaacatgaatgtttagagctccatcataataatggtactagggatttgaactctaaaagctatagttttgtgataactttgatattaaagttgtagttctatgataacttcaatattaaatatgcagttttatgatacttaactttaaatctatagttttgtgataaatatggtgctaaatttgtagttttatgatacaacaccttaaatcaaaatacatgtagttttgtgaaatttactcaactatatgtaatacacattctttatcagttttactctctaactaggaaggtggcccgcgcgtatgcgcgggcacatatattattgaaaggttagatttttattgtttgttaaaaaaattatcacatagattaagggcaaactaaagttcggatactgttattttgtaataatttaagggttctattttttttgttaaggtatcttaaaagtccattcgcaagcttttgagtgggagatggattaagtacttacgacttttgaatcatatttttttcttaagtaaatagattaaatcgtctcgtgaaggtgcatgatatagtaagaaagggagggaagcatattcatggagaaaaagaagaaagggaaaaataaaaaaaaagggtggggaagcgtaggtacccacgtacataggtgcgtaccaaaggtggagaggtgggacctcgtagtatttagtttgttctaagatcaatttaatctaatggtttataatattggacccatcgattcaagtgaaaatcaagtagtagatactttgctttttttcttagaatttctaatattttctctaatttattagagcaccacgtgacatcttgagggcattttaagaaattttagtggacttaccacatgtaattagaatattaagatgtaatatatatatgtatgggatgtatgttcatattcgttttagcttcgtccatgtttatatacatgtagagaaaaattaaatatgttgctagcaagccattagttgtttaattaatagcaattaattttgacacctatttacaattggtcatagttgttctaacagatttatcttacgactttgattatgcgttgatcaccaatttacttatcaccatgactcgcatgaaaaaaatatgtactttaggggataggacaactgaaattgatgaattatctgatttatgtgatagctatttgagattataaacgaatgaattgacttctgaaaagttaaaaagttgtttaagaaaagcaccatttagtaacttggaaagcgtggagcgtgcaaacgaaaattcaaaagatggaatcagggaaaaaatagggccttaaactcccttgtaacactcttatcctagtaagagttctgttgatattcgttaatattgtgctcacaattataacataatgatttctttcaactgtacgaacaaataatacaaaatgcaaatacaacataacacaatacattataattattatttaatcaactctcgatttcagcttaaacagagttaagtgttccacggtacttaattcttctctcgctacatcacatctttaattttattttcatgctattaacaacaacggtagcgctgcagcggtcgtgatcacccaagatgcctcaaacacgacactctgtcacatgtgcgaaaggcaaaggtgcagatgtgcattgtggagtgggccaaaaagagaactttagacattattaacaatagatccgatgatttaaataatgggtccaccggttttagtgtaaatgtaacttagttaatatatatgtatatatatatatatatatattaaattgttaatttaatgggtacacaacattatggtgatggtgtagattttattttaaaacactgaattatttgagaataataatccaaagtaataaaaaatagatccgatgatttaaataatgggtctatctgtttaagtacatgtatatattagttaatatagatcttaaattgtttatttgataggtacacaatataatattgtgtaagctttattttaaaatagtgcattatatgaaaataatagtatttagtaaattatcttacattattgattttagagctaattaacatataatatggtgtaaattttattttcaaagtctgcatagctaatttagttacctgtgtttataaagagttatatgatggtattttctttttttctaaattattattatttaaacaaatatatatcagattgtataaatggaaaaaagaagaaaaaaaggaaaaaaatggagggaggcgtacgaacaacaggtccacatgcatgtacgtacgtgacctatacctatgcacgcgggagaaaaaggagaggtgggacccatattatttggtttgttttaagatcaattttatctaacggtgtataatattggacccactaatttaagtgaaaatcaagggtagatgttttgcttttttcttagaatttctaggattttctctaatttattagagcgccacgtggcaacttgagagcgtttgtaggaagtttaatggacttttagtatataaagatagatagatagataaatagatgatagatagatagatagatagatagatagatagatagattgtcatccatgcatgcatgcaagcaatatcataggctcaaattatccttgatgcatgtgcatgacacaagaaacggtgttgcatgttaatcgatattaattcaaatcgcttgtgagggtgtattggtatcgatacacaaatcatatactccctccttatcaaaatctaagacctatttatttttcaatcaataccaaaaagcaattaacttaattaccaataccatgtggcaaaatcaatgaatatacaaccaataagtattagaataactttttatttccgatcaacaatttaatttagcacacaataactataaataggatttagaattttaaaaaaaccaaagaatgaaatgggtgtcagattttataaggagggagtactgtatatgctgataatgcatgtgtatggaggggagtatggtggttcctagctgctgccttgatccccgacttccacctcgcgtccaaccacctcgatcggtcggcgcctccgcatcagcggttggtcggccaggtggaggagctgcggcctgcgtaacctctctctcacctcctcctcagccaagattaatctctttttatctcccccttctctgcacggttagagcaagcttaatattataaccaactgctagctctaaattatctttggtcaatctaatagctcattcatataatagttatttttaagcattaatatatagtcccacatctcatacacacaacgtattagaatccgtgttacagttggctataaatctagcctgatttccttcgctccagccagcgtttctgctacagtacgtctctagctatgtcgtcgtctacaacctggccggtacttgtgacggcacctgcacctattttcattgatgcagtggatcatacggtagtattgattactatacccaaatacagtactattttaaggggtaataaaagtataaaacacatgattgtaggttttagtgaccgtcaaattacaggtggaaagatttttaccagtgaaaagaaataggtaatctccaaagcaggccctataatacaaactgtgcgcatcacatgctcatgtttcttcgcgtggtaactagagcctgccgacaaagcttgatagaattaattaataattttaatcaggatgtgcagagtcacattattaattactgggtcgtcacgagcctcttgtaggagtagtaacataggttttcatggcagcgtccaatgcgtgtgcaatattctttaccaaagctaattagcttaatttaacaattctttattttgcgcggatctagaggtcagaaaacaattaacccactgctggcggcaagacactcttcttccttgaaaaacaggcgccattggctgtgccatatacacaatctgaaacctgtaccactcccacagcaccacctcactccagggagatcatcagcagatgagcaaaaatggttgcaacaacagctattgtgggtgctaccacgggggtgatgaagcccctcctgtccaagctcaccaagctgctgggcgaagagtatgccaagctcaaaggcgtgcgcaagcagatcaagttcttgatagatgagttgagcaccatgagtgctgcactcgagatgctcgcggattcggaccagcagctcaacccagaaatgagggattggagggacaagctacgcgagctggcctatgacctggaagattgcatcgatgattttatgtctcgtgttgaccatgatggggaaaagatgggcttcaggaaattcttccgtaagttgaagaaactgaaggcgcgccatgagattgccaatgagatcgaagagctcaagatccgtgcgatcgaggcaagcgaaaggcacaagaggtataattttgaccaattagcacacaactctagcacttttggcattgatcctaggctgtcggcgttctatgaggaggttgataaacttgtgggcattgatggtcctaagaagcgtatcattgagctgctagctatggagatgaaagggtctctaaaagtggtctctattgttggttgtggaggtcttggtaagactactcttacaaaccaagtttatgacacaattcgaagccaattttcttgtgcagcttttgtgtcagtttcacaaaggcctgatataaagaagattctaaacgatattgctgaaggagtagggatctcttctcgtactccggttggtaatgatgaaaagaaactcattaatatactccgagagcatctcaagaataaaaggtaagcctagttatattatcaatgataatatatatgaatgcatgcgacttaatacccaataaaaagatttggtaactgtggaatgaaattacaaatactatttcttgatgcaaatgagatgtgtatatcttaattaggtaaacattaacaattttcttatctataggatattcgcaaacaaattaatggtgttttttaggtttcgaaatggtttaagatctagctttgactactatatctgttactatcgttcttaaatcatagtgaaattacattaggtcatgtttgtttcatcttatagattgtataaaatagcttgcagttatctgaaatttactcttgcatgaaacattagcacgtactccacgtcagccctcagcccactactttggtccagccatacactgtggtgatctgatttggctggaataccgctcagccaatgcacgaatcaaaaccaattctaggttagggaaaacgaccctctcgtgttgcccttagctcttttgaagcttgatgagtgttgactcaagtgcaatgacaaagtatgaggggtgtttcaatcggaccatatctctacagtacagctagggcacagtggtgggcttagcagctgccaacacagaatgccgctacaatgcatgtgctaacttgttcctcgccgtctaccacctctatgacatgtgggcccaatgtgtaagtaacattggggtctgcgtgaacttgcggttttgtgacaattttctccattatcattgcaacaaactgaaatatgtcactaatgttgtaacaatctgataattcagtgactaaatatgcgattctctgaaatttactcttgttacaatgaaggtgggaagcttctttaatttgtttgtttgctcggttactatttagtgattgtggcgatccaagaagtattaaataaatatattaatcctggttaccatctaggtctctgaactattatatttgagtctacaaatttattaatcttgcagacattgtccaaatattggtgatcatcttttgcttgagccatctctctatataatccatcacactcaaactcttccatttcaattctccagttcttgtcataatgatctgatttgttagcattttcttcgctaaccacagttaatattgccaacattttcaattattatcaacttcatggccttcaagaacaaattactaaatctatgtaaaaatcttgtgacagatactttgttgtgattgatgatttatgggatgcgaaagcatggaaaattatcgagcttgcattattaaacaataattgtggcagcagaataatcactacaacacgaagcgttacagttgcatcatgttgttcttctcaagttggttatatttatgagatgaagcctcttagtttcaatgaatccaaatggttatttttgaaaagaacatttgattatgaaaattcacattatcctcatccagaaaatattttggataagatattacgaaaatatggtggcctaccattggcaatcattactatatctagcttgttattagatcagcatgaaattgatgaatggcatagggtacttaatactattggttgtggacttgcaaatgatcctaatgcagagacaatgtcaaatatattatcactgagtttcttcaatctccctcactatctaaaaacttgcttcatgtacctgagtgtatttccagaagatcgtaagattaagaaacggcatttggttagcaaatggattgctgaaggattcattcatagacacataaaggtgcaacttttggaggggcttttaactatttgccactcttacaaatggtgcttaacgatttgccacaaggcccacatgtcatagacacatgagggcccacatatcatagacacggtgtggcaaatcgttaattgccatgtcacaagagtggcaaatagttaaatttcccacttttggaagccgggttttacgcgtaaaaccaactactaagatgcaacttttctctgagacccattccaacttgagaaaacaacagcagcaacaacaacaactcctcctgagaccgcacaacaaaaacgacggaagtcagccccgaccccataggccataggcgctcgatcgtatgctgcctcgatccggcctcgatcgatcggcgcctcagcagcagcagcagcagtagcagcagttggtcggcctcggccaggtggaggaggagctgcaggactggcctctttactcaggcaagaatcctctctttttttatctcctccttccctctctccgcacgattaatcgtcgtgagaattgagattagccagcgttctgctacttctcgagttaacgtcgtcgtccacagcctgatctagcagctcagcacggcagcacctgcttcttgcgcgggtaatcccccctaaggtgaaaaatggtcaataggtgctggttttaaataaattggcacatatgagccggtacagtagtgatgggactgttaatatatatgcatgcgtgggaatgccctatagaaaagtccggtaaccttggaatgaaattacaaaaacttctttatacaaatgagatgtatatatcttaggctatgtgggaggtgaggttgggaactcacctcccgcgcacgcaaaacggagcgacacatttttttttgaaaaatagattaatatgatttttttaaagcaacttttgtatagaaaccttttgcaaaaaaatgcaccgtttagcagtttaaaaagcgtgtgcgcggacgagggaggtgagttgggaaaggtaggggaagaacacagccataattgtgtaaacattaacaattttcctatatataggatattccctccagttgaaaataaacgatgttttgcaatttgaaatgatgtaaaatctagctttaactattatatatgttactatatattatttgcaaaccataatgaaattatattaagtcttgtttgtttcagcttatctctactattataaaaactgaagatgtttctgccataattttggtgcatcatccgtgtttgaatcggttttaattttatgtttcagttaaatcctttcctttttttcttatgccagagtgtccctcttatcagagacgtgcgcgaattaattgggcttgcaccttttcacgcgtctcttgccacaagcagcgatcgggcccacgcttgagtctgtattccacacgcgcctttgcgcgccgcctcgattgggcccgcaatgccctcgcacgtgcaatttttcgcatgcccaattgggcccgtgaagccatcatgcgcacaattttcccttgccgcgtgtccgattgagattgcgtcgtcctcgcccgtgatttaaaaattgaagatgttttttttcaaaactatggtacattatccgtatccgattcctgtcacgcgtaacaattgttgactctcgagcgaattgcgaaagacagtatatgtgatatgaataccaagcgaatgaaactcgcagagtctatgtggatatcacgtacatcgttgctcagatcatccgattctattcgtattacacgatacgattcttgggacatgttagcacgatttcaagtcagtctccacacatgctcgtacgtactaccagggataacgttacaataattcataagaatcagttttactttcaaaaagaacatgccaaatgaaataaagaatgatcgaaattgctgaatccgtccgtcatcaattcttgcctgacttaagataaagctagacaacaaatcgagctcatgtttgaaggcctcattatttggcttatgctttcctgtaagcgaaactttaaattttagaacttaattttaaactcgactttttggttttttatcgtactttattttacatcatttacttctgaatcgctaagaatatgtatataaaagatttgcatacaaatagtcttttgtttggtaataagtgatttggataagcacatgaataaacaaaacgatggtatgtgattatttatgcactgacatatatgtacaaattaaattggctctacccgttgcaaagcacgggcaccttttcttttctagtagattgtaaaaagtaagcttgcagattgcaacaatccacaagctggaaggaagtacattgtttcattgtagcaataatatggcatgtgtgtatcgttacaaccaatgaaggtgggaagctgctttgtctgtttccttagttactatttggtgattgttaccatccaagaagtattaaataaatatattaatcctggctactatctaggtctccaaactattatatttgagtatataaaattattaatcttacactcgttgtgtccaaatattagtaattatcttatgcttgagccatctctctgtccaatccatcgcactcaaatcatcatttttaattttcctgttcttatcataatgatttgatttgttagtattttcgtcttagctaactgtaattaattctgccaacattttcaattattatcaactgcgtggatttcaagaacgaattactaaatatatgtaaatatattgtgacagataccttgttgtgattgatgatttatgggatgcaaaagcatggaaaactatcgagcttgcattattaaacagtaactgtggcagcagagtaatcacgacaacacgaagcgttgcagtcgcatcatgctgctcttctcaagatggttatatttatgagatgaagcctcttagtttcgatgactccaaatggttatttttgaaaagagcatttggttatgaaaaatcacattatcctcatctggaagatgttctggataagatactaggaaaatgtggtggcctaccattggcaatcattactatatctagcttgttatcatatcagcatgctattgatgaatggcatagggtacttaatgatattggttatggacttgcaagggatccttatgcagagacaatgtcaaatatattatcgctgagtttcttcaatctccctcaccatctaaaaacttgcttcatgtacctaagtgtatttccagaagattataatattgacaaacgacgtttggttagtaaatggattgctgaaggattcattcaggatgaacaagggcgaagtgcatatagaactggtgagttgtattttaatgagctcatcaatagaagcctgattgaacctgttgatgtaaagtatggtcaggcaaaggcatgtcgagttcatgacatcattcttgactacatcaaatgcaaggctactgaagagaactttgtcacctcattaggatctacagtgcctggatgcactacagagtataaggttcggaggctgtcagtcatcaacagcaatgaagaagatgtcaacataccgacaagcctagatctgtctcaagtacgatcacttactatatttggaaatcgcatgcaaacttctgtatttgatttcaagtttcttcgtgtgttggacctagtatatagggacagaatgggtgacctttttgcaaatattgaaaaattgtttcatctgaagtacatgtgtatctcctcatatggagtggattatctcccagaaaaaattggagaactgaaatatttagaaacgctggacataagacaaaccaatgtggagatattgccatcaactatcacaaaccttcaacgactagctcgtctatttatcaatcaggacacgagattttcagatgaaacgactattggacaattgaagagcctggaagagctaaaagaatttgtagtgtctcagtctgaacaagtgacggccctccaggaagtcagtaagctaaccaagctaaggacattaaaattaacactgcagtcaccattgtcacttgatgattaccatagttgtgtgggaacattattgcaatctttatgcaacctttatgatttgtgcatcatggaccaatcttatgaaaattattgtcttacgttggattcatggcacattgcttctccttgtagccttcgtaagcttgtaatcaaactagtactcaccaaggtgccaaattggatgggtgtgcttggaaatattggagtactagttctaggtatcctgtgtatagcaccagatgatattgagatacttggagcaatacccagcttgctttttctcgagctacaaacttacggaggcaccaatggaaggatcatcatccatggaaacaacagattcataagtttgaaatatttctccttggttattcatgcttgtgggactgcattggagtttgaagcaggatcaatgccaaaggttgagcacctcaagcttcagtttcatctgcatgaattggaatgcctgaatggttcttctgactcaggcatccaacacctctctgctctcggcaaggttgaggtcaaaattatatgcaaaccctcttatgtcattgaattgaatggtttgaactatgatctgatggaacaaaagagtgattgcatcgtcagatgtgtagcaagaaccattaaaactgctgttgagacactccccaaccatcccactatcagtttcaaaacatatcatgtcgaggaatgtgaacattttgaaacagtaagttctccctcagaattgcaggcattaatattgttcactgtatcgcatatgcttgaccatccaaataaacaatttcgatgttattctgatgcacacttttatgtgccttgctttttttgacttctgttctagcgtatcaacaagaaagtaaaggcatgttctgactgagtgaccccaaaatcagaaaattgaagagaagcagacagcgcaagcacagcgggaccgtcatctaggaatcttatgtatggcaccagaagatattgagatccttggagcaatacccagcttggtttttctcaaactagaaactctcggaggcaccaatggaaggatcatcatccatggaaacaacagattcataagtttgaaatatttctccttggctatcggtgcctgtgggactgcactggagtttgaagaaggatcaatgccaaaggttgagcacctcaagcttgattttcgtctgcacgaattggaatgcctgaatggtgcttctgacttaggcatccaacacctctctgctctatgcaaggttgaggtcgaaattaattgcaattgcttcaagcacacgtccaatttcttcgatgactttgaattgaaatgtttgaactatgatctgatggaagaaacgagtgattgcatcgtcagatgtgttgcaataaccattaaatctgccgttgatacactccccaaccatccaactatcagtttccaaataaacatttcgaattggtaagttctccatcagaatggccggcattaatattgttcactttatcgcttatgcttgatcatcgaaatgaacaatttctaacttattctgatgcgcacttttatacacatttccttttccacttctctgttctattttatctagaaaatgaagacatggacagtgacggagtgacccaaaaatcagtaaattgaagagaagcagacagcacaagcacagcaggacagtatactcatcttcatttcctctacggtatcgccaacaagatgaaacaaattaatgaagatgagcaccggcgctgcctgggattagttcttacccagtgatccaggcgaagccgacagcaaggtctaaataactactggatgtttctacagctgggagtcatagctctgctgatgttgttgctggatatatatgttgcagtaatgtagtttcgttcttctttctttggacgaatctggtgtgcttgctgaaataatttagtgctgaggcgcatgctgttgtttcactgattctggacccaacagagattgtagtaattaagattattcaaacaaatattcttccgttaaaagttctatgagcttgtttctcactgtggtttgtttgtacaactcagtacacatttggttactggttagtctcatctaggtgatcaatgaattttacatgaaggttcatgtcattatcttgtttctagctatgaggacgctcatgctagggctatgttttgtctccaacctaggatggaagcctttgtgagatgacaaggttaaggaaaaagaaaccttttgtctaacaacgcgatgatttgaagccttcggttaagtttgatttgagcttgtgttgcttgtgactaaccgaaggcgttgagttggtgtgtggttgtgttggagagacatgtctcttggctttggatgtagtgtaggtgatggatgtgtcaaatttacactggaaggccaagcgatcctgcggatcgaactcgggagatcatgagcagcactggcctccgatcattctgttcccttctcttaattacctcactcttcttcctgttacctttccggctttccttcccttcttatgctcagaaaacatgttgttatcttgtgtgttatattcacaaaaatttgaaatgggaaatacagctcattgccacataatgagctgctactttttgtaaaaattgtttctataataatttttaagagtaagaactctcgtataagcgtacttgtactctctatttttcagacaataagctccaacaaccacatccgcatgcaaatattgtgttcactatacccatcagtctacaatgcgtgcatgtcattcaaaaaactccagtcgaccagtaaagcatcaagtgcttctcacttgtttcctaaatacctctcattcccacccgaatacctcgcgttctcatgggactcttttgagtttctaaagatggttctagaccaaatatagatgcacataaagatttaatttgtgggcactgctctaatgctcacacaactcctcgattaatctttattgtttctcttttatagaccaggatgagttttgtctggcagtgggaagtttgtaattgggtgtttgttttgagtgtgaagtttttgttcattaaccttgtgaggtcccatgttgaatggactgattgcgaatctttgcatttagtagcacaccagggaagggggtgctcaaatgggtttcttctctcttttttttttctgcttcttcagatgatgatgtgcttgtgaaaattttggtcttttgagaaaagtagagttggcataatcgccacaaatatcacaatggtagatatagctcactgccaccgaatgggctggttagttttgtagacatttgttttgctaccttctttaaactgaactctcgtgcaagcatattttgtactctgctttgtgaattactacgttacactacaaagattttttgggaaaacaatacatgtgcataaattatgtcaccaggataactggttaagggctgtattactagactcaaagaaatgtaacttctcaaatcccaaccattctcaaaacaatcagcgcacaagacctgaagaaagagaggaaatgggtgtcaacagtgagatgatttagtaagttcaaggagaagcaaatgatattcgagttcatggttaaaatagagctcaagaaccaaaaccagaattacttcaatttactttagaacaagcttcaacaatagagaaaataatgcgcattaccagtgagaaacaaattatcccattgttactgatattatcaaaactaaagtggatattacttagtacatccaccttgaccaccacagtagaacatgatatcctcaaatgggcgcctgataggcatttcttggattcaatgttcaaaaccatctgtgtttggatttaatgtgagatcaatcgtataagaaaatgtgaccaatccataagacccaaccgaggtcaaaattgcatgttgcgcacaatataattgtatccacagactagctaacatacataaactacagaacaaaactgcagaactacagtgctaaaagactggggaactggtcagataacaataccattggataaagtctagtgtcaaagatgtatggtacatagcacgtaacatggaaattcaaccagatttgccaaaaataacagcagaacattggatcatgcgtgtccctataaaactggactcaaaagggagaaatttcagtttataaggaacaatgtaattttatcacttctactgcccagaggcagggcctacaagaacaccctgcgcagatccttccttcatgctgccttcttcctgggtgtcactatctgctttccggattctgatcttgtacttgagctcaaactccgtgatttccttcttcttcttctccagtgcctcgttcatgcgagcaacaacttcctcgaggccctccttgttgcgttgcactgcaggcaagacctccttgatagtccgttcaaccagcactcccccaatcattctgtagcagcgcctcgaggggtcaagtggctcgattgcaccgatcacgagggagtgctcactgacttccatttccagctctgtgatcttggagtagagttgattcatttcagagcgcatgttggcatacatgtttgcaaccatttgctcgttgatgacttctttgtcagcaccacttggttgaccagccattttgcttggaatccactaaaacataaatagattacaaaagaggcctgcagagaaagagcagttagcttactaacaaaggtaggtatcatgaagttctgtgtaaacaaattcatgggcatattttaaaagatggctactgatggatatagtaattactccctctagtaataaagagctcttttaccttaaatataagaagctactttgatggctagaccacaatatgcagttatcatatatgaagaaaggttacaaaagcgtaattctatgaagtacttttaagaacaaaattagtgcatatgtcacttttttactggaggaagtaccaagcataaaagtaaggcaatatatagggaactttggtagtggaattccatttggagttacagatgaatatagatgactccatgtaccatgcaaaggcacgaagcaaaggaactgagacatttcataataacataataaccctcagtattcaaggcttttctgcatttccatctgccagggtacaactcattaactaaaccctatagtcccattatttctgtaccatccatcccatcactgacataaaactgttgacccaaatcccttatctagaaagggaattatttcggtagatcacaactcccctgatcccctcttaaccatcttgtgatccccacaaggcccatttaaaagttagtctgccttttaggacagcttgcccctattctggtagcacactgtccttgtaccattactctggcagatcggatagatcaaagcctacacaaggaaggtgcccacatagcgcataattgaagttatattgccaatgactccatcagctaaaaaaagctccatctattacagtttgctaactgtttcaggaatatttatatttccgaaaatgtggtgttagggatgcaatatggctggtcaaataatgcacatctaacacatctaccacgcaaggtgggttggaataactataaatttcaaactagcaaagacgtgtaaaatgatcatgtggaaatacatttgctcattctaaatgggatactgggattcttggacacgctgtccaacaaagggaacagcccactcaagtttgttaagcaatgagcatgccatcttaaggacaattactcagatgtgcaagtgcaataaccaatcaatatcagtatagcatgctgcatcctaatttgagattttgctgcctgaacttagcccaaggtaaatttgacttcacaacggagataaactgtaagcaactaattgctataaatacaagatagataatgcgagcttggaccaggcaccagctagaaggaacacaccagcttagaagggaatcacggtggtgaccacactaaggtaccaaacgcatccacctaaagacctcatttggaatgcatgaatattacaaggaaaaatgcgatatatatctgtatactacttaaaattttagtagtggtggtggtcgttctgccacaccacccttaccactaatatttgggtctcacaatctatactttgcaccaccacaaccgacctaacaaatgggtcccatttattagcccctactctccaatgatttttttccgtttcagtgctggctctcccaaaatttcaaaatcacctacttgttcactaaggaaaataataaaactactacttattagactaaatatgtgctcaatcgatttaataagttagaaactcaattctttttccgttgcaacgcacaggctcttggctagtatacatgtaacgcatgctaccatcgacaatcagacgaagaggatcaaaagaatatacagatcgccatgggctgatccaacttgggacttttgtggggggaacaaacaaagtgttaactgtattaaggttaaggctctgaaattaagagcttcttccagatctacagaagagaagctagggttaacacaagcaagcaagcaaattcgagggtgtgtgagatgaatcagaaaaagatgatgtggatgctcaccaggacgcaggaagaggacgcgacctgctccgcgagatgggagatcggcgcaggccgcagggagcggagacgagacggggaagattttcgacgcacaatgatcttggacgctaagattatttcccctctctctctctctatctatctctctgaaagaaagaaagaaactcacccttgctgtctcagcggatacgcctcttccggctgccgccgcggcgggcgaactccggtggacggtggtcggcagctgcgcggcggcgcgggcggtggtcggcagcggtcactgcccctccgccatgaatcggggggtctttgtcgaaccattttcgtttttagatttttttttttaatatttacagaaataatctatcgaccaaaaaaattgcagaaatagcccctgccgcccaaatggtgggcagcaagctgacgtggcagacggtgggtcgaccgcgccgtctgccgccgtcggccaaaattgcgagagggcggcaaggggctaattgcaattttggccgcccattcagagcttgcggccgtacttttcatctgggtcccgagggcggcaaaggacccagatgaaaaaagtacggccaaaagacttttctatgttatgttaataataaataaagaagtatttattggtaaaacttgttaatattgttataaaaatgtattgaagttggttgttgcgcaatttcatatgttaagtgaggtattattttgtaccttattcgacgtattagtactcggataatttatataggcctatcgcagtctaggtcgtagaaacattatatggacttaaacaaggagaattatgtaacatgaagaaatagtagtacaatttgaacatgatacaactatttacattgcggttacatagatgatattagattcgaactaggagggaggtagtgcaatagttgaacacaacgacgatgtaataatgggacaaggaagcatgacagtagaaatttcaatatgctaagttgtccgataatagctaacccctacgtgaggatccctctcctctctcaaaccgcgctttagtaaccctgtattgctctggtagttcaagctgcacaacacggctaggtggagttagaacccttctggtgtctatccattctctgtattgacatctccttggtggttcctgggaggaaagaatagatgtaaagcaagcaaagttagtaaatgttgtgagaaaataaggaatcatgtaatcaaaatattcttaccatgaaatcgtcgtcaagaatatttggacaaacaaagaaccttcgacccaatgttgtaagatttatggaacgaagaacctgacaacgatcaccacacctgcatcttggacgggcttcccatggagggagtgccgtaattagcacccgccagtcgctctgttgttcacgacattgtcgttcataagccgcttttctctgtaagtattgctcagtactttcggatgcgaaataccagcgaccttcttgtaaacaagtggttaggtcgagaacgggattttctgtatcgacccactcgatgtatgcgcaagccgtagtgcgggtctgccgaatagagtagtgttacgaagaataaagcgattgcccatacggaatgaataagcatatgcagataataaaatacctcacgatcatagttagggcacctaaaaaagcgccttcctcgaatatcaggattcctcgaagtcattagttggcatcgatcaccgcataggcagagaggacgctggcaccaaggtggtagtaggtatacacaaggatcgctacgccagtttggatcctcaacaccccggcgtctagccattgacgaaagccggtcggatttgtaatgaagcaagtggggaagagagtactgaatgtgactgagttctgaaagattgtgagggctcactcattaaggcgacttatataggcgcaaaaaatcgagtgatacccctgacatgtgaacgtggtggggtatggtgggtatgcctgattggcgccgaaagatacatgcatgatcagtgccgaaagttacattggtcgtatgcgccaaatggcgggcaaatactcgtatcacacgcaaataaaggaggctgcatcggtgcggcagaaagtagtcatgcatgcgccgaaaggtattgtgcatgcgccaaaaggtatcgtgcacatataacaacaacgtagtcattacacaagcatacagtactggaaagtgaagcaagtaaacaaaaagaagactgctctactggccctgccccgcgccgcgaccacgcttggtcctccgggcctgtgctcgcacgtggtcctgggagaaggtgaaacgatccggtggcacagcacgggtagcacgagtgtcccgcggaggagtggcctgcgcctggtcctgcgtctgcaccggcggtgcgcctcccagctgtgaggggccgatgacgtcctctgtcgagcctgaagcgaagtcgaagtcagtgatgtcgaagagcacggtggaagacaggaaggggtccgacgaggtcccagcatggtccagtggtggaccctgactcgacgtgccggctgcctgtgacgctgaccctgcagcctgggagaagtgggtggcctgcgtcatagcgaagtgggcgaaacctacacatcgacaacgggacccttgtaagctaagacataaaatgtatgtaaattgattatggaagtaatgttgtttttttaagtacctgtggggggcacaacagaaggcctagccgaggaaggcggggtgctgaacggtgcacgaaaccctgaagcaataagcaagtaaaacggctcacttatatgtgcgaggcatgtatagaagtagtaataaaaatagttaccgccgtgcggagggggagtcggcctaggaacgtgcgcagctggacggggaccagtcggtacgggtggccgctgtacagctgcgtctgcccgagcaacgtcgtctgcacgacaggtgagcactcggagaatcgagcgcatcgactccaccatccgcgtgtacgtcgtcaggtgctcctctacgggtaccggaatccccgcgtctaaacgttggatcgtcgttgaaccgtcaacgacgacccggttgatgtcgtcgacctgcatggttaatttgttcgtaaatattcgtaaaatttgacgaagagaaagacatgaaaacataaaggaatggtgcgatgcagggtactcacaacacgagcgaagtcctggtcgcggtgcctggcgtagaggtctctagtgctcgcaacgtggggctgctgctccaagggagcgaaggtgaccctagtacgggtgcgtggctggtaccagcgtaggtaggcctggtacgactcctcagtgtgtggctctccctcgtggtccacgacctcctcggttgcgagcaaccagtcctcaacaaaagtcgccaacttggcgggccagtcgccagctgagtgctgacccttgcgcgagtacctgcgaattaatgtgtaatattagtgtgaaacgacagatgttacaaattattgtgaacaggcagattttaatgcaacaacggaaagcgtagagcaagatcttaccggtgaacagcagctgggacggtggtcggaaacggtactggaaagggctgacggaagccgaacaaccgcatcacgcggaaaggggcgtgaggctcaacgcagatgtcgaagaccatcggaaccgtagtcatccagtacgcctggtccctggtgcagagtgtggacagacccaacggcgcacgagcctgggtagccgcggcactgtagggctcccacacgacgtcagtcgtcagaaggcggtcgaactccataacaaactcaggatacgaccgcctaacctggacgtgagcccatcggcgctgcaatacgagacgatcgatgtgatgtacaatgaacttagcaattaacttaacaatacgataagatcgatgcaacgtacctgacgacggcaccacagagtacccatcgtagggtagtcgacctctggtcgctcctcgtacagtgactcctcgtacgcgtgctggtccacctcagggcggccgatcgcaatcctctcagttgcccagatagaaagaaagagagggcacccaccaaaggtcgcgctgggatccgtcttcgtgcaagactcacaaagtgcacggtacagagccgccaacaacgcggaaccccagctccactgaggcacctcgcctaccgcggcgtcggcgatgctcctggcgtagtgcacgagtcccttgtcgaccgcgtgcccgtgaccgccacagaacatcacccagccaaaaagccagagcaagtacgcctccaaacatcggctgtacgagtactcgtcggcctccgcctgtagctgctcaacctgcaagcagtcgataaaatgttaggcaccttaactgcggactaaatatgtaatacgattgtcatttcggtacaaaaacactcatggtgaactgaagcagccacctcttcgtaggtccggtgttgcggtggtgtgccaacggctcgagcgggaggtgcggtgcgcgctgtactagtgcgaaacgtgccgtcagatcgtcctgccagtccacagccgtggtcactggcccaactgcgtctcccgcgagcggtagccccaacaagtacgatacgtcctgtagggtaggggctacctcaccgcacggcaagtgaaaagtgtgcgtctctggcctccatcgatcgaccaaagctgctacgagggacctgtccacagtccatcatctggccgggtccgcgtcgccggccgcagcctccaccagccgacacatcggtaggaggccggcctcacgtagcctgcaataacaaattaatatgtcattataaaaaatattacagtgcaactaacttatagtaaaacactgttcgtacctctcgacaaaggagtcgtgaaccgtgagtagctcaccgcacgtccgtgcccggaacgtcccaagctgagccccctgcactgcagtaaggtgagaccggtgtcggtaatctatcgctgggtccaacaactgaggtgtatcctgacgtgccatctctgaaaaatatagtgtttcgagttagaacaattcaaaaaatagtactgtaaaacaaaagataacttgcaaaattatgaaatagtaataaaatcatgagattaattatgtacaacaagagtacaggctatttaaatatagcaaatgttactaatggtacataacgatgacgtgcaatttaacatatatgtagagttcaataatataacataacattacgtgtcgaagtccgacatacatcagcatacataaagacgttaggcgccttagtccgacgttacatgccgaagtctgacattacacgacgaaacataaacacatcgataagttcgaaacgaattacaagcaaatccacatgccgacatagaacataagaactacaccacgtagccagacgtggcacgacgacgcctaggacgtggtcgagtggaggtagtgccttcacccgtagggcgagctccatctgctgctgatcctgatagtcctgcctctgccgcacttggtttctccttgtctttaggacaatgcttgtaggtgtgcccatgttcatcgcatttgctgcaacgcttcaccctgccagcctccgactcgtccatatcgttgcggatgcgacgagtcctcctccttccagccttgcctcggagcttcgatgggtcaggaatattgagtacttcatcgttagtctctgtgaactccccagctatgccgaacccataaatctcgccgctccatgtatgatatattgcttgcttattgaagtactgtgacacatatactgtatgtggtatgccacactccactgcggcagcaatgacatgggtgcatggcctgtggagcagcttcggctttgcacaagagcaatgacatgtgccgtcgtctttgagaacacactcctgcttcactctcttgcggtagatacccctgcctgccttatcttgacatagtatctcaaacctgtgctgttgggtaccttgcactagagctcgatgtttcatggcctttttacgcaactcctctagctttttctgcatgaaagctccaaacaaaatgctgttgttcggcatagagggaagaactgcctggaaccgatccctaaaatacctgcatgtcccatgtaaaatgaactccactatgccaactagtggcagtccacggacaccgcgcatcacccagttgtaaacttctgccaaatttgttgtcattattccatatctagcaccacctgtgtcatacgccttggcccatttctcttttggttcatgcagaatccactgagaaaatttccgaatctctaatctagttcttctaaccaatgttggactatccgttgggagaggtccaagagcttgaggagggtcagcaacggcggtcgatggagccgctgcacgctgatcactgcatttggctgtcaactcatctaatctcttccaaaactcattgaattttttctcctggttctgattgcacagcctcttgaacatgttcatgagctccttgttcttgaattgcttgaagaaattagctcccatatgacgcatgcaccacctactctgtacatcttcccaaacaccggggtatcctcgttccatactcccaaactgcaactctcctatcgctcgcagaatgccagcgtgcctatcatgtatcaggcatacatttggcctcataccaacaacttttgttttaaccaatttcaggaaccagtaccagctgtcggtattctcactctcaacaaaagcaaatgctaagggcaatacctggttgttcccatctacccctattgctgttagtatctggccccgatactttcctgtcaagaatgtcccatcaatgcagagaacaggacgacagttcacgaatgccatcttgcatgcatgtagagctaagaacgccctttgcagcacactcttgccaggatgttcaattgaggggaatttcttcacttcgtaagagctcccagggtttctttcctcgataacaccaagcaggcgtggcaaattgtcatacgaggcttcgtaagttccaaatctcatctctattattttctgtttggccctccaggccttggcatagctaatagtatacttgtatgtctcttcaatgtgtcagattattgaccttggttcatatgtgagattatcgatgacatgcacatacatctcagatgcaacaaatgcacatgtaatgttcctgtggtatttctgaacaccaggtagaaaacatgtatgcttggtaacaactgacactgtccaataatccttccatttccccttatacgcgtgcactctccagggacaaccatctttttccttaacacaccgaacttcatattgcggccggttcgacttggcaacccaaaactctctatgaagtgacactgcaaaatgttttaccgcctccttcatatcttctgctctactataaatcgctccctgaataacctcattttctttgtactcccatctcacactatcctcttcagagacgatcagcccagaaaaatcctcactagcccattctgctggattaatatccgtctcatcatctgacgaatcaccttcctctacacgctcgttgtcagaatcctccctctccatttcatccacaatggcaccgacagtctccccctcgtcagccactccacctggttgaatgcccactggagctactacacccccatcctctcgtgcgttgacctcctccacagaagtctcgtttacttcagcacttggtccctcgccatcatccatgttcgtctgcacacctggatccttcgggtgaacaaacggaaccaaagctagaggccacccacgttgcaatgtattttccaaataccatctccacactcgagagttttgaactggcattagttcccaataaaaactctcagttgcccgacttactataacattgattgttatgtcacttgtctgtggatcaactctcaagcccctcattaaccatccttttatagaaggtacactcctctcagccggtctctcaattcccctttctgatacaataaaatctgacagatctaccccagttggcccgtaacggacgtttcctggtccatggtaaacttggaatatttgtttgttcgacatatctgtcaacgaaataactagatcatattactctttcatgcaataaacatctacaacgtaatatcttcttgtgtaagccaatgcaacggtaatgtattaattccaaactagcagatctacgtagttatcgatatctacaatacgcacttctagattagtacaactaaaaccctaaaaatataatgcatttattcaaacaaatttttaaagaatacacactatttaactcaatagtcacatataggatctatgaatattacctgaaatcggcgtctgaatccggcagggcttcgccccttcttctcttctcctcccctctcttcttttttttttcactggaattgaggagagaagaatgagggctgggggctgggcagcaggccttttataggcagcgaggcctgccgcccggccagagggcggcaaggggccgcctgcaaaatagccggccccgactggcttttttgcattcgggcctcttgccgccccaccagagggcggcaagggttttcttgcaaaaaaccctccctccgtcaccgcccgttcctcccccgtttgccacgtcagcttgccgccccagaggtgggcggcaggggctatttctgcaatttttttggtcgatagattatttctgtaaatatttaaaaataaaaatctaaatccgaaaaaaattcggtctttgtccatgagcaagagtatacgggcccattttgggcccagttgggctttcaatcattggaggattaggcccaaaccagctcttatccattgggcccatggttaccgtcatccacctggcctcatcccataaagggcatgcttgattgcgtactttatcatgaaagtctggcaagtgatcgttcaaggctgtagttgttttgtgttagttctgtgagcattttatgcttaataatcttatagacagattgctttcctttttttaataattgaatataacatcccggcctttactcaagagagctacagccaataattacatagtactccctccgtttcacaatgtaagtcattctaacatttcccacattcatattaatgttaatgaatctagatagatacaatgtaagtcattttagcattccccacactcatattgatgataatgaatctagatagatacaatgtaagtcattttaacatttcccacactcatattgatgttaatgaatctagacatatatatctatctagattcattaacatttcccacactcatattgatgttaatgaatctagacatatatatctatctagattcattaacatcaataagaatgtgggaaatgttagaatgacttacattgtgaaacagaggaaatagcactcaaataagagtgtagttcaacaaatcattgaaaacgcccaatgaacaaaataagtaacgaaactaaaataaggagaacacattattgaagtctatttgtaaatctccatccataattgacaaaaagttgtataattgtcatctcaagtttgcaacatgcaacttttataaactctttgtcgtcttcaaacttttgtagttgcgcccagtatcgaaaccaatatgttgccctaaaaattacctgcatataagagatgtatggtgatttatcaaaaaccaaatcattcctgctcaaccacagagtccaacatattgcataagctcctacaagtacaaacttgctccttttcttgtccaccccaaaagccaaccatcaaaaatgtgggttatgctactaggaaggtaaccaaaagagaattgaactgctctccataaaaactttgcataatgacaatcaataaaaagatgttggatagatttaattttcatgcagaaacaacatctcaaacaaccattccaattccgtcttgccaaattatctttagttaacacgacacctttaagcaaataccacataaagatctcaatcttaagcagcatcttgagcttccaaattatcttatttttctcaatatagccattattaattaaagcaagatacattgaccttaccgtgaacataccattctgattaaagttccatttaaaacaaccagatgagtgattcaattggatatgaacaatagaagcacacaaatcatgccaagaaacaagattctgacccactaatgctcttctaaaatacacattaagaggaacagaattcataacactagcaattgaagaacatttccttcggacaatggtatacaaggaaggatacttatctttaaaaggcaaattaactaaccatttatcttcccaaaatcttatttgttccccattattcagaatccaagaacccatattcaagaaagtctccttaactttcattagaccggaccaaaaatgaaatcaccatgtttcctatcaacttgggttatagacttattataaagatattttctcttcaacaagtcttgccaaactccttcctcatttattaacttaaataaccatttactcaacaagcatttgttttgaatttccagatgctttcttttttttgaaacacataatagtacataagcatgtgctcctatgagcatttcagaatactagaccggtctagcctatcactgaaagaataattaattataaatatgagcacatgtgctaagtctaaaaattgaacatactccctccgttctaaaaaaactcaacctagatagggatgtgatatctcctaatacaacgaatttgaattcactatactagaaggggtcctagattgtttttttaggacggaggaagtaggtcggtaggatcaaccataagggaccttaccatctaagctaacctcaattcgccaggcaagcaattagacattctgacgatatgtactaacctctgttgtacgagtaaagaatttccttctcactgataatatgaggttttcagatgaggtgaatcccacccaaccaatcagatccatggtgggaccaattcggttcatagatcatgtagtgtcccaagactctcctttcctttccatgcagtaaggccttgtttaattcgcgaaaagaaaatttttaggtgtcgcattggacgtttgaccggatatcgaaaggggttttcagacatgaatagaaaaactaatttcataactcgcctagaaaccgcgagatgaatttattaagcctaattaatccatcattagcacatgtgggttattgtagcacttatgactaatcatggactaattaggctcaaaagatttgtctcgcgatttccatacaaactgtgcaattagtttttcattttatctatactagaaaaaaaatccccgtgcattgaaatgggtgaagtctattttaatcttattattgtcatatggtttagctaagataaaattcactgtgggagttcgcttggatatatatttttttagaaaatcatgagctgtagttaggagtccgatcgtctcaagttagcatgcaagtttttttaaacagattccttatatgattccttctgtattaccaaaagtgaacgatcttaaaaaccgactcaaatattaatatgtatttccaaaagtaaacaaacttaaaaattgactcatacacgaatgacatactaaaataccggcaaaaacatctttaatttttgtaatagtagagatagagaagagatatagattaaaaccaaaacataaaattaaaaccgactcaaacacggatgacgaacagcggaaacatcttcaatttttataaccgactcaaacatggatgacggaccgcggaaacatcttcaatttttataatagtagagatttaatgctccatgtatgtgtccaaagattcgatgtgacgttttttggaaaaaaaattaggaactaaacaaggtctaaatttcatatttgtcgattgaatattgctaaaaagatactttgaccattaaaatttagaaactactaggtacatatctggcaatgaattcaatcaaaatttaggacactacgtcataaatgtgtatgtcttgaatgttacgtgtgcctcgcgaccacgagctttttacttaattaatccctggttgattcaaacgaaagttagggtgtatttagttcacgtcaaaattaaaagtttgattgaaattgaaacgatgtgatgaaaaagttgaaagtttgtgtgtataggaaagttttgatgtgatagaaaagttagaagtttgaagaaaaagttgggaactaaaccaggccttacataaattttggagaattttatttctatgggatttttttcctagatgatcctttcaataaaagcaagaatgctctgtatcggtcgacagggggaggtgggaaaatcggtcgctccccatccccatgcacgcaccccgctggatccacccacttgtccctccccttgttccacaaaagatatttcatctagtgtacttataatatttcacatgtatagatctaatgttgcagtgaattaaaatattcttttgcaacaaatcacctgtatattttagaaaccatctattatgggaatttgttttattttttgttccacaaaaatgtttcacctagtgtagtcacaatattttactgtgtatagatctactgttgcagtgaactgaaatactccattgcaacaaaaaaaaatccacatttttggaaccccctattaaggaaattcgttttattttttgttctaccgaaaaatatttcacctaatgtacttagggcattcccaacccaatgactaggatgatgtccatagcattaaataagttgccacctaggacaaaaaatgatgtggcaagtgaataaatgaagaaagagaaggaaaccatgtcttgcatgagacatggtttctacacaacatccaagacatcatgtgagataagtagcattaaattgaagtatggaatagtggtgtttgcattggaagagtagtgtctagtactagtttcttaatgatgtggagtttatagaaaccatgtctagtgttataggttgggactgcccttataatatttcactatgtatggatcaaatgttgcagtgaactaaaatattttttcgctatttgctgaaacattgtttttatataaggtgaaacaacacccgatttaaacgagttaaatattttcgatctacttagtgaaacaattccgatattcctagtggaacatcgtgcaacatttaaaaataattcaataacaagctaaaaaaaattcgtcggaatatatccatgtatggtcttgttttgaagatttaattgcaacgaatttaatagtgcaatcggatcatgatttggataagtaatttaagagaaaattcaatttaaagtagttttgcacgtaaatcgggctgacgtcagcgcctgatttttctccaaaccgatcgggcgcccgaaccgtagactcgtccgaataaaaggagtcgataaaattcctatggaatgtactatgaggtagaacctcatggaactttcctttgagacattatctctcctctaactactgctattgtcgaatgacaactgcgtcacattaaaggacgtggaaacccgttaggtgtttggaataataaagcaatatattaattggtaaaattttttgggatccccccattatatggccctagggggctatttatagtcctaatacaggctcataccctatagagtttggttagtacaggggaatttacatggttcctcttatgatagggacattacaatgggtataaaacgtcttatacattcatgggccctaaggtgatcttcttgggccagcccattaggtgacgaagggcctccatgggccgccaggccttcttaggtccttagccgaaggcctcctctactccagatgacggctttatgcttcgcttgatgtccttcgcccttagtgagccttcggtcggtcgccaagcttggcggcgaacctattgatctttatcgtcaggcttcgtccaatggttggtagcgaaccccatggtcttcgccctacggcttcgcccaaaggacttagccgatgctttgatggattaggtagtttcggcaggttaaccaaaggccctcatgacattcctccaacaaccgcttttcctgcggtccaataaaactgttatatttgtgttttgtaattctctattttatactagttgtattcatgtcaaaatcctttgttttctcaatcctgtaattcaagaggccctattccactccgtattccaccacctgacgtactgatccaaatcaattccactccctattccagcacccttttcgaggacggcatgctgcgaggcgtcgggtagcggatatgagctagcagagaagggttgtgtttagttacacgccaaaattggaagtttgaagaaattggaacgatgtgacgaaaaagttggaagtttgtgtgtgtaggaaagttcgatgtgacggatgaaaaaaaaagttggaatctaaatagggccaagagcagcagctggcgtcctagctcgtggcgaccttcttggggttcagcgattgtgagagagtagaagagaggatttatggtttggtttactttatatatgagtccagctactgatcaatataattgtgctttacattttacattttgaagtgagctattttcacatgactacacataggggtgaaaacggagcggaatcggatggatagtggtcataccatatcctagaccatattttttaagcagattcggagcgggtgcggatagtgtacggatgcggagcggattgtttcagatgtcagaaatggtgtggaatcggttcggaaatggattaaatttatcgaatgttatgtttgtatgcaatcaatataacaccaagttagcaatgcaaggaacaataatacaataatcaataaacgacataaatacataatataaaaatacagctacacaagactaagaatacataaaacagattaaaaatacatgagatgaagaaatctagattaattgatcaattaggccattagatggaccaacttatgttatatgcagtagatatagcggttacatgtgttgataatttccgattatcaacacatgtaaccatgtccttcttgtgccccaaaacagttataagcatcatctttacatcctcaactctaaaattttgaaataatatggaaatatttcatgataagacaaaatagtgaacttattctcacaaaaatctagaaagagtttatcacatttttcaagtgttttttaatgtatgtctccctcttcatgtgatttgtagttttcatgattttaattataactaacattatccaaattcttgttttagattcatgtggcaactgcttgtagcaatgacaactgcaatctacattcctaaatttctgctgttggtagaatttgccataggattatagatttatgaggtttgaccttcttaggcaaaaaaatacatatcatacaacatatacagataaacacatggacatcttattgaggacactaccactagaagtctcaactagtgatactttatttgccaaggtcataacgtacctaacgtaactaatgtatggcctcgcacaatgctcacttgagttaaatcgttcagagtgccaaacttgtttgggttgtataccctctgctccacattttaacttgtaaacatgtgagataagagcaacaacatggtgcaatttgtgatgtcagggatatcctttcttcatataccttccaacgttgaaccaactcatttatcaagctacacttaaaagggatgcaaaaccgatctgtgtttgaaagtctattatgcatgatggtctattgctatacattgattataatattgttagtttatagttcaaaactagcttttaggggtctaattcccactccgtgtaaaattgactgggggccaaagcccccacgctaataactttttttggaaaattttcaattaagcaataaaaaatagagaaataattaaggaatacaatccttgtcaaattagcaaggattttggttcgaaatcctttcattttagtagcttacccaacttctttctattcaatttttttttcaaaaatgagatttaccaaaattttcatgactctaaggtccaatccaatctatcttcctttcttttcctttcctatactaaaaaggattgaaattcatcactctcttatagttcattgtttccagtgtgctagcttagtccctccattttttctgttggtcgatcgatcaactcgtctccgttgttatgcgttgcccgctacaacctccttgtcactattgtattcattcgctgccgattggccggatcaaataagtaacacatactagtttttattatttgcaagtgtgacacctttctaaaatctaatttttttatatgccactagagcttgtaatattttaccctcactactaccattcactaatatcaaccgattttactccatacaccccttttgcaaaatcacaaaaaagtactcatttttccacctcaaacccatgtacaagtccttttgcccatgtatcgtgttgtcttttacctttaaaacttttagaatttagataatgttagttataattaagatgatagaatgaactatagaatttagttttagacggtaatgtggttttagttactagcattttgtctcaaaaaatacttttcattattttaatttgaactaacgttgtttaatattttatttaagatttatgtgcgatgatgaaaaacacattatgcatcgttggatttgcactggtactaggatttgccacaggattatctattgatctctcatatttttgggtgcaagaatgaaatacatatcgaacaacatatacagaggaaacttgaattattatatcctgatctcttgtatttttagggtgcaagcaagaaaaatacttccaacaatatatataaattgtcggcatgtgggccttggcaggcaccaagcgtcttggagagatcatcccacaatttgtatagcatacagctttccttgttttttgctttttctttatccctaggggttgtatttttctcctgctatattcgatgaataagcacattcttgtgctggttcctttcaaaaaaaacaatatatataaataaaagttggatttcttatcaaagtcaatgctgagtaaggtcttcagtttgttttgctcttaaaaagttaatgtatggaattggaaagtgtcgagtagataccaatactactagttataagagatatgttacccaagcaatatggggcatccaggtggtacgtatgtgatcaaaatatggataccagtgtttattatgacttttgtagccttagatttagaatttctagtgaaaatattcaatttagtattctacatgaaatggacatgttagctatacttgtcaactagtctcaagtcatttataaatggttactgaataaggctgttgtgttacttatcgctactaatgtgttaagaaaagtagtgaaattatttacaagatttgccacatcacaacttaatataatcacaaccaacaaacctatactacgacaattgccactaccaaagcattttgcatggtaatttgtgttactgcaagcagctatgtggttgcgtttcagcggctgtaatgtgcagccgaacacaccctgaattccctcctctatctccgcacccgcccaattccgaggcccccgctcaaacgttccacggaacgaaaatttcaccacgcccccgtgggaaaaaaaataccacccgtctgatcccaactccccaaaccagtgtttcacggtctttgcattggaagcattgcccccaccgtgcagaaacgggcgtgtacagctacagcagcagtatggaaaattccttgcacccaccgaggctgccctgtagaggtggccaaacgggcggcacggcccggcccggcacgggcacggttccggcacggcccgtttcggcacggcccgttaggcacggctgatgaaacgggccgtgccgtgccggcccacgtgccgagccgccggcccaagcacggcccgtggatggggccgtgcccgtgccggcacggcacgcccgcggcccacgggccgttcgggggcacggcggcccgtgaaggcaggccgccagcagtgcactgtgcacagtgttttttttttttaaaaaaaaggaaaggaaatgtataaggaaaaaaaaattaaaaatggaaataaaatgtttaaaaaaagtaatgatttactaatgttaaaaaatgaaaaaatggtatttaaaaaatggaaataaaagttttttaaaaaagtaatgatttgctaatgttaaaaaaaaagaaaaaatggtattttcgctacagtaacgggccgcccggtccgtgccgtgccgcgggccgtgccgtgccggcctgctacaggagccgtgccgtgccgtgccggcccgcgggctcggccagcggcccaagcacggcacggctacacgggccgtgccggcacggcccgttactgtagcaggccgtgccgggccgtgcctgctacaggaacggccgtgccccgggcggcccgtttggcccggcccatttggccagctctactgccctgcactgcatgtgtctatgggagcatgtaggcagttgtaaacatattttaaaaagataaaagagaagagataagagcagcgggctatatagatttatagccagctgcagcacaaagcatttgtgtataataagtgagaccaaatattgattgtgtagtatatatttataaataagtattgtatgaattggctattaagttgactacatatgttttgaagcgagcttggataaaacgcgctctcctttggataaatacatcaccgtactccgtagtactagtagtagacgacgtgttcccacctgtccgtacgcccgagcgagaagagcgcgaaaaagtcaacagtgccactcatcacccgacacacgtgcgcccgctctgacaccccctcccgaaaccccaaacccctttcccactctctctcacacaccacgtcccatcccgtcgcgtcgccgcacattcacccccacacccttgccgcgccgccccgcctgccgtgccgtccggcgaacctacctagcctagcgctagcctagctgaagccagcaagcaagtgcaaacagtgcccaggaccaccaccaccgccattgccgccacctctccctacagctgttcgactacgccattgtcgtcactcactccaccgtactacactcgccttcttctctctcctctccgacacgacagcgacttctccctcccgccaccttttccctccaagaaccaccccccaagaaagcccagaccagagagacagtgtgccgatggcgatggcggtggagggtgcgggtgcgggggtggtggtgagcgagccggaggtggtgtcgataccgccgacgccgagggggatgtcgacgccggatgggacggcgacgccgccgccggcggcggggaggggcgcggcgacgccggcgaggcgggtggtggaggggctgcggggttacctggaggaggtgggacacctgacgcggctgaacccgcaggacgcgtggctgcccatcaccgagtcccgcagcggcaacgcccgctacgccgccttccacaccctcaacgccggcctcggcttccaggccctcctcctccccctcgccttccccgccctcggatggtcaggcactttccctctgcttgcttcttcagtttcttcctcctctctgctcctcgcccttgccatttccctttctttctttctttctttcagtttcagatgtgaattaatgcaggttttctgactgtctagtttttttttctttttcacttctgcttttactgatttggtctgaggttatggtttttgttgatttggtgatctgaggatgtaatgtgcatcctgtgttacttcagatgttatgcagtttctctggaagtgttttctttagttctacttttacttctttgatctgagattatggttcttcttgatttggtgacttgagactgaagtgtgcattctgtgttcttcagatgcgatgcggtttctctgaaaaatgtaattcttttacttttgggtttactgctcgaatgtaattcttttacttctgggttcatcttgctctcgaaatctgaagctgtaattttgcattctgtgttcttggtaggaggtaattggattgggcgtgggatatattttgattttactgcatcagtttgagcttgtgattctttgttgcttcagtgatttgagactgtaatatgcattttgttttcttgattggaagatgtaactggattgggtttggaaatcactgaagatttcacatattctccatcactgcagtgcatattctccgtgtccattcaaaaaaaaaatctactgaaagcctcatccaagaacaagacattgttgctttaatcatgctctgggtgtggagctaccccttttgctacactttggactttgttgtccaggattcttcttccttttttaaaaaaaaatcagattctttagatggatattcagtcccaaaagttttaaagcggtggtgaaattgtattgtttatttgtttttcagattgttccagcttgggatttcttacatggttaggaacgaaatgttttgatgataaatatatttaacaaaaaaaaattacaacactttttagcaaatgtagagaaaataactgaaactgaggggtgaaaatacagatctgaaacatcttttttttttttcagtttcaaggatttattcctgaatcttcagtttatatatgagttgattgagttcttttgttagcacgtgcaacggcctcctgtgaaaaagcatgctcagcactgaaagaaaaaactgtactatgattcaatacaatcatttcaaactgaattttttcggtgccaatttgtgccttgcaactggacacagtatcaactagtagtattgatactctgaagtgcattgttttcagctgaactgttgtacagtttgaaaacacatcctaacaaatggttctttgcactgtaggagctggggaataatatcacttactgttgcttatttctggcaactgtacacactctggattcttgtcaagctccatgaagctgtaccaggaaggaggtacaacagatatgtggagcttgcacaagctgcatttggtgagacatgttctctagtctttaactattttgcatgtccattacaattagctttctattccaagctggatatctctgacatgatttctgctaatagtagcactgagttatgagtaatgcaatgtatataatcatggccttaacaagatctgtgtcagaaagatagagagaatctcctaacagtataatgtgctcttccaataggagatttttgtgttttttggtgggacagtggctagtcaaatgtactaacaccctcatgattgggtcacatctggatagcttgaactgtctccattgatggataatagatcaccctcatgttacagtaatgcaaaatgtggaatcttttttgctaccaccattaattactatgtcatcattttaatcaaactgttgcatttgacagctcaagtaattattgcctctggttacaccaaactcagaacatgcaatgttgctaagattctctctgccgatctgatccatttgactggtgaaatgcaaaatcagcaagaatgtctgattgctcttgttttttttttcattcgttcaggagaaaaactgggaatgtggctatctcttttcccaactatttatctgtcggcaggcagtgcaactgcgttgatccttgttggaggggagaccatgaagctcttttaccaaatagtttgcggcccaatctgttcaccgagtccgatttcgacgatcgaatggtacttggtgttcacatccttggccatagtcctttcccagcttccgaatctcaactcgatagccggcgtttcactcatcggtggcaccaccgcaataacatactgtaccatgtcctgggttctctcggtcagccaaccgcagcctccaacagtctcttatgaaccacaagcatacacttctcttggttcatctttgttctccaccttgaatgctcttggaataatagcatttgcattcagggggcacaatcttgcacttgaaatacaggtttgtcctcaagaaaccaattcacaagagactttttgtactctacagttaccatttggtggttcagtgtttgaatgagctggaatctgtaatttttttcaggcgacaatgccgtcgactttcaaacatccagcacatgtcccgatgtggcgcggggccaaagtcgcatatgccctgattgcaatgtgcctcttccctgtcgcgatcggaggttactgggcctatggaaacatggcaagtactacttgatcattagacccaattgttgctgcacttaacactcttaagtcctaacagtccttggaacattctccctgttgttttccaatgcctgcaggtgccacagggagggatgctgacggcgctctacgccttccacagccacgacatcccccggggcctccttgctgcgacgttcctccttgtcgtgttcaactgcctgagcagcttccagatatactccatgccggttttcgacagctttgaggctgcctacacgggccggaccaaccggccttgctcggtctgggtgagatcaggcttcagggtgttctacggcttcctctcgctgttcatcagcgtcgcgctgccgttcctctccagcctcgccggcctgcttggggggctgacattgccggtcaccttcgcctacccgtgcttcatgtggatctgcatcaagaagcctgagaggttcagctcaggatggtacctgaactgggggcttgggctgcttggcactgcattcagcctggctctctgtgtgggtggtgtctggagcatcatcagcagtgggatgaagttcaagttcttcaagcccccaagctagattgaccagcaatttccagtatcaaacttgcaaaatcagtacaaattctggtgtgtttgtgatattttcagacaatggaaaagcatatcccagctggcctccgcattgtgggtgtgcttgtcatatggttatatgaatgatatatgatgatgatatatatggtttatcttacatgccttggcaagaacagaattatgtattttctattttgaacacaagaaaaacaacaatggaatttcaccgaaacaattataaatgatccaagattctttgcacgattcctagcaagaatcaagttatcactactaaggctctaggacaattcaaatggttttgggctgattattaactcttttatgctctgcttagctactaagaaccagttaggaacataataatttcattggagtgttttttttttgaaatgttttctcaaaagacaatgggcactatctagcaggaacttatttaatcagagtcaatgttgcgatcaaatgaaattattgcatccaaaataggggtaataatatcaattttaccatttttagttttttttaaccagacaaaaaagatacggtaacgtcacgaaaataaattatcaagatgactatgataaaatagcttcggatagcatgaggcagcaccaatgttttgttccaaaatatagcaactttaagctctcaggatttgttccaaaatataacaacttctccaccaacattctcttctcaaccaatcacaactctctaccatttacttttcccacatacctccactacttatccagtcacagccctccaccatttacttctacctatttttttaataaccatgtccaactctaaaacttcttatattctaggacgaagggagtataattttgcatgccattgacaaatatgagtattgtgacatttaaagcctatctttgtatggtaaggctgaggttaagagcatctgagttggtgacatacggaattttactttctttttattctcgtgtgcctacttatctattggacaggagcacaaatactaacagttgaattttttttttgttattataccagaactacacatccaccctaactgttcactctaaggtcattgacggccagccaggaacactagtgattgagtcatttgtggtggacattccacaggggaactccaaagatgacatacgctattttgtcgagaacttgctcaggtgtaacctaaggaccctcgctgatgtgactgagagccatgccgaactttgatagactttgccttcttttttttaggggaatctcattttccttctttgcttatggtcagaatagtcgggatttcaaattggtagaacttgttaaaactctaagaaataatggagctccttgatcagcactaactactaaagcttcttccaaagaaattaattaccagtgcaatcatagcgctcacttcagtttactacatatacatatgcaactttctggtttagtgtgctctagtgtttgaaaaatgctgaactgaaataaaataaaaatattccgaaggattgttctcggacttcatgtgcaatcaagtgtgttattcttgggtattcaactaatgtttccatatatgcatgtccctcttatcatcatgttccctaacttatttgagttcaacataaacacttatttaatttaacattatcttaactacaacaccatatgcccaaatgcaacatgtacattgtattgactagaaaggctaatttgtatttagaaaaaaaaacaaatcatgatataagctttcaagaaaaaaaaccaatcaacttgacaattatgagcatgatgtacctagtatagacatctccgccctttggatgctgaagagggcactcctcagccaccatgcatgtcctatctctacctcttaatcgaagacccaacatgcaaggtgtcgtccaccaagttgggcatccatccagtggcccctgcctccccaccgttggatctaaaggtctagggataagggacattacacgtgggccttagagccatcggcatcacacgcaataggttaaccttagagcttccgttgctgccaaagggcctcggagaccatgtcacgtgatgctacaatatgagagcttaccttccttccaatttgggctgcctgagcttggggggataacggatctggctactcccaagctcataacagctagatctggccacctcagatctcatgctggctggatgtggcatttcctatggtcgggttgaatggaagggaggaaggtggcaaaaatacagaactagtggcatggtcgggtgaagggagaatgagcaggtggtacgtcatccagagaagaggagggagggctagagggggatgaatggagatatagggggtatgaaggggacctcacgtggacaatgaacttagtgtgggatcgaggaatctaattcagcttttttttggctgatttcactaaaaactggtaatgttgtttcaaacatgatatatggtttttaacataaaccggttctttgaaaacaatgattggagggggggtgttgattgatgttttagtgctaatggttccttctgccacgtcttcataatttgattcatgtatgttatgatctcttccatatgatctttattagcaatctctgtggctttttgtgtgcagtactcatcacttccttgctgatcacttggtccttccatccttatcctctcttacctttaatttcttgtcaaaaatagcttagctttttgttaaatcgttcccaaatgtgtaaaaccatgtttcatttgtttgatgaaattgtgtttattaagatgcatacatgcatagaaaaattctgaacaagaattaccttaattacttgatcattggaatgtcctaacgtccaacataggatgaaaatgatatactacatgtggtttaaattacatggcatctggtagcaccaagaggaaatgcttgtatgtacttcatgcatcatttgccatatgtttatgccaacaattaatgtatttcacatttttagctttgaactgatattctatatacacctactttgaaagtgtgatgaacacatttttttatattttttattaataattctctacaatattggttggcataacttatttgagttgataacattttggagcagcctgggtgtgttttggtaaaagtaggactctagctctcagattctcatctcaaggagttaaataccctgatcagatttttaaaaatggtgtggtgtagtagaggttttttttttttgggggggggggggggggagggctgctccgtgatacagaaaaaaaaatcaaagacttttctcatagctacttgtatataccagccaactatggaaaacagaaaaaaaaaagagtagcatggtcactttttagtttttatccactcctggtctcaaaatttttggaactaatatttaacaaaatgttttcctatagggacagtctaattcccacttcctgaaaaaaaaggtcaattttttgtacatccaggattgtcttgagatttgttcatgaacagttaatcttatcttctcctctcgttttcccatcccaagcacgaccgcactaatgggcgctcacgggcgccatcctcccctagcccgactgagccgccgccgccgccttgatctgaacagttggctgaaggccatcaatagtgccagcacgttccgaccaactaaccgcctcctgctgcccccctccctctctttcctcctcccaaatccggcggctgcaccattcccctgtgctggtgtcttcaccagctcgcaccgccatcaatcaccatctccataccctcccccc

SEQ ID NO: 4625 - DNA, 3325 bp, Oryza sativa
cctgaggcttgcgtggcctattaccggtccttgaatttctgaatgtcattactgtgagctagtggaagtaaaattgtgtgtgaagctgaatatccttttggtgttcaggcctaagcttcgggggccaaatcacctgtagtgtctgcagatcaaggtttttgcttgtgattgtacatgtgtgctccctggaaattttatcgtactagatgcatatgctagtttgtccaccattttcctgatgcttcttattcataccactcttggatacacagtggaactcaatctattgttcacgccttctgtaatcgtattcagctccatcctttttctgttgcatggcttgcaattttgtgatggatactaagtgagcagtgacattgtctttcaatggtaaagttacactcatcgatcaaaagatgggatgatggatatacataaggatattatccatttcacaaccatgtctttttccacattccgagatcaacccaaaacaacaaaataagacatgcgtgttacagtaacaacttcgacttcaaaacgttactttataccttgcacatcaaaaccacttagtgtaaaagaagagacttgaatattttttttaaaaaaaagtaaaaaacatacaaaaaaacagttagaaatatatatatactgtctggagttagaatatcttttgagttgagggtaaaaattatttacgcatcatcccatcttcgtactagatttttgaagttgtagctagctgttgatctctatgcttcacaaactatactatcttgtactatgttgtaactgcatagttttattcttttatttcaacttgtggtgttaaatgtaggtaaatcgtgaattttgcagcttaaaagaaacatattttttttgcatttaacgaaaattagtacatgaagtattccacagtttgggtgagttcctttcactcaaacagagccaagagtagagattcagatcagctgcaagactaacattgctgaaagttagcacacatgtactgttcactacttaaaaaataatttttcccgacacttggattttattttttcaagtggactaaaaatattctcgcttgtgaaaatatcagaagttctataggtctagccccaactgaaaaaaataatcaatttatacaagtgggatctaaagaagtttgcctgtgaaaatacccttcattttcgcaggtagacctccttagcctccacgtgcaaaaatcaatggcagtcgggacctaaagaggcccgccagcaaagcgtggaggcacttttttatccagcatcgccagccaccgacaagcaatccttctccctcacctacgccctccctcactcaatctccctcacacctctactagggcttcgatccccatccctctccgtccagcctccaggccacttggcgatagcgggcaaggcactacgttcagcggcattagcggaagcagggaagggatgacgttcggtggcatcagcggcggctacaagcgcggttggcggcaacgggctggaggagatgagaggtcgctagtggaagctggcaggctcgggatgcaacagcgacatcgacggcgatgatggcgaccccaccattgacgacgactacgtacgagctcgggggaggcggatccactcagtggccagcttgggagaggggtgtatgactatagcaaggttggaagaggcagatccatcgccgacggccttggatccgccattgccgagctatgtagtgtcggacccaccgttgccgagctcgggagggggtggatccaccaccagcagctcgggagttggggtgcatcgtctacagcgaaggggagtggcgatggctgtggaggccttggattggcatgaacatactagaaatctgctggtcagaccgcctgatggttgtcagttggaccgacatgagactcccagccgaccgactcctaatcgacggtcagggtgtccggtaagattataaggtgtccagttagaccgttgttcaaatttagatcaatttagtactagtgcctaattggctatctaaagatacattattgcatatgagatctagttgatatgatgcatatttgtttctcgttttttaacatttctaccacgggatagcaaaatttccaagatttcagattttttggaatattttttaaaaaattgaacaaactttagcctaagttgaataacttttaccaaattcacacaaaaattgaaaactttgggcaaaatagtttcgttcacgcgggggaggggtgttcccgatattgcaggaattcgaagtgaaattgcatgcataggttataattatgaactgaacatatgcaggtagcctcacatttctttcatcacaaaaattcttaaaaaaacattctgtagatcttgaatgtcaagcgtggaaacatcgtgtcctccacagtttaccatgtgccagagcaacaattcatccaactgaaaccataagcttgcaaggtcaaattttcctggatgcctccttgtccgatcaaactgagatatacatgcagaacttgatatctattaatttcttatctcctcttactccatcatccatactttttgttcactatagtttgctattatgtttgttcaaaagatacgaaaatagtgaattggtactgaaagatgaggtggtatatataaaaggacgacgaaatatataatgcctctatgcatttaatacccatctatatatgttcgtagcaggaggtagtaattacatttctctcatcaatctgttggttaattattttgaattaaagtgtgaagtagatgtatatataattatgctttctgcataaactttttgtgctattccttaatcacccttgaagagctaaaaatagtgaagaccactttgtatacatgcaccatagtcaagtccaaactaagtatatagtggccacaatgtaagtcggattgcgcacaaccggcactgaagtcagccaggcatataaaggttgacaccctaaaatagtcaagataactaccatttggtaccataaaaacaaaatggatgcacgggaatgcatgtctttattatagtgattttagtgactaacgattacatgtcttcccctggacaattatgttataagtatgttacctttgttgtatcaccttaaagcaaaatcccaaaacattagaggaaaacaaaggattagaacggataagtagcaggcatcatgctcagcataccatgaagaaaagaaaaccatagtacctggcattaagttccaatttttaaagtagagatcatgtagatgcacaaatttaatttatagaccactgctgaa

SEQ ID NO: 4626 - DNA, 4394 bp, Oryza sativa
ccatttccacccaactccggccggccactctagtggccgtggtcatcctccccttcccctaacccggtcatcgcctttcccaggttgtgctcgaccccgtccgccgttgtcggaagcgccggccgccgctcgtctcttcccacgccggtcgccgccatcgcctcggtgaggaatcccctttcctccttcctttcctctcccccgtgagcgccgccgccctccgcgcgtgcgccgtcgtcttcggctaccgccgccgccttcgcgccggccgccgccgtctccccgcgccgccggtcaccgccggcggtcgtgcgccgtcgtcgcctcgccatggccggccggcttgagccgtgccaagccaacagccacgcccctctcccgccctgtgccgctgcccggtggggcccaccagccggtggaccacccctcccttttagccgccaccagtggggcccacatgccgacgccccctccctctccccttgtgccgctgccagtggggcccgcttgccagccgccccctctccctcccttagtgccgctgaccagtggggcccgcctgtcggcgccaccccctcccctcgctgacgtcagccctgggctttattgcgcaataaattgattaaggacttttctttattagtaaaaacacagtttatcttctaaaattcataagtaattcatccgagctctgtttaagtccattcaagtctcagtaaatcaagaaaaatgcaaagaatccattaaaaatagttttgtttcctgtttcagtagtcttatagcatgttttgcttgtgtgctttgtttgtcgcgtaggtttcggccgtttcgtcgatccacggtttctcgaagacgttgctgaggtctcgtcagtgcgagagcaaggcaagtcatgcaatacgtttgatcatattgtacccaatttacaaatatcccgcatttctattaaatgttgcatccttttacaatgtcatgtgggatgggtcctaatactcagccatttattgtttaccttatgccattgataacttgggtatcaaaatgactagatgttggtttaggaaatgcttagccatgcttagttcaactagcacacacatggggatcacattattacatagactttgactatgagcatagctttggattggtgccaccgcaatggtgttagttaattaaaatacattgaatggtgggttgtgggtgcatggttttgctggtcgcacccatggcaattaaggaccggttcacgggaaaccctgggagacttaccgtgcttaccacaagcgggagtgggtaactgcttgatctgaaatatagctcgaccctttcctaggcaccggtggcgagggtgggcgtgatgaagttgggtcggccggggtgtccggttgtccagctgccggattcaccgcggcgcaagaggggaccgcccactgccttttgaggggtgggggtgaaaccttagcgtggtgtggatggttaggggagggttatgtggagggtcttgtcacgatttccccctttgcagtatcatggtgatacttcggggcatggcgacatgtgtggaatcgtgtcttgtgggtacagttgtacacctctggccagagtaaaactattcgaatagccgtgcccgcggttatgggcgatcaaccagattcaccgtgattagtctcacccctagtttagcttaatgaactggtgtagttcaggtggttggttgggcctgttgcaacgtggtgtagcgttggacagtgtttggttaatattgattaattactacaactgttttactgccttcaactactgcttttaaatgctagctttatgcaaaagaacctctagcctcctttggttatatcctgcatcatacctcctcttccggtatgacttgctgagtacagtgggtagtactcagtcttgctctcttttcccccacaccagagctgaagatcttcctagttggagctgttttgtcaaagttggtttcgtcgctgccgtcaaggattgcctgtggagtggagtcgcccgctgctgaagtcaagcttcccggtttagctcgcttttatcttttccgctgcatttgtaatcttttctatttttgtaagacgtggatctgtatgtcaacaattgtcgtttgtgtaccctggctggtcctggacagggatttaatgcacattcagcttagaaattctggttcgagaatttctgggcgtgacaaactgccatgtggcttcctcaaaacgctctcaacatgccacatggcacaacgtgaacccgtgcctagaagttgaggacccacacgtgcgcttttgccatgatcataacatggagcgtatttatctcaagattagtttcctactttgaatcaatgaagctggcaagattagctatcctacgtcaacctaatatcacattatctctacatatacatatatacaccggtcagtagattagcaaattttaaatcgatcaagcaggcaagattattacactggtggagaaaccatctttcgtcggtcggccgatttccacaatagtcccggatgcaataaaaaccggggctaaagatgatctttagtcccggttcaaaagggtaacgggcatatttgatctttagtcccggtttgtgttaccaaccgggactaaagatgatttttagtcccggttcgaatgctgtcaggtcatgtcaggcccccccggaatcattaccaaccgggactaaagtcgtaactttataccaaccgggactaaagatcccggtgatctttagccccggttggtgctaccacccgggactaaagtcccacccctatatatatgtcttcttcctcctccagctgcccgagcaagcttcaaaatttcttcaaaaaagaggggaggtcatgccaaaatttctattgaatttattttggtgattacatacaaatcggaggtgcctaaaaggtttgcaacttcatcctccaatgtttttttttgtcatactacatttgcacctatgttttgcacacttttttttgtctccaaaatttagttgtaagttgatgagagagaaaatgtgtgtggggaagaaagaatatatagaaatttagttcatttgctaaacaaggttttataaaatagttgagaaggaaaactctagtgaaagttaatcttaaataatagaaaacaaactaaaatgaaaattaaaagaagtaaaacacattaaaattagtttaaaactttacaaatagtttttaagaattatttggtgtaatattttatgatttttgtatgaataaagatatcttataattattgtatgactgtcattattgtaagaataattatttgtgtacggtttttttgactcatgtagatggatcggcaatggatgtacgctgaccggcggtccaaagagtttattgacggcgtgcactattttttgagagtggccgaagctaacaggcaaaggggttttatttgttgtccatgcaataagtgtaagaatcagaaggagtattctgcatccaggactattcatttccacttgtttgagtcggggttcatgccaagctataattgttggacatcccacggagagcaaggtgttgaaatggaagaagatgaagtggaagacgacaatattccggactttgctcagtatgttggatttgaaggaaatcaaacgggggaggaggaaatagctgctgatggtaacgacgttgcggatgatcttggtcagatgttgcaggacgccagggaggactgcgaaagtgaaaaggaggcccataaattggacaagatgttggaggaccacagaacttcgttgtacccaggttgcgagcaggggcacaaaaagttggataccactctggagttgttgcaatggaaggcaaaaaatggggttagtgacaaggcatttggcgatttattgaaactcgtcaagaacattcttccggggggaaacaaattgccggagacaacgtacgaggctaagaagatagtctgcccgttaggactggaagttcataagattcacgcatgtccgaacgattgtatcctatatcgcggtgaggagtatgagaacctagaagcatgccctgtttgcaaagcactacgatacaagattagacgggacgatccaggagaagttgacgggcagctaacaaagaagagaattcctgctaaggtgatgtggtatttccctataataccacggctaaggcgtttgttcaggaacaaggggaatgctagaatgttgcgatggcacgctgaagagcgtcaacaggacgggatgctgagacaccccgccgatggttcgcagtggcgaaacatcgacagaaaatttaaagaatttggaaaggacgcacgaaacatacggtttggtttgagtacggatggcatgaatccttttg

SEQ ID NO: 4627 - DNA, 1888 bp, Oryza sativa
cgagccactggccgctgtgctatgccgtgcccttgctgctgtaccgtgtcgcagccgtgcgtcgcttaaacctagccgccgctatcccgtgttgtcgttgttgtggtttgttcgctgtcgttgcccggtagccgagttgcaaagcctaaggtgcatcccttaattcctaccggcctatcgtttgtcgtaccgggactttatcgtgaaccgtgtctagctcaccggtttagtcgcagccgttattgagtcgttcgctcgttcgttcaaacgaggtgttccccttgcttcgttcgttcgtccgtgttgagtcgtcctttagtttagagccgttcagagctgccggttccgttcgccggtttcggttgatcatttgggtgatcccgtgtcacgtagaattgactcgttaagtcggtatctcgtgaggctcgcttgccagatcaatctaatccgttgaatcttggtcaactctatgtcaagattaatcttagccatccaaaatcaatataaatccgttctctcttttcaatggcatattagttcttttttatcatatggcatctaccaaatataatctaatctttttccggaggttgttttaatcttttatctcagttataaattatttgtaaattgtttaattaatttggaatagtcttttctttaataggtttaattggaattaatcttgtaaaattcataactaattcatatgaagtcggaatgaggccgttcaagtctcataattcatctaaaatcatgatctacatgtttgtttactttatgtgtactatttatttggtttttattagtctttttcctcgttttgcgtgttagcttgtcgtttccgtcgtttcgaaggatcgcgtgtgcgtcggaagtgttcaagaagattaattgaagacccactattgcaaggcaagtcacacagatcccaaacacaattcttttgagcatgttgatcctttatttaaattctctatttttttcaactgtgcatttattttcgaatgtcatcgggtggtgtgaaactgtttctttgttatggccaatttgcattgattatcctatttcttgattacctcggattataatttgactagttggatttatatcttggttcaactagatatattagatataattgcttagtcatgcttagaaatattagcacactattgggataactaatgtttcactattacttaatgatgtacatggtaaaggtagctcacgatggtcaatcgtgattagttaattaattaatgtgccaactaaaacctggtaatggttggttgtgagcacatggttttgatggtcgtgctcatgacaattaaggaccggttcacgagtttcggttgtgaaacatttatcgtgccaaccacaagccagcatgggcaacggctttatcttttgtatagcatggttcattgcggggcaccagactgagaagtggcggagataagcccacgggggtcgctggggagtccatgccttgtttataagggggtgattatgatccaggaaggtgcgctgcaatggattgtgttatgcgaggggtattgtcacaactcctttccgagataccgtggtggtattgaggcacatggtgacatgatgtggggttgtgtcttgtgggtacagtggtacacctctggccagagtaaaactattcgaatagccgtgcccgcggttatgggcgggtctaacaatgtctttcgtgattagtctcacacctctcatcataataaaagatgcttaatctggtaataatttgtttagctcctggtttggaatggtacattcctggtttggagatagaactgtgcagccgggatggttgttcagaatggttgggcctatacaacagggtatgttgtatagcgttgga

SEQ ID NO: 4628 - DNA, 1218 bp, Oryza sativa
atgccatgggacacgatggaacaactgccacgtattacggtgccatcgaggacatatgggaacttgactatggtcctctcaaggttcctctgttccggtgccaatgggttaggttgactggtggaggcgtaatgattgatgacagtgggatgacaactgttgaccttaacaaggttggatactcggacgaaccttttgtccttgccaatgatgtaacgcaagtctttttcgtgaaggacatgtctagcaaaggaaagaagggcagagggcctgatgagcctaagcgtcaagtggttctcccaggcaaaagaaaaatcgtcggagttgaggacaagactgacgaggattacgatcagttggatgggcaaccccctttcacggtgacgattgaccctagcatcctcctatcaaatgaagacaccccttactcacgcagcgatcacaaggagggaacaatagtaaggagaaagtacgtgcggtcaaccgtcaccgccgatgtaatgccgtaattattgtgtacacgatgtaaactattttggatgtattgattatccatataaatcaattgatgtatggcatatgttaattacgcacgattattagaggtttcaacaagtttaaatcatgtatatgctagttatatgtgatacttacaatttttaaaagttttaaatcacacaggtggcaatttcatatgtatgttaattagagtttttaacatttaatttactagcattcatatgctaattataattgactagaggatttttaaaagttttaaatcacgcaagtggcaatttcatatgttaattagagtttttaacatttaatttactatcattcatatgctaattataattgactggagaatttttaaaagtattaaatttaatatatttttaaaactatcattcatatattagagtttttcacaatttaatttactatctttcatatgctacttatatatgactattcgaatttttaaaaggtttaaatcatgcatgtggcatttacatatgttaattagagtttttagcatttaatttaatataattcctacgctaagtatatatgatgattacaatttttattaattttaaatcatgcagtatgtacatacatatcttaattagagtttttaccaatataataatatcattcatatatatgctaagtatatatatatattggaattttccttaattataagtcata

SEQ ID NO: 4629 - DNA, 641 bp, Oryza sativa
acacgaattgtggtcaatctagcaccaggtgagtaagtgtcaaagaaatcttcgccttctttctgagtatagcccttagcaacaagccgagccttgtacttttcaatagtaccgtcaggcctaagcttcttcttgaacacccacttgcaccccacaggtttacacccatagggtcgctccgtcacctcccaagtcccgttagcgataatggaatccatttcactacggacagcctccttccagtagtctgcatcaggagatgcatatgcttctgaaattgacttaggagtgtcatccacgaggtacacagtgaaatcatcaccaaaagacttagccgtcctttgtctcttactccttcgaggagcttcactgacatcctcctcagagacaagttcatgtgtatgttcagtttgttctggtggtgtgattgaactgggaattatttcagagggttggttcgaaccactatgtatatctttcattgggaaaaagctctcaaagaaggtagcatcacgagactccataattgtaccaacatgcatgtccggtacctcggatttaactattaaaaatctataggcaatgctatgatgagcatatcccagataaacacagtccacagtcttaggtccaagtttgcg

SEQ ID NO: 4630 - DNA, 7105 bp, Oryza sativa
cagattcctcatgtctttaggatacatgatagccaactcccaaacatatgactaacattgcgaggatgttttaaattataagctagatgaattacaaactacacctagcaagataagcgacactgaaagaataaatgttggctggtttcatccttgtgacaaaaacaacatgtcttactacctttccaatttctcttagtaaggttgtccttggtgagcaattacgcctagcgttgataccaaaggaagattttttactttcaccttccaaatgcgtctattgatattcggaaccccggtatgtgttagagctagataatgagatttaaccgagaagaccccattcggggtgaggttccagtgaaactcatcttgctcatgtaccagaaccaaatcagctatgtgaggcaatatgttataccaagcagctagtttttcaccaattaaatttagcatttagccaacttagaaatccaccatggcaacaaatttgcgtttagctccttgactacagatttgtccccaaccctagtcctctctactctatatcttaccgtctttctaaccgggacgggttggggaggggggagggctagaggggcaaaattttgctctttatttgaagaaaaaaaatacaagagtctcgctaggtaataacaaataaattacaaccacaattttcgtgtgatatatagctacatatattatatctattttttgttccaaattgccgatggataaaagttggatgtatggaagtgatcgagtgagcccagagtttagaaggggcattgtcggtttcataaatgttgtagagcaagacaagaacataaggaacaatcaatgcatgacttgtccatgctttgattgtaagaatgagaagatgtttaccagcaccgtatgaggacaagcatgacgcatatctgatctgtcgaggattcatgaagggttacacatgttggacaaagcacgaagagcaataggcactgaataatggaaggcaatgaagcgagcagccttgtgaacgaggaaggacacgaagatatgcttgtcgcttccccattgggtggtgatcaggtggatgtcgataatgataccgatgacacctctgcgacgggctgaaaaacctatcggtgaacggtgagagttggggcccgacaagtatatctctatcatcggtcgtgacggctactcgccagacacaaatgagattttcacattagtgaccaataatcagtgatcacacactttgtggttaatgatgagggttgtgacccgttacggatgactggctccgtagtagtgtgaggtgtgttgcctgccttcacagtgatgatggcaccgcggcagattcatgggatcaccttctccttatcatactgcatgcatgtatccctatggggatctctgactaccgatgatcgatcactgccgtcctaatcatcatgatgggttaaaagcaaaatgtttgccaccatgtacagccacattagagcaggtacaataggaggctataagccatctgcaaacatattttaagtagataaatgaggagagagaatagcagcgggctatagatttgtagccaactgtaacacggactccaagacgcaatgtgtgtatgataggtgggatcatgtattaatagtgtagtatgtaactatatattatatgaataagctattagattagctatagatgaattgcagctagtagttggctatactattaaacttgctcttactgatccagacccatcaaatgtgttttggacctagggatttctgctactgccaaggtctcaaaacatctcccagccagtggtcttattcttgtgcacgtagaaattcatgtggaacgcgatagttctgctagctggaacaaagtgttgagattatagacatataatgatttaatctattccataaataaatcatgacattacagatgaaaactagcatgaacgcatcattagatctacacatgtaaactacatagtataacatgaacagatcaaatatgcgcaacatattgaacacgtaccgaggtgacgaaaagaccggctgcttggtcgaaacttttcgcaggtgtctacgaaggcacgaaacacgcgagcgaagaggaaggcgagccgtcgcgaacgaacagggagcagtcgcgcgaagcgcttcccaaaaaccttattgccgccttctcccggtgcaggacgtcaaaggcagaggttccggagacctgctctcccgatcgctggtgcacgccggcgagcgggatggagtagtctacgagcgacggcgcagtacagagtagaaggcaaaccctagattgattttgcgtatatactgcgtgaagacggcgggtcggtttatatagagaagggtcgcttgatcagggcgcccgcacgatctctactgcgcgtaaccgaaccggataagtcgcgcgtaacttatccggactccacgccgtttgcacgcaccggatttttcggaacgtttccaaaacaaaaacgaatccgaatttgcagcaaaacaaaactgcaaaaggaggctgcatctgcgcaagggtgaggagccaatttttcggaccattcgacgcgtacgtcatgcacgcgcgccgcctgccaggcgaggcgagcgagcgcgcgcgtgtttcccctcttctctccaccacacatgcttcaagtggctaggaggacatcctcccttttaaggaggtccccctctcctagaataagcaaggtggtactaaactccacatgcatgccatcccatgaggtgggcttttgtgattttccaaagaattaatcttcgagtggggtaaggcccattcattaattccaacaatcccccaccaaatctcaaaatcccactgagatttgccttttccaatgtactgtttatataccagcggttcgatggagaccaattaaggttgaacatccacctagaactccaagctacacttactcacaacttgaacaatggactacgccttgaattgcaagtcttgtgcaagcaagtttcactcaaagtcttatctggtactagaccgtctgtagactacccctcgggtggagcgtataagtcatactcctaggtctttagtaagcttcctagaagattcacccaaaatcttcatagactgcgaccaacagtcaagctcacaaaggtgagttctttcaagaatgctctgcaggacaacatcttcgctaattaaagccaacagaactcattaaggcatagccaacctgccttgcagctcacgagagtacatgcatcttcacttggagagggtatatatattgatactctcctctagtttactaatggtttgttcttcccaggatctaattcacgggatctccgatcacatagactgggttaccaccatagtataactcacatgggtctcaaacccatctccttcgatgcattgtttatcacatttcgtgatagtcccttcgtgaagggatctgccaggtttctcgctgtttggatgtaatccaacgttataactccggagtttcttaatttcctgacagacttcaatcgtcttttcacatgtctagacgatttcatattatccttagaactattcactttgacaattaccgtttgattgtcacagttcataaggatagccggcaccggtttttcaacaacaggcagatccattaatagatcacgcagccattctgcctcaacagtagcagtatccagtgccgttagctctgcttccagggttgacctcgtcaaaatggtctgtttgcaagacctccatgaaacagcaccaccacccagtgtgaaaacagatccactagtggctttgatctcatccacatcagagatccagttagaatcactataaccctccagtaccgcaggatacccagtatagtgaagccccaattccacagtacctttcagatagcgcattactcactcaagcgcacgccagtgatcatctcccggattagaggtaaatcggctcaacttgctcacagcaaaggagatatcaggcctagttgcactagccaggtacatcaacgagccaatgatttgggagtattccagttgattcctagcaattctcttgttcttgcgaagcaacaagctaggatcataaggtgttggagaaggcttactatcaatgtagccaaagcgattcaagatcttctccacataatgggactgcaagagtgtaatcccattctcacctctaattagcttaatgtttaagataacatcagctactcccaaatctttcatatcaaaattttgagacaagaatgatttaacctcatttatcacctcaaggtttgtcccaaatatcagtatgtcgtcaacatacaagcacaaaataactccctcacccccaccatggcgatagtacacacatttatctgcctcattgactgcaaagcctgcagatgtcaatgttttgtcaaatttctcatgccattgcttaccgagcttgtttcagaccatacaaagacttcaacaatttgcacactttgccttcttgaccttcaactacaaacccatcaggttgatccatatagatctcctcatccagctctccattaagaaaagctgtcttaacgtccatttgatgaacgagaagaccatgtgaggctgctagggaaagtagcacacgaattgtggtcaatctagcaccaggtgagtaagtgtcaaagaaatcttcgccttctttctgagtatagcccttagcaacaagccgagccttgtacttttcaatagtaccgtcaggcctaagcttcttcttgaacacccacttgcaccccacaggtttacacccatagggtcgctccgtcacctcccaagtcccgttagcgataatggaatccatttcactacggacagcctccttccagtagtctgcatcaggagatgcatatgcttctgaaattgacttaggagtgtcatccacgaggtacacagtgaaatcatcaccaaaagacttagccgtcctttgtctcttactccttcgaggagcttcactgacatcctcctcagagacaagttcatgtgtatgttcagtttgttctggtggtgtgattgaactgggaattatttcagagggttggttcgaaccactatgtatatccttcattgggaaaaagctctcaaagaaggtagcatcacgagactccataattgtaccaacatgcatgtccggtacctcggatttaactattaaaaatctataggcaatgctatgatgagcatatcccagaaaaacacagtccacagtcttaggtccaagtttgcgcttcttcgttattggtacattgactttcgccaagcacccccatgtgcgcaaataagaaagtgatggttttctaccaatccatatctcatatggtgttttgtccttatttctgttaggaactctgtttaacacatgatttgaggtcaacaatgcctccccccaccatgccttaggcagtcccgcggtgtccaacatggcattcaccaagtcagtcagtgtgcggttcttcctttcagcaatcccattagactcgggagaatagggaggcgtcctctcatgtatgatgccatgttcctcaaagaataagtcaaactcgttcgagaaaaactctccaccacgatcagacctaagcctttttatctttctgtcaagttgattttcaacttctgccttataaattttaaaatagtctagagcctcgtctttcgttttcaacaagtacacatagcaaaatctagtagcatcatcaatcaatgtcatgaaatatcgttttccacccttcgtcaacaccccattcatttcacaaagatctgaatgtaggagttctagtggtgccaagtttctctcctcggcagacttgtgaggcttgcgaggttgcttcgattgcacacaactatggcacttagaacctttgacaatggaaaacttaggaattaaacacatgctggaaagccgagacatcaagccaaaattaatatgacataaacgtgaatgccaaacattagcctcatcatccacactgccacaaatatggttcacagacttattgcagaaatcagaaagggaaaagcgaaacaggcctccgcactcataacctttaccaataaaatatccatgtttagacacgactactttattagactcaaaaaccaacttaaatccgtctctaatcagacgggagtcactaacaagattcctgtcgatagaagggacatgctgcacgttcttcagctgcacgatctttcccgaagtaaacttcagatctaccgtgccaacaccatgaacagaagcatgtgacccattccccattaggacggtggaaccccgtgcgacctgataagaagaaaacaatgagatgtcagcacaaacatgtacattggccccagtatcaacccaccaattagtagattgattaactgaaaaaacagtaggtaaattaccatacccgcttccatctccaatgttgccaatggtcacatcagcagacttagaagtctgccctgcaggtgccttcatccccttgcgctgtggacacttcctagccagatgaccaacttggccacacacaaagcaagtcctctcatcctgattaggattgttgttgttcttcttctgcttcttgaagttggtggtctgctgagctttgtatttccccttgctcttgttctgggccttgtgcacaacattggcactggactgcccaccatcgcccttagacgcggcatctttttcccgagctttctcctcaacatcaagagacgcaatcaacccctcaacggagtattcctgtctcttgtgtttgagtgcagtaccgaaactcctccaagatggaggtagttttgcaataatgcacccggccacaaatttgtcgggtaagacacacttaaggagttcgagttccttagccatggtttgtatctcatgagcctgttcgactacagaacggttgtcagccattttgtagtcatgaaactgctccatgatatacagatcattgctagcatcagtagcaccgaatttagtattcagtgcatcccacaactccttagcgtcggtcatatgcatatacacctcgaccagacgatcgccaagaacg

SEQ ID NO: 4631 - DNA, 14696 bp, Oryza sativa
  unsure (1)..(14696): unsure at all n locations
ttatttgtgtgtataagtaactttgatttgtgatgtagatttgagatgttacttcgatttgtggattgggggtttgatttgggatatgtatcgcacttgatttgggagacaataaaaaagaaaaaaaaagaaaaaggggatcatctcactgccgtaaccctctctttaatcccggttggtaacaccaaccgagactaaagatcccctctctttagtcccggttggtgttactaaccggaactaaagatctatttttagtaccgggtatttgaaccgggactaaagatagcgatctttagtcttggattggtagtctcggtttgaaaaccgggactacaggggttgcgaaccatgactaaaaagcatttctccaccagtgccagagttgtttccgtgggatcatggatagggaatttattgtcccgctggcaaaataaattctctagctatctcctgcaaatacacgatattactgactaaaatatagaacacaaacaaatacacgatattactgactaaaatatagaacacaaacaaatacacgatattactgactaaaatatagaacacaaatggaatcttaagaagctgggatgatagtatgagagtctcaagtacaaatgtggctgatacacttattagcggctatggattaatggcacgagaaggtagatgtgataactaggatccccctaaactatttcattttttcaatttgcaaggcaagtctccgctacaacacatagtctatctatcttctatctatctatctatctattatatattaaaaatccattaaacttcctacaaacattctcgaactgtgtcacgcccggaagtttccccttttgcttgctttaaaaaaattggttaaataaattgtccgaagaaattatcttaattaacctagagctaattccttaattaataaatgcaattaataattgaattcggcgtggtggaatttttcttgagttccccatgctccaatgcattaacaagatttttaatggaagtttcagagccttggaaataattttaaccaattaaaaatcaccaaagtgcaattttaatcccaggaaaaatcctttcttctttttctttttcctttttcctcctttttttcctcttcttgggccgtcggcccagtccacccgtcgcccgcgctcggcctccccttgtgggccggcccgttctccttccccctctctccgggacgctgacaggtggggcccacctgtcaggtcgtccccttcctccagccacccgcctccgacggcaaccgccgccgaatccgccacgccgccgcctcctccgctcttcccgcgcccacgccgcgccgctcccgcgtcccccccacgtcgccgcctcttcccccgcatctcccggcccgcgcgcgcgctcgagagggcgggattcgatttcgaatccacctctctcactctccctccactccccacatcgccggccaaataggggccatccccggccacgtccgcccctccctcgcccataaaaacccttccccgagtcccctctctcgtttcacccatttcccgtcccctcccgtgcctcctaccgagctcgcgccgcttgttgctagcgccgccgcttgccgtcgccttcggccgcgcgccactgccgctagggtcgccgccgcgccaacccgccaccgccgttagcttcgccgccgcgagagctacctcggccgccgctcggttgccgccaatcgtcgccgaaacgccgcttctctcgcacgccggtgagctctccatttccacccaactccggccggccgctctagtggccgtggtcatcctccccttcaactgtttggttaatattgattaattactacaactgttttactgccttcaactactgcttttaaatgctagctttatgcaaaagaacctctagcctcctttggttatatcctgcatcatacctcctcttccggtatgacttgctgagtacagtgggtagtactcagtcttgctctcttttcccccacaccagagctgaagatcttcctagttggagctgttttgtcaaagttggtttcgtcgctgccgtcaaggattgcctgtggagtggagtcgcccgctgctgaagtcaagcttcccggtttagctcgcttttatcttttccgctgcatttgtaatcttttctatttttgtaagacgtggatctgtatgtcaacaattatcgtttgtgtaccctggctggtcctggacagggatttaatgcacattcagcttagaaattctggttcgagaatttctgggcgtgacaagttggtatcagagccgaccttgaccgtaggacaagccaactggaaaccctaagagccctctgaacccctttttcatctgcatatgcctttttgcacctggaattgttttgggaaaatttggagttttgcctctttggtttgcgggaaaaatcttggtcgttcattcggatcggattttttttaaaaaaaattagctcagtctagggctttagaaaaattttagttggagtttattcgacagtcagttgggaatttattgggagttatgcattaggtcgtgtctatattcgatgggggcaatgttatgcgcatcattttccatgcaactagtctatgtattaatttattgtttagttgcattagtgtctttatttgggttcatgaaaaatgttctatgcataaaaatcatcatgctcggttatttatttgagtcttcttttgctttgtttaatttggatttgagcatgaattggttcctatcccttgtctactttagatgtcagtcctatccctcgtttgcaagcgccgccccgagcttcagagtcgccgcccttagctttatcgccttcttagtctgtttgcttgctagttttcatgtttaggtttgttgcttgtgggctagtcggcggtcgatatcatgtgtcagtggtatgactgcctcaattaggagttgcgtgcctctttttcagtgttttaatcaagattaagataattgcacttaaattcataagcaagattagtttgagccccctgtttttcttccttttctcatatttctacctatccccttcagatggagataaggaatggttcacgcgactcgaacaacgcctgtggcagcgaagagccgatcgatggagcacgtgccaacagtgcatctggcaacagtccgtccccaccgcccgagaacccaacaattgctcaggtgttggacaatcagactcagatgatgacaatgatgatgcaacagatgcagcaacagtaccatcaggtgttgcaacaggtgcagcagcaagcacagcagcaacaacagaacctgcagttggtcctccacctcctcagtccaaactgttagaatttcttcgtgtcaagccgcccactttctcaagcaccaccaacccaatcgaggcccacgactggcttcatgccattgagaagaagctgaatcttttgcaatgcaacgagcaggagaaggttgcttttgctacacaccagctacaaggtcccgcttctatttggtgggacaactacatggtgacccgtccagctggggcagaggttacttggacagagtttcgtcatagtttcaataaagcacaggttcccgagggaattgtggcacaaaagaagagagagttccgttccctgcaacaaggaaccagaacagttatagagtatttgcatgagttcaaccgcctcgcgcgctacgcccctgaggacgtgcgtaccaatgccgagaggcaggagaagtttttgtctggtcttgatgatgaattgactaaccagttgatctctagagattatgaggactttgagaagctggtggataaggctatccgtcaggaggagcacggtaacaaaataaaccgtaagaggaaggcagctcagttcaggactccccaggggaagagtcagaagcctcgtttcacgatgggacgtcacggtggaccttccaccatgattatccgacagcaccgtccctaccacccgggtagcttcaacaagaaccaccataatggcagtcacaacaacagtgagcagcacagtctcaaccctactccgagttcactaaagattccagctcaatcagttcagccagctctgccagaacagcccaagaggttgggagaaaaacccgaactctgcttcaattgtaacaaacccggacacacggttggaaagtgcccgaagccaagacgtgctggacccaagttcgttcaggcccgtgttaatcatgcatctgcagaggaggcgcagtcagcaccagaggttatattgggcacattccccgtcaactcgacaccggcagtaatattgtttgattctggtgcaacccattcctttatttccaagcgttttgctggtgcacatgggttatctttagtgaagcttaagataccaatgcgagttaatactcctggaggtggcatgaccacaactcactactgcccatctgtgacagttgaaattcaagggttgatttttccagccaacctcattcttctcgaatccaaggacctagatgtcatacttggaatggattggttgacaaggcacagaggagtgattgattgcgccagccgcaccatcaagttaacccatgcaaaaggagaggtggtaaccttccagtctctagtgccgcggaagccagggatcagtttaaaccaggctgctggtgaagaacaagaggtagcagtggagaaaaccactaagaagctggaggatattcccatagtcagagagtatccagaagtttttccggacgatctgacaacaatgccaccaaaaagggatatcgagttccggattgacttggtacctggaactgcaccgatccacaagaggccttacagtatgggagccaacgagttggcggaagtcaagaagcaagtcgatgaacagttacagaagggatacatccgcccgagcacgtcgccttggggtgctccggttatctttgtggagaagaaagacaaaaccaagagaatgtgcgttgactaccgcgcactcaatgaggtcaccatcaagaacaagtatcctttgccaaggattgatgatctgtttgatcagttgaaaggagctactgtgttctctaagatagacctgcgatcaggctatcaccagttgaggatccgcgaagaggatattccaaagacagcattcatcactcggtacgggttgttcgaatgcacagttatgtctttcggactcactaatgcacctgccttcttcatgaatttgatgaataaggtgtttatggaatttctagacaagtttgtcgtggttttcatcgatgacatacttatctattccaagtccgaggaagaacatgagcagcatcttcagctggtacttgaaaagttaaaagagcaccaactatatgccaagttcagcaagtgcgacttctggcttaaggaagttcagtttcttggtcacatcgtgaatgctcaaggagtagctgtggatccagcaaatgtggagtcagttaccaaatggaccccaccaaggacagtcactcaggttcggagtttcttaggacttgcgggttattaccgccggttcattgagaacatctctaaaattgctaagccaatgacacagctattgaagaaggaagaaaagtttatctggtctgctgaatgcaataggagttttgaagaactcaaacgacggttggtgtctgcaccagtcttaatcctgcctgatcagacgaaagatttccaggtctattgtgatgcatctcgccaggggctaggatgtgtgttgatgcaggatggcaaagtggtttcttatgcttcacggcagttgcgtcctcatgaaggcaactacccgacgcacgatctggaattggccgcagtcgttcatgctttaaagatttggcagcactatctcatcagtaaccgttgtgaggtatatacagatcacaaaagtctaaagtacatcttcactcaagctgatttgaatctcagacagcgaagatggttggagctgatcaaggattatgatatgggaatacattatcatcccggcaaggctaatgtggttgcagatgctttgagcaggaagagctactgcaatgttgcatgggtagagcaactatgttgtgaggttcaacgcgatttggaacatctgaaccttggtatagttgagcacggattcgtggctgccctagaggcacagcccacactggtggagcaggttcgcatagctcaagcaagtgatcctgaaatagcagagctcaaaaagaacatgagagttggaaaagcccgaggttttgttgaggatgaacaaggaacaatctggatgggagaaagattgtgtgtacccgaaaacaaggaattaaaagacctgatactaaccgaggctcatcaaactcggtattccattcatcccggtagtactaagatgtaccaagacctcaaagagaagttttggtgggtcagcatgagaagggaaatagctgaattcgtagcactctgtgacgtctgtcaacgagtaaaggcagaacaccaaaggccagcaggtttgctacagccacttcagattccagaatggaagtgggaagaaatcggaatggatttcatcaccggtttgcccaggacgtcatcgaggcatgattctatttgggtagtcgttgaccgactcaccaaagtggctcacttcattccggtgcacactacctactcagggaagaaattagcagaactctatctggcaagaattatgtgtttacatggtgtacctaagaagatcgtgtctgatcgaggaagccaattcacttcaaagttctggcagaaattacaagaagaattgggaacccggttgaatttcagcactgcttaccatccacaaacagatggccagactgagcgagtcaatcaaatactagaggatatgttgagagcatgtgcgcttgactttggtggagcatgggacaaaagcttaccgtatgctgagttctcgtacaacaacagttaccaagctagtctgcagatggcaccatttgaagcactgtatggacgaaggtgtcgtactccgctcttctgggatcagacagggtgacggagctcgtggctcctcaccgggagaccgcgcaggcccccctttgccagtccggccgggggcttagggtgaaatctcaagctctcgctctccctctgtatgtggaaagatcacccgcctcgcaagaaacgtgagacaccggcgatgtatacaggttcgggccgctgccaagcgtaataccctactcctgtgtttttgtggatttgtgtatggacgagttacaaaggattaactccctttcccctcagccttccaaaagggaagaagtcaaaaaaagagcccccttctaaatgggcaaggtcctccttttatatctcaaggggataccacatgccctctctctttccaaactggactgttctttttctctttaatgggcggagatcggtacggtttccatccgggaacccttctgatgggacagcccacacctacctccactcccggcggagacaggcgcaacgtgagatcgtggctacccgttgctgacgcgaccagtgccagaccggtcattcttgtccaccacgcgtcagtttaacaacgtgcatgtttgcccttcttcgtgtaacaccttgcctgtaatggttaggatgaagcctggtataaatctgaccagggctaacgtgccatctctaagagataacacgctagctccggcttgagacgagagcctagaggctttcgtcttgacgggatggggcaaggcgtgcgtcagaccgccagtcgccacctaacccgtgatctgactggtctgtgactggtcacagaccggataaaggaacgcgctgtactgcgttgcatgcagcgtgacacgcttgaccagactgcaataaatgctgttaggtgagcacagctgtgctcacttatcccatatatgtggcgcagacttccttaaggggtcggggtgcctcggccctcggggccggggcaagcgcaacccgaccccccccccctcgggggaaatcaggaggagggcggacacctcaccctcgggcccgacgtccccgaaggtgccaggccacgtgggcgattgcgtctgcctcaagcctctggtcacgatactcccggtcccatatcaccgacagtagcccccggcgttatgccagagcaatttcccttcccaagggaagcggtcaggtgtgacgccacccctaaagcctggtgacaggtgggaccggtctccgtagttgggcaaaatacccaacggtctcaatccatgcacattggtattggtaactttggttgttcataatgggcggtctattcaagactgccacaccacttgagcagcgcgcgaatctgggtgagcagatttgtctcgcccggagatatggtaacgccgcttcggtcggcgagcgtaattaacgcgcgcacgatacaatccatttcgattgccacaactgcatatccacttcatgcgccgcaagcgggcgaatgggattagtggaagcgtgggcacgggaaacgagggagcgagatagcgagatacgagggagcgaggtagtgggcgcgagaaacgaggagccaggcccagcgatggcaagggtataaaagcatcgagaaaaggatttgctcccttcctttcgccattgttcctcttgccttcgccgcctgagctctaactctttctctgctacgccctactttcgccacacgcgctcgttctcaatcatctcttcctccaccgccatggcacggggcgctgctctgctcgacggcagtgtactaccgccttcccgcatcgtgaacgagaggcacgccggactgccgcgccgcttcatgccggagtccgccaccggtcgggagatagtgatgctgggcgaggggcgcccggcaccagactacccggggcggtccatcttcttcctccccttcgcaatggctgggctggtcccgccattttcttctttcttcatggatgtcctggagttctacgatctccagatggcgcacctcacccccaatgcggtgatgacattggccatcttcgcgcatctgtgcgagatgttcatcggggtgcgcccctctcttcagctgttccggtggttcttcaccgtgcagtcggtgtcaccgccgtcggtggttggcggctgctacttccagccgcgggggccggtgttgaaccgctacatcccctgcgtccttcgcaagaagtgggacgactggaagagcgactggttctacacccccctcgccaacgaagcgcgcctccgacttccaagccagcccccggcgcaggtctccagctggcgggcaccggtagatctgggggaggactacgacgccgtcctcgaccgcctggcgggcctgcgatcccaggggctcaccggggccatggtgtacggcnattaccntncgtcgncggattgcgcggctcaacggcgcgcccggagcgcctgggagtacactgggcctggagactacatgcggaccccccagggagccagatgggattgggcccccgaggacttcaagatcgtggtccaaagggtgctgaatcttagctccgcggaggcgtctcgcattcctcaggagatcctccccctctgcagcgatcccgaccgcgcctccattctaaccattatgatgggggtcggggcctcagaggagagagcccctaagggccacgacggcgcgggcgagcgccgccgaggggaacaatctgccccaggagggggtcgtgcttctgggccccgcgccgggggctcggggagcagccgccctgccgacgcccaggggaagaggaagctgggaggaacacctcccccatctcctccccgagggggcggggcggcgcgtgccagcagtcggcgcccggagggggccgcgccgacgtcgcagcccgagggggagcgcaagaagaaacggctccgcaagacgggggagacggaaccatgccgggggaacctgatttctcctccaaggtggtcattcaaccgaccccctcgcaggttcgtctcactctcattgcaaccacctttctcccaaagagaagttttttcttactcattttgttcgtcttttggttttttcttctgcttcagcgatgtcccgtcgcattcctcccgccaccccaaatccggccagtccgaggccgaagatccagcggccgcagaggagcggaggcgagagtctgaccggcgtgaagccgcagcccgccttcgggaagctgaagaggccgcccgggaggccgcccgggttcgccaagcggaggaagctgctcgggaggaggccgcccgggctcgccaagccgaagaagctgcccgggaggaggccgcccgggctcgccaggctgaggcgacagctgctgctggcgcgtcacttgggcctactccctcgggcggccctcaggcgacatcctccgaggcggctcgcgacgaggccgcgggcgcatcgcctgggcctacctcaccgggcgacgcccaggaccaaacgggcccgggggacatccccgagcccagcgcatcctccgggggcccaaggcggctcttctcctcatcttctgtcgccccgctgagcgccgagccccttctgcaggccctggccgccgcaaacaccgcagtgctggatgggttcaacacccaagtggaggccctgcgtgcagaacgagcggagctcgaggccgcatgggcgcgtgttgaggaggggcggcgctcggtggacgccatggtggaggtgggccgtaaggctcaccgccgtcatgtctcggagcttgaagcccggaaagcggcgctggcggagatcgcccgtgaggtggaggaggagcgggcggccgccctcatctctaccaccgcgatgatcgaggcgcaagacactctccgccttcagcacgcaagctgggaggcggagctgaagaaaaagctcgacgccgcccaaggggtccttgactccgccgctgcccgagagcggcgggtaacggagactgaagcggcgtttcggcggcgcgaggaggcccttgaggcccgtgccatggcgctggaagaacacgccggcgccgtggagaggggcttgacggaccgcgaggccgccgctggtctccgagaggcgacgctggcggcgcatgaggccgcctgcgccgaggaggagtgcgcgctccgcctccgcgaggacgcactcgctgagcgggagcgagctctcgaggaggctgaggccacgaccaaacggctggcggacagcctgtcccttcgcgaggcggcgcaggaggagcaggcgcgccgcaatctcgaatgcgtccgcgccgagagagccgcactggagcagcgggctgctgacctcgaggcgcgggaaaaggagctggacgcaagggcgcctatcggcggggcggccgcgggcgaaagcgacttagccgcccgcctcgcagctgccgaacacaccgtcgcggaaatgcagcgagcgctggactcctccaccggggaggccgaggcccttcgcttggcgggcgagattgggcccgacatgctttgggatgcggtctcccgcatgaagcgcgccggtcggcaagcaggcctctggagaggccagacgacggtgccccccaccaatctggaaggcctcgctccgcacctcaacaggatggcctgggtcctcgaacgactccccgaggagctcgagaagaccatcaagtcatcctcgagggacctcgcccggggggcggttgaactcgtgctagcgagttaccaggcccgggaccccaatttctctccctggatggcgctggaggagttccctcccgggaccgaggacgacgcgcgcgcgcgtgtcgaggatgctgctgaccacatcgtcaacggcttcgagggctcggcccctcggctcgcgttcgcccccagctctgacgaggagggcgacgccagcggcgaggacgacggtggcgacgaggccggcgacccgggcgcatttgaatgagcccccaggcccccgccaatcttaacttttttcttattctttcttctaaggccttcatgcctcttttttgtacaatttaacttaatctgcaatgagaaatgatgaaaaaatttttgtgttagttttattttgctatatatgagatgaggatgatctgtgccgtggtctttttgcgtcttagcttgaaataagggcccgtgcccaagtcccagtcctcgaaaagcgcgggtcggggctagtgcctggggagatccacatgtcgagactggccaggccgggaacgtggtgaccgagggttatgggtgacccgattgtgggtttttgccgattcccccccggagttcaccacgccccggggcacggctcggttctgggccccgtttggcgattttagctgaccgaaccgagcccccgagggcaaggttgagtacgagtgaccttattttaagtcaagattcttcaaaaggaaaaaacggcacagacacaacctttagaaaattgaaactgcttttattgaaatgctgaaataaaggaaaaagggatatatgtgcatgtgtggtagcccccggccaatcctgcacacccgaggggggtgcggggttggcctgagccaaaacctgacacccgacccccccccctcctcaggggtagaagcgacgaaggtgttcgatgttccatgggttaggcagctccgtgccgtcgcccgtggccagccgtaccgagcccggccgggggacaccgatcactcgatacggaccctcccacattggtgagagtttgctcaatccagcacgcgtttggacgcggcgtaggacgaggtcgtcgacgcagagtgatcgggcccggacgtggcgctgatggtagcgccgcaagctctgctggtagcgcgcggctcggagggccgcgcgccgccttcgcttttttaagtagtcgaggtcatctctgcgaagctgatcttgatcagcctcgcagtacatggtggcccgaggagacctcagggtgagctcggatgggagaaccgcttctgcgccgtagacgaggaagaaaggcgtttccccggtcgctcggcttggtgtggttcggtttgcccagagcaccgctggcaactcctcgatccatgaatcgccgtgcttcttgagaatattgaaggtcttggttttaaggcctttgaggatttctgcattggcgcgctccacttggccattgcttctggggtgggcaggtgaggcgaagcagagcttgatgcccatgtcttcgcagtagtcgccgaagagttcactagtgaattgggtgccattatccgtaataatacggttaggcactccaaaacgggccgtgatgcccttaatgaatttaagagcagagtgcttatcgatcttgataaccggataagcctcgggccacttagtgaacttgtcgatcgcaacatacagatactcaaacccgcccggggcccgtttgaacggtcccaggatatcaagcccccagacagcaaatggccatgacagtggtatgatctgcagggcctgggccggctgatggatttgcttggcgtggaactgacacgctctgcatcgccggaccagatcgactgcatcattgagagctgtcggccaataaaatccttgacgaaaggccttgccaaccagggtgcgcgaggcggaatgggctccgcattcgccttcatggatatcggcaagaagctcaacgccttgttcctgaggaatgcatttcaggaggattccgttagccgcgcgccgatagagggtcccttctaccagcacgtagcgtttggaaatgcgttgtacacgttcactcccttcgcggtcctcgggtagagtcttatctgtgaggtatgtttggatctcagagatccaagcaatcaatctaagggagcttggagcgctcccttcgggtcccgaggcctggactccgacgggcctcgggggccggtcaggcgcatccgtctcccctaaggggtcgggtcgcgccgacggctgggtaagcctttcttcaaaggcgcccggtggggtctgggctcgcgaggacgcgagccttgagagttcatcggcaactatgttatcccttctgggtacatgccgaagttctatcccatcgaaatggcgctccatacgccgcacttggcgtacgtaggcgtccatctgtgggtcagagcaccggtactccttacagacctggttaacgactagctgggagtcgcctaataccaagaggcggcggatccccagtccagctgccactctgagtccggcaaggagtccctcgtactctgccatattgttagtcgctcgaaagtcgagacggaccaagtatctgaggacgtctccgttcggagaggtcaacgtgacccccgcaccggcaccctggagggacagagaaccatcgaactgcatcacccagtaggtggtgtgaggcagctgcgaggggttcgtgctggcctcggggattgagacggtctctggagccggggtccactctgccacaaaatcggcgagggcctggctcttgatagcgtggcgtggttcaaagtgcaggtcgaattcagaaagctcgattgcccattttaccacccgtcgtgtaccctctcgattatgcaagatttgcccgagggggtaagacgtaaccacagtgacccgaatagcgtaaagcatcttctgggcctgagggtatcgggttttggcgtcccgaaggg

SEQ ID NO: 4632 - DNA, 6269 bp, Oryza sativa
atagaatttcgtttgaaaatcctagattccaaacagggcctacatggaccagccagtatgttagtcccagttttggcagttgcaagaagtgtatgcaagaaattttctgttacttggaaaacttatgttccatgtatagacattggttgctgctagaaagcccctacattatcttgaaaaggtaaaaagctataaatttagcacatctattttctattatatttatatactaaaagtcgattaaacctcctacaaacgctcataagacgcatgtggcatcttacaaacgcccctaagacttcccagtatacacctaggaagcctagcaggttaacgcacaagttcttagtgaggtgcatcacgtcgattgcatggcagacctataagacatcccaatagggtaactcctaaaaaatagacttcttcttccacatcgccacatgaccatcttcacttgctataggttggctgccggatcacttttccaaatactattgtcagatctttcaccatagcaaacacgatttttccgttacgatatttaggcttagtatggtggtctgccttatcttcaaaatacgtactgtcagtatcatccatacagtgggtgtaagccttatactccttgtttgattgtcaatcgttaatggttatgaacagcaatactcgtaggttaaattgctcatatttgtcctcattccacacaatgacaactttttttctttcataacagtttcagatcttcaaccaatggttttaagtacacatcaatgtctttactaggttattttgggccttgaataataatcggcatcatgatgtacttccgcttcatgcataactaaggggaaaggttttagatacacatggtcacaggccaagtgcaatgaccgctgcgcatctctccaaatggatgcattctatccgtacttaaacaaaaccttatgtgtcagggttacagataaggcatacctcctatcctacgacttatgaaatatatcgataaggtataccttcgcgcatacggattgttcccgtaaatgtcacgtggaaaccacttcgaattatggaaaatatctctacgagtcaagtgatttccaaagtcctactcggaagggatagattttctgtaataccatactaggtccgatatcgtcaaacctttcttggggatcaagatgatccacggtataaaagggaccccctgggaagggttcaagacatcgaattcaatcgccaacacacccaccaacgcttacgaagccagattatgcggagccaaatcatcgggagatttcgtcgaacccctcgactacgatctcgtcgataccctctatttcgactagtatctttgtcatctgttctcatcataatcaatctcatataaactggactagggctataacctgataaggggcctgaactagtataaactttgtcttttgtctgcttgatgtcgaactacgtagaccctcgttccaacataccccaatactctactcatccggtccgcgagtatcactcgtcgacagtggcgcgccaggtagggggacttggtgctcaaggatctaccggtatgacttcaaggctccccgacaacagttccaacactggcgtcgatcaaggaatccctgcctcgagatcgctggtgtggaatcaagtcggatccatcgtcttttcggtctatatcgtcacaccgatctcgactggcccaaacactatcgggaacgagagaggcatggttacgactccgagaaacgatgccccgccgacaattcctcccactcaagtggagaacggaacatcgacggtcccaacacttgggaaaaatcctcaaatggccgaatttcgtcccttgtacaaaaaccagagctgacaaggaatactacctaaaagctgacatccaagtatattctcgaggattgcccggtgatactccacgtgaaagctgaactctacgcctgctaggagtgtgggattcaacgcacttcaccgacaggagtcacataacgcccaattcacaaatctaggtctcacgaccttacaagttgcaggatctttctcacaactttgagaccaccgcatcatcgtgtccaacaactgcgagttcaaactccatgtgctcccagggacccagatgcgatgacgacatcagatcggttcgtaggatatgtcgaagctaatccgaatgaaccatttgtgctacacctcctggaagactacgagtcctattcggagtcaccacgggatgtaaacgtggttgacaacactgaaacaagcgcgtccacagcagcgagaacactcactcagcagctacgaaccttagatgcgatattgagtgaaagtcctttcgacccggtcacgaaccccgacgtcaaccaatgggctatgcggctgcgagagacaatgactaacctcaatgtcgcatttgccgaagcagctgtcaacccggagcagcatgaggacggaggaccaaccgcaggagatgcaaacggagaaaatcccaacgggacacgtccctccggtgaccactcaccccgaggaagacgagatcctactccaccgcgtcccgcgaaccgcgatcttcgcgatcatttggactatcggcggagggacaggagagatcgcgacaacaaccggtgtcgttctccttcacgccgtggcgataacaccgccgcccaacgacatcgccaccacactcctccgcggcagagaagggacgacagtcgaggaggcgccccaaatgaagatcaggatcgacgggcccacagcggccaccgcaatgacgctaataatgacaaccggcgagatcagggagctaatcgccgagatcaggagcaaaactgtggcaaccgacgagatcgaaactcccgatctcccgctctcggtcgagatcgaggacgagatcatcgttcgagaagccgggctcccgaacccagcaacccctcatcgtcgtcatcatcatcatcagaccagcctcctcgattacgtcaacatcgcgggccaccttttgctataaggcacagatgcagggcattcacgctcgaacttcgagatgtgcggtggcccgagaagttccgaccaggtgcaatagagaagtacgatgtaagcacagatccgaaagaatttctgcaagtctactccacaatcctatatgccgctagcgcagacaacaacatgctggcaaattacttgccagctgcgttgaagggatctactcgttcatggctggtccatctcccgtcccgctcgatctcatcatcggaagacttgtggcagcagttcgtcgccaacttccagggaacctacaaacgccacgcaatcgaggacgacctacacgctttaactcagaaccaaggtgaatcgtcgagggactatattcggcgcttcaatgagtgcaagaatatgatccccgagatcaccgatgcttctgttatccgcgcgttcaaatcaggtgtccgagatcgatacaccacccaggagctggcgacacgacgaatcacgtctgcccaaaagttgttcgagatcatcgacagatgcgctcatgcagatgatgcattaagacgcgaagagggaaagagcaagacgagcgaagagaagaggtcgagtaacaaggatgcaccagaatcaagcaagaagagaagtcgtaaaagtgggaagcgcaaaccctcgggagaagtccttgccgctgagcaaacggacatggttgagcagtgcagtgtgacaagcggagcctcgacattgttctactcaaaatgccaggaccaaaagggacaatcactatccagggcaatgctaaattggcagtgcagtgtgacaagcggagcctcgacatggttgagcatactcccaacccacccaccacaaccgagcagcccaagaaagtgagcaaacccagcaaaaagtcaaagccagacggtgctatcaagataatcccgttgtctagctccaaccccgacaagatggtcaggataggggctacactgggtgacaaataggaactcgcgctcatcgccttccttcgcgacaatgcaaatgtgtccgcttggcaaccgtacgacacgccgggagttcccagggaggtgattgagcacaaattgatggtgcgacccgacgccaagccagttaaacaaaaactgagaagattcgcacccgactgaaaacaggccatacgagaagagctcgacaaacctctcaaagctggcttcatcagagaggttctccaccccgagtagctcaccattgcagtaatggtacgcaaggccaatgggaagtggagaatgtgcgtcgacttcaccgatctcaacaaggcgtgccccaagggccatttccctcttcctcgaatagaccaactcgtggactcaacagcaggatgcgagttgttaagcttccttgacgcttactccggctaccaccagatcagcatggccaaagaggatgaggagaaaacaacattcatcacgcccttcggtgtattctgctataccatgatgccattcggattaataagcgtagggaacacatatcagcgtggaatccaaggtgcacttggcagtcagcttggataaaacgtcgatgcctatgttgacgatatcatcgttaagaccaagacaggcgatccactaatcgacgacctgagggaaacgttcaacaatctctgcagatatcgtatgaagctaaacccggagaagtgcacgttcggagtatcatcggggaggctactcggcttccttgtctcaggacaagggatcgaggccaaccccgagaaggtcaaggcaatcgagaacatgaagttgcccacaaggctcaaggaagttcagcggttgatgggatgcatggcttcgctaagccgcttcgtcgcaaggatgggagaacaaggacaagctttcttcgccgtactcaagaagcaggaaaaattcaagtggacccaagcggccaagaacgcgttcatcatgctcaaacgctacttgtcaaacccactgtactcggttctcctcaaattaatgaagaattatttctatatatcgctgctacaccttattctgtgagtacggttatcgtcgtagagagggaaaaagtacaacaccctgtgtactacgtcagcgaggccctccacaaaaattagatatccacggttacagaaactgctctacgtcgtggtcatgacatcaagaaagctacgccactacttccaagctcacaaggtcatggtcgtctcctctttccctttaggggaagttgtcagaaacaaagacgtcgtcggccgcattgctaaatgggtagtcgatttaagccagttttatgtacagtttgtaccaaggacagccaagtcttagctgacttcgtagccgactggactgtcttagctgacttcgtagccgactggactatccccgaagatagaccggccagccaaatagataatgagacttgaactatggcgttcgacggcacactcaacagccaaggagcgggagccgggttcatcttgacatctccttccggagatcaattcaaccatgcaatccacctcaacttccgggcaacaaacaacacggtcgagtacgaaggcctactcgcgggaataagagcagcagctgcactcggtgctaagcgactaatcgtaaaaggagattctgagttagttgcaaaccaagtacacaaagactacaagtgctctaaccccgagttagccaaatacctcgccgaagttcgaaaaatggaacataggttcgacgggatcgaagtacgacacgtctacagaaaagacaatgtcgaaccagacaacctcgcacgccgcgcttccagacgagaaccacttgagcccggaacattcctggacatcttgacaaaaccctcagtcaagaatacgcacgacgaaagtaccacaaccaacaccgacatcccgccgggggctacaaaagtcgcatacgttgttgcaaacatcaagacaacaaacgacttgcgtactccgctaataaaattcctggaatcagacgagctgtcggatgacgacacggaggcagagaaattatcccgtcaggccaagatatactgcatgatcggcagagatctatacaaaaaggccccgaactgcatcctcctcaagtgcgtctcatccgatggtggaaaaactctcttccttgacatccacgaaggcatttgcggatcacacgccagcggacgtaccttggtcggcaaagcctttagacaagggtttttctaaccaacagccttaaaagacgcctgtgacattgtgcaatgatttg

SEQ ID NO: 4633 - DNA, 5722 bp, Oryza sativa
agttttagtaccggaaggagtaattacttagtaattagcagcggtgttttcagtctgtatgtggtcagataggagccataatcagatagaatttttcaaggagttgattcttgcatagtggcaccactgccagacaaatttgcgaatgtgtaatacaaatttggtgttgtagtggttgaaaatagagtttttgcaatacacatactcaatgtagtaatatttgtctgggctctaaaagttttttagctctgccagtgcctgtatatgcggttttttgcacgtagaagtgcttgtggagctaagatagctctgctggattgtgccacctggaatgtttgccaataaccaatttttgccctttgtgatcaaaaaatatgtggtagtcatagttgctttctagaacttgactggtacgctagtacagccaccattttcctgatgcctccaattcataccacactctcgagacatagccaggctgtctggaattcttgtatcctctatagcaaaattcgagctcgatttctatattaaaattcccagatcaatttattcatgtgtgggtgcctactttgtttctaccactacagtactatcagttctattgtgatgaagagtaggagtgacattctctttttctttacttgcaaaataagtatctcgaggtacctaaattttacactattttttctacctcgagatagtatttgaaggtaccaattttacagtagaaaatctctcagtactttctcaagaatgggtaatactcattggtcaaaagatgcggtgataaatatataaggatgtttatttacaatctctgcatcgtgcccatacttctcaacgcaaggaacataaatagtttcaataaatgaaagaaaatatataattattagacagcaggacagacaaggtggtgaataagtgtgaaaatcattgatgctgagagtggaaggtgagtattgttatgtaaatgttaataattcaaacaaaatctgtttgcaaagtgcaaaactgatggatgctgaagaccaagcagagcttctgctctccaactctccgttcctgaagaaggaaacatgcaagaactttgtagttcctccctcagaaatagtagaagtgaaacttgtagttacatctttcatggcagataggctttctttagcttgtgatatactaccagatgattcatatgcgcttcatgcatctcaactcaactcagctgcgcatttgctttccttattattatgttgtctctgaatctttctgtattacctgaatagagcaatgcaaatcgtcagcatttctaaagttcaaggagaacacaagttttattttatcctcttgaacaagggtgtagggatgtttttgcacaacacgaattaataataacataagctagcttgaaatctgtagtcaacagacctcctaattaattaaaacacaggcttccgtcacacaatcacaacagtgtgcagaacaacaatcaaatttgtgctgggccaaagaatcattgagatttgtgcaactgcctatcattgagtcattggcagtggtcttgtggtgcccatagaagttcatgcagagctcgatcctttgtgacgtacaggccataccacctagaatttcttcctacaagaaatgttccatcttgtcaccgagctagtggttgtgttcgtaggtgatttcatagaacatgaattgtatgctagtacagccaccattttcctaatgcctctcattcatatcagatatgacacacttgaatcataacggaactctttcggaattattataacggaactcctctattataatccccacgcagctccatcgtttttccttgtgtggtttttgctagtttacttctaccaatactggtatattgtgatgagagtaagagtggcattcattgtctctcgcttttaccagtaaagtacagctcattggtccaaagatgggttgatcacttgctgtgatattaattgtgcttaaaaataaggacaaaggactgaacaaacaagatttgtcacaactcacaagaaaggaaagacgaaggaacatccctttggaacattgttttccatgatgtgcgaaaaaggaaacaaaaaactacatcgtttgcacaattaagatgatcgataccaggcagtgcaagagacctattaattattacaaattattcactacaaaacctgaacaagctttgggtggttttccaacatatatagaactcatacaagcacaaggcatcatgtgcacaggaccccatggacatactctgccaccatcctagtgatccatgacccttggcaaatgaggttacctcaaccaactaattacttggctacgggtgttccaatatgcacgtggtcacaaggtaaccatgcttagatggaagtacctaaggagttcgtctgccactgcccggcaaccccaggaagtgtcccaggcttgtcctagaatgtgtaatagaaatttggttttacgcagtgattgaaagtaaacacggaatatccttagatgtgactacgaaattagggataggcgtaactccgtattatgatcttctacaaaccacttttcatttcaagcataccaacaccacaaggtgggttttaacatggcttcacaggcccattttctccagttttgatagtacaatagtgtaaataggactatcaatacctaacctaaaacggtatgtataccatggaggacttatcagtttggcatgcaaaaccgagggccgccgagcctcatgagcccggatcctctgcagccgggcctcgagaacctctcttattcgtcacgatcatcctaatcgtagcaggaagctcttggctgtcctcattgtctcgaccggcctccgccctccctcactaacgccgatggtgttcttcggcttcttttccaagacgctggccgaagaagttgaagaggatgccatcaatgtccttggctgaattgtttcgtgaatttgacaaatcttgtttgggtttgtcctggtgaaattgtatttgaatttctgaattggaggatattttgatcttggttttcattcttttttaagccatttttttcaagcagttgacttaatagtgtcacctgcaaaaatcaattttcataagcggggttcttagggtggccgcctaagaaaatcaaatgaatgtcttgtagatttttggagtgtgtagtttgatcgtaggtgaagtttgggccgccttcgaaaacatgttttggtcacctacaataacgtattccggagtagtgtcatagaaccacacacaagaacaagatttcatgaatacatcatttttgtatctgtctctaggatctagatcctctatttaaggatcacttttcctttttatagataaatgtagctttaatgaactcaaccaattacatcaagataatgcaatcatactgagaacatatagtaagatgcatataaccaaacacacgcagtctcaactttatataaaaaaggagtgcaagaagtattatagaccatcaatcctaagactgcaatgccagccatgtccctagcgaggtaaaatactctttcaccaccaactccgagcgtacacatgccgcaacaaccaaatcatgcgaaacaggcttttgtagcacaacccaaatacacagctaatggatagttgagaaaatatcctgcaaagaagaggaaacaaattttctatcaaaaaccacatcattcttgcataaccatgtcaaccaacaagtagcaaccactcctaaaagaccatatcttctgaaatccttgtgaacatttcaaagccacctagtaacacatatgcgaaacactatgggggtggagggattgctagctcgacatgtataatataacaaacgaaatgggctaaatggcattcaaataataaatgtcttattgtctcattattctgacaaaaataacaattttgtttaccatgttagttatgtttagctagattatcctagttaaaacaactccctgtcgtaaatatcaaaggaaaatctttactttaagatatacttttaaattccagagacatatatttaaattaggcacatcactatggagtagtgctagacaatagtatttcatcgtgaactccccattagtagtcgagctccatttaaaattatcttgcccctgttttagttatacagtagcaaggagtcataataaactattctaggccactaatttcaaaccaattatgttccttctccatgaaaaaattggagggtcacttttcctgcaacatgtaaaaaatactatatcgaattaatgtaatactttgatctaagtggttcattccagatctaacggttaaaaatgccagaaaatgcacaatactatttatctttgccatagcaatcagggaaagacccttcttatattgaacactctttactttgggtacctcaactacgacgtaagggctatctatattggacactcttattggtttctactctagcctaagcattgacattgctgatgattggatagtggggaatgttagaccgtattgttgttaaagagattcaaggatatgactgatcttgtatcacattccttctttttcatctctatcttctactctatataaaccacataccatgtcttgacatatacatcattcatcatttgtagtacatctcttccctctcgtacaagtgttcaacgttgagttcagttgtttttccagtgccattgctgcacatctccaaccatggatggcctgctagcaatatagtagtgttagattgcctggaatggctgttgcagtcagttaaagaagaagagggggaaggactgaacacacgtagtacttggtgcgctgtgagccgctccttaggatcccggacaaggaccttccgaagcaggtccttggcaccttccgacacatttgtccacggatccgcgtcaaattctagcatgccatgcagcaccttgtcaaataccccctgctttgtatctgtgaaaatacggcggtaacaagcaattttgtgtcatagttcaagatacatgctggaaaccaagtgaaaagtggtgtgtcaatagtgtgtgcctaccagcccagaatggtggtacgccacaaaggaggatgtagatgatgacgccagcgctccacacatcagcttgctgcccataattccctctcaacacctctggtgccacgtaatacatgctcccaaccacgtcagtgaacgtctcgcctgaacgactaacacaatgcagttcttcgatggtgaaggtgtcataactgattgattgatttaacttggccgaagaatatggagaggccaaagtcaatgagtttgagtggcgcatcctcctcgttgctaacgaagaggaagttctcgggcttgaggtcgcgatgcatgacaccgagagagtggcaagactcgatgacagagacgatgatgcgggcaacctcagcagcctgcctctctgtgtaatatcccttgctgatgatgcggtcgaatagctcaccgccagtgcagagctccataacaatgtgcaccgccatggcatcctcgtagctgccccggatggagatgatgtttggatggccagcaaggtggtgcatgatcctgatctcgcggcggatgaactccacgtcgtcatcaatgacgagcttctgctttgcgatcgacttgcacgcatactcctttctggttgccttgtccacgcacaagtatgttg

SEQ ID NO: 4634 - DNA, 6423 bp, Oryza sativa
aatatcttcccaaccgtaagttcgtttgactccgttcaacttccaaaattcctcaaatctcgagatctatctaatggcacgcttagaggtcaataatagggctttattctcgccgtttgctgagttgtcccgtttcgcgtgtagtttcggagcccgaagaccagcagtgcgaggatttcgaggatcaagctcaagatctcgagcgaggcaagccacctttgaacatcttgagcctatatttgaacttaattatgttgcttgaaaaatattatgcattgataggatcgcacttagtctgcttgtcccgtctgcaaggcagattggcagacctacctaacttgttgcatttgacccttccattgtaattgttataccatgttcccttgtacccacctagttgcgcctcggtaatcgtgcactctgcactggtatcgacggtcgccctcaaacttaaaatctgagaaacatcttgggtaaaacttgggttttacaaaagacttggaaaacccgacacctgggtcggtgcttgcgaactaaatgaatttccaaaaccgcggaccggggaacgtaccgggtgtacagtttcccgctcttgcacttaaggaccgtttccttggaatttcatccgaacataagacaagtacgaccacatgggtggaatgggacacccctggctgagtaactagcttatcgggggagccatgatgctaagagacatgtggattcgccggggtggtgtcggggaggacccctgggcttcctggcacagtatggtctgggacctaatctggtgttggtctgggacccctctcgttggcatatggtgaacctgtgtcggctttcgaaatgccttgtcatgaaagccttaaggtctctagtcgtagccgttctgcacgggctggatgatccgggttagtaatgtcgtgtgggtaaagtgtaccccctctgcagaggttattaaaactgttcgaacagccgtgcccacggtcatgggcggatgtgaggtgattcctagcgtagttttgtttgactactgccttgtgaaatttgctgttgtggaatgggtttgatgtttgaaaaatctgcggctgatgggatcagccaggcccgggtggccgtttgaaagctgttggccgggtgccaatcttgatcaattcaaaagactgatacattgcacatactccgaccggacgagacgcactgtctcatccgtgttgtttgagaagcactcccttagttgtttcagaaaagagtttaaataaaatcaatcgaaaaaaaaatagcagcctttccttgaagcctgcattaaacacttatttcccatggcttgctgagtactcctgtactcacccttgctctatataaataatcccccctagttgctgaagaagatgaagcggatcccgctgacgaggagttcttccaggagcaagccggctacgatgagttttagggtttcggcctagttcccaagtcgcgcctgtgatgtttggtccaagtcttggcttccgcttcccttttgtaatgcagttgtgagctcgggatctgtccgcagcccaacatgactgtactcctactctataataaagagacctctgttcctgtgatactagcactgtttcctgggactggtatcgattaacaggttaatttggagcgtcacgggctagttccggtcgggactagttcggggcgtgacaattaacatatgtatatggcaatagtggttatatcatactttaagagaaaatcacattaacaggatatttatgagaaacttagaatgcttaagtaaatagctacacatactgatggatctgttcaactaacaaccatagtttaaaggtattcggcatatgttgcaaggcatctgtataaagcttaccaatagaactctaattggaaaaataaaccaacgggtaacagatccagagaaacatcaccccagaccgaaggaaaattactataagagcagaaagcatgctcatagcacaccaattatattgctcacagaacagaattcatgtgaatgctatcattatgttgcttgtaatacaatggtggatagtaaaatcatcaataatttagtttaccaaagatctattaaggaccgcaagaggtggacacaaaaaaagcttacgatactttggctgaaccctttctaatcctgtaatttaaggtgtacctgacattaaaaatgcagcaactttcagtcatataaatggtgaaaataattaagctgtagttccactcttaattactgaaatactaaaattatatgttaaaatacttcagttgcttcaattagtagctgtggtatgagacaatacacattaatagtggccggctctcttgtaagcattctatcgtcatagtatacaagcttattacattttctcatactattatagtagtgtgagatgcagttatgcttggagctagctaccatcaatttaacgacaaaggtcccaagtatgtaaatcctcttctagtagaacatatgctgtggccattgcttcccatgtggccatccttagctgcatcgagccctctaacaattgtagacaaacctaagtttaggaaaaagaaattcgctaaaacaattctctgcataccatgaaaatatgattggcttcagatgtagcaaatctgccatcataattttctagagatgatattagcccatatctacatatctgaaagagctaaagaacaaaaatatggccggagcaaagaacagctcaggaagagacatgtctcgtacggcagaagcaactatgatggcatagaaaaaaaggtctgttcaagtacaaaattttagcccatttgaaagtctacatgtactacttttgttgctacccttcacacaaaagatatgctgctgatagaatgtaaaaagaaactatgcccatttccttgtttccaacacaatcttctagaaaacatagcaatataaaatgggggcaccaggagtagggagaaaaagaaagtatgtttacctcacattagtattccttagcctttcacccatcctttgctggtgtcatccactaatccctatgcatgtctgtagtaacagcaacattttttttgtgaaagctaccattgtttatcacttactgcaaataatagtggaaataattcatcttacctcgtataagcaggcagcatcctgttctcttgaaacaaaaagcatctactggcagaaaaaactgggggtttgttcagctagcataaaaaattgggggctctgtgggtatatccttgagcaggaaaacttaccagtagatctagggtgcatccactgaaaatcgaaaaggaaaatcaagaacagtgaagaatgttgtggattcatagaaaaagaacagtacaagagagaaacttaccctaataatgaagtaattggggattttgatgcagtagcttcaacctcgaacagggatttggttgctggagttgccggagctggtggaggctgcaactttggatctggactgagagatctggatagagaggcaggggagatagttagtgggcgcggtggagggcacgatgatgccggagatagggtgggagggtgaccggagattctagtggagagaatccatggtggttgatttgggggattaatggtggtgaatctgggggaaggaggcagtggaaagggggtgaggagaaagaagaggggtctgctggcagctgaatgggtatctgtcctcagctcctcagtcctcactagtcttgagcctgaccggtcaaagcacaccacaattattctcgcgcgctcgtcccgaaatttttttggcgcggcagcaaaattattggcgcggtccctggaagcctcgcgggaagcctcgcgggaacccaaacttttcttctgacggacaaaccacgtcagcgaaattcatttatcatgacggttccgataaacacgtcagggaaatagaatatttctgacagttttacaccacgtcaggaaaattcgtctagtcctgacggctgaataaaatcacgtcactaaaatattagcccgtcagagctagttgagtttctggtagtgcggtgaggaaagagttgaactggtatatgtgttattgaagatgtgacttcctgctatgtaccacaaggttgctaggtgtttttttctgccattaccctcggagaaaatattttatttccaaacggtaattactaccatattttcgtggtagtcttttcatttattcatgtaattaattaggacaataatgcaggtgcaactgccttaatttgtcccatatatcgaataaaggttcccaaaaatggcatctggtaatatcaccactaattttctaatactgaaattgaaggctcgacacttggctcgatgcttggattcaacgttatatataaatataaggccatttccaacccaataactaggatagtgtctatagcattaaataagctgtcacataggatgaaaactgatgtggcaagtgaataaatgaggaaagagaagaaaactatgtcttacatgagacatggtttctacacaacatccaagacattatgtgagataagtagcattaaatttaagtatgaaatagtagtgtttgcattggaagagtagtgtctaatactagtttcttgataatgtggagtttatggaaactatgtctagtgttttgggttgggaatggcctaagctcgctatacattggtaaaactctgtctctgatgaacaatatatggccctcataacaagtacttccgggggagcgcgtatgtgatctaactaaacaggtatataatagtccacgggaactggtgactttccaggaaaacttaaaaggaaaaactaagaaatatactccctccctccgtattttaatgtatgacgccgttgactttttaatcaacgtttgaccattcgtcttattcaatatttttttaaaatataaaaatatttatatcatgcttaaaagacatttgatgataaatagggtcaccgatgaaataaatggtaataacctaaatgttttgaataagactaatgggcaaacgttaattaagaggttaaccggcgtctacattaaaatacaatacagagggagtatttcccttagggcacacgatagctagacttggatggaatcaaagttcccaacatgctgccagatgttaatgtggaggatgtacatatataagtacatttaaagtagccatatcacgatggaccttctgttataaggagatcttttggatataagttctcgacaaaaaaaaaaaattattcagcctagcccgtcggctagcatggttactgttttcgtgatgcatctcattcgtatcacacgcatagagatttttctggttttatcgcaccgtagtctggcctccatccttcctgttgtgaaatgctacaaaatattctatgatgtgtagcatcacaaacaataaaaaagatgttccttttttacaagttagctatataataggagtaaattaattaaatgtttagagatgggggtgatatatataagggccggaggatgagagaatgcattgctttttcaacaccctccgtatctcagatagcaaaatacatggttggtccttaaatatctaccagagtatcatttagatccataaacttataaagtacacatctatatctataattttggttgatgtatcacccaaggtctcaagaaaacattttttagataatggaggatttatttaaactcagttaattacatcaagatggtacaatcacactgagtcacccccggtctctgcataaaatgacacaaccaaaaaaagaaagaaacaactaggaatatctcccaagcataaaagtttgacagaaacatcttagtgcctatcaatccatagactagaccaaaacccatgttcctaggtaaaaaaaactcctgcgccacctggtccaactgtcgtgataccaccacaatagtatctcgtgtcccggtttatggaggatagcccagatacgtagccatcgggtaactaaagtgataacctgcaaaggagaaaacaccatcttgttatcaaaaattatttcattcttgcttagccaaatggaccaacacaaagttatcgcgcccatcaaaagcagattcctcatgtctttaggatacatgatagccaactcccaaacatatgactaacattgcgaggatgttttaaattataagctagatgaattacaaactacacctagcaagataagcgacactgaaagaataaatgttggctggtttcatccttgtgacaaaaacaacatgtcttactacctttccaatttctcttagtaaggttgtccttggtgagcaattacgcctagcgttgataccaaaggaagattttttactttcaccttccaaatgcgtctattgatattcggaaccccggtatgtg

SEQ ID NO: 4635 - DNA, 3735 bp, Oryza sativa
gcctctccctcttagaccgtgcgccgcccggccgtcccgtcgccttccccggcgtcgcaacagcttcttctcccccggcctgccctccgtttcgcgcggtgaccgccggaggcgcgttcccgccgtcgtccagtggcgttgccgccactgtaccacctcaagccgcccttgccgcgccgctcaggtgcgggccgcccgcgccgtctcctccctcggtgtcgccgcgtcgacctccaccccggcctgccctttgattcgtccgaagaccaccgtcgtgccgcgccggcctctccatcctcctcgccggaatttccccggtcgaccgcgtcgccgtcttctccggcatcgcagcggcaaggtcgtcctcggcatcgcttcccctccatccaaacccctccgcggtcccatcatcgtcgcctccgttcgttctcgtcgtcgacgtcccgtcggtcgcccggctcgtcgtctcgtggcgccacctccgtcgtcggcatcgctgcggcgtgttccacgccgtcctcgcatctgtgcagctgctgccggctgccctcgtcgcctcctcgccggccccggtcatcgtcgtcgtcgtcctcctcttgttgtcctcatcgtcgtggcgttcgtccttccgtcaagccgttcgcgttcaccgcccgcgtttcgtcaagtgtgcagcatccccgtcgtcgtcttcgtcctcggctccgcgtcgtcaagccttgtgccggccgcgtctcgccttcgtccaaggatcaccgccgaagtcgttccctcgccgttcgcctccatcgtccccgagctgtctccgccgcgcccgttcgtcgttgtcgttcccatgcctcgtcgcgtggtggtaaggatccctctccctcgctgccccgtcctcgtcctttcggtgccgcccatgcccgttgtgcggttgtcggccccggtacccgtgtatcggtgtcggcagtcgttcgcttgtgcgtgtggtgaccgtgttagtgtgtccgctcggtagccgcgtggtttccacgtgtgcagcccgtgtggtgtctagtggagttcgtttgtcggccactcgcctcggttgacacacgggatctgcttctgtcgacccgtggaccgtctctgtgtacccggtctaccacggtcctttaggttgacatgtggggtccgcatgtcaacagcgcagccttcctgtcttttccagactagcgcttacacatgttttatagttgcaaagcctaattacaataatccgtaaatctccatgtaacaacattaaacttcggatgatcatatcttggtcatacgaactctgaatcgacccgttcaagtctcctaatgtttgttataacctaaagaaccgtgtgctttctttttatgtattgttattgcttctttataggcttgtagctttgcttgtgtgcttcgcgtagcttctgtcgttccggaggttcttgaagcgtggttcgcggtcgtcaccgaaggttcagcaggccgttctctgtgagcaaggcaagtcacatcattcttgagcatattgaatcccagtctataaaattattttgatttaaattaatgcattatcgctttatttaaattcccgcgttatcactgttttatttaaccatgcctatttacctttgttatgaccttattattgttattgatattattaccttgttcaccctagaataaacaaaaccccaactagtgggcactctattcatggttccactagtatgaatttaggtaggtgcttcgctgattaattaggcaacattaggtggtttttataactctagactttgggaatattcatatcacttggacatattggaatggtcggattattgtggaattggatgcacacctccccctctattcaaaaccctcaaaatggttttaggctgggctcggggtgcatggttttgttagtagcacctcggccacataaggaccagtcttcgggcctctgttgcaaagcactaccgtacttccacatgtctagtgggtaaggcttagtttgtggctcagtctggttataaacaaaagtacacggattggagatggacgaagtcgggggttgatggacattctccaggacaaatgaaggctacacgagctgcggcccggtagtcgagatgtcatggcacagggctggtgtcctgctgctaggggctcaatcctgcctgcctgtcccgggggttccggccgtaggtgggttgggtcggtactcttgtctatggctaggatgggttggaaactatgtcatgtcttccgtccgtatgccgtggtggtatgtggcacgtggttgcacgtgaggaagatgtgtcttgtgggtaaagatgtacacctctgatcagagtaaaacctattcgaatagccgagccctcggttatgggcaagccgagcaatgtacccaagtcagtgttttaaattcttaaaatttgctcaacaactaaaatgtggaatggttggcctgggttggcttgggacgagctgggacccagggtcgggttgccagttcggtctgaatcatcgtaggccttgggttaaggcaggttcgtgagggttcacggccttgtttaataatactgtgtagctctaggatcgtctttataaaatggctttgggcaactaagtgacttttaaaggctgttactgcaaaactcaacccctatattattatccccttgtactcccttgcattaattatgcatctccggtgtggcttgctgagtactgtggttgtactcattcttgctctatctttctccccccttcagtaagagaagctttggagaagaagtcttaggtggagtcctggcttataccccagttgagcgcctgtgaagatggagccgtaggcccgctagtccgctgctgtttatttttgattgtcaggccttaagtgcctttgtaataatgtaaatattatcgatataataaagatgtgtcttttatatcatgtttgtgtggtgtaccccggcttttcctgggacggggattaatacactagcgttcgggaaaaggcaattttcccggtcgcgacaagctggtatcagagccatctcgactgtaggataagccaagtggataaaacctaaggacatattttaaaaatgaaactatttgcgaaagtccctttttcctcctttcccctgtgctatttgcaaagtgtttattcccttttcttccttcttcaaatttcaactagtactagatggtcagctttgcgaagaagaagatgtcgtcagttgtttgccgaagctccggaagactgcaggatccgctagcgaagcgaaggaagaagtgaagccagctgtgaaggagtgaagatcttgggaacccgtcgcagaacctaagccaccctgtagggtagtgttgttagtcgtgtgttccttgcttgtgtgtgtagcgcgtggtttgcatcggtgggttgtgatgtaaccatgctaggttgattgcttaatcaacttgcagaataagtgaaacaaacaacacatcagcaagaagagttagttcctttaaggtcctgtctctagttctggtctattctttcctggcttgtttcctctctcacctcaatccctgtaacagatgtttaacagagaaaaaggaaagaatgtcagcgggtatgcctcaagtaactcaagttttcaactcaatccaccactggcctcaagagagttaaccagggcacacccttggtccattccaagcatgccgcttagttcacagcta

SEQ ID NO: 4636 - DNA, 4511 bp, Oryza sativa
gaggaaaaagggagggaaaagaaaaagaaaaaggaaaaggattttccctggaattaaaaattgcactttagtgatttttaattggttaaaattatttctagagctctgaaaattccactaaaaatcctgttaatgaatttcgacatgtagaattcaagaaaaattccacatgtcaaatccgattattatttgcattgttttcttagggttttatcctgatttcctctgcattttcttggggtcatttgtaatttacaatttggcttgggaggaaaacttcggggtgtgacaaacctaccccccttaaacggaatctcggccccgagattcggaggagctggtgaagaggtacggatgggcggctttcaactcatcttccctttcccaggtcgcttcctcttccgaatgatgactccactgaactcggcaaaaccgggtgacctttgaatttctattgttatagaagggctgaattgaaccgaagtggagctattccctggggtatgaacccgcatcggtgtgctaagttcctctcttattaacccatgcatcccgacaaatttcttggagatgaaagaatgcgttgcaccagaatcaaaaagtactgttgcagggattgagttaacaggaaacgtacccagtacgacctctggtgctgcttgtgcctcctccgcagatgcgtggttgacacgagcctggataaaccttggtccggcacgcctgggcttcgggcatttgtcagcgaagtggccaagctcgccacagttgaagcaggaccctggttttgctcccgtctccttcttggcttgtgcgggctggcctgactgtgccggtgccatcggtgggcgtggagctgtaccgcggttgggctgacttccatggtgattctggctgccactggagccctggtggaagttgctggggttgaatgggcggtgttgacgaacaatcatggtggtaggtccaccctgctgcccgggagtgaagcgcggcctctggtgacttccctgatgtgccctgaactgcgcggccttcctcttcctatccatcttgttgcgttgatcccctggcggattgccttgtcaaccagcctctcaaagtcggcgtagtccccagatatcagttggttggtcagctcgtcatccagacccgccatgaacttctcctgcttctcggcgtcggtgcggacatcctctggtgcatatcgcgcgaggcgattgaactcatggaggtactctgtcacagtcctgctgccctgatggagcgcccggaattccctcttcttttgtgccacgaccccgtctggcacctgtgccttcctgaagctacggcagaactctgcccatgtgacttcagtacccggtgggcgggtggccatgtggttgtcccaccaagctgacgcaggaccctgaagctggtgtgtggcgaaagcgaccttctcctgatcattgcactgcaggagattcagcttcttctctatcgcatggagccagtcatttgcctccatagtgttggtggtgctggagaaggtgggtggcctgacacgtagaaactccggcaacttggactgagggggagggggaccaaactgctggtgctgctgttcggcgtgctgcatcatcctctggtgcatctgctggtgctgctgctgcatctgctgcatcatggctgccatcatctgagtctgatgtgccataacttgggcaagggtcggattctcgggaagtggtggcggaccattgccagaatcactgttggggtgcacaccatcagcgcgttcttcaccgttgctgccctcgcctgtcgtgcggttgccagtcctggtgtagaccatctggagggaaaagcagacgggggagaagaagaaaaacagatgctcaagaactaagctttattatataggaattaaaactgcaattgttctgatctgaattaaaacacttaaaaagagcaaacaaaaatccttattaagacagccatatcataggcacatgatatcgaccgtcgactgaccccaaacaagcaacctaaacacacaaactaacaagcagaaactagacaatcgataaactaatgggaaaacgagcctaatgctcggaacggctcctgcggccggtggagtcgaaagcgtcctcctgctcgtcacctggtccctctgaacgactcctggagcctgacagatcagtctcgccgctgccactgggagtagcggacaaccaacctccggtaccactggctggacctctggcggctgatgctggagcgaaggagagagtgaacgcgggagctggagctggaggaactgcgggaactgccggagctgcgggcggaactggaggtgctgcgggagctgctggtggaggtgggttcctgggcgcaagctggatgcgcacgggtgcagtcgtcctcttacggggcgtagtgcggatccggactcctcctggtgctggaagacccttcaactgagcattctccttcttcaggcgcgctatctcgtccttcagagcgacgatcctcatgagcttcccatcattcaaggccttggtcgccttgtgcaggtccgagtgcatctggtccaatcccctcatcacagcacacatgtgaccgaaggtggtgtcgttctcgccagctgtcggacggaaggagctgacgccatcaccatgggctcgacgggggtggtagcggtacgccgtgtcgtggaagatgtagtcgtggcgctcccgtagtctggccatcatcaagtaggctgcctcctgacaggcgtgatctgctgtgcctccagatgcctcgaccgccatgttagcgaggcaagtccccacgtaaccatggacctccaagcggacacggtgaggaagctcgccactgagcggcggaatcgtcgtgtactccggcgcgtcggggtagcccaccaccagggtcatgcgtgccaactctgccacgaaatcaatcatgccttctccgcggtggttgggtgggtgaccggccatctagagaagacaaaggagtaggatcaatgcatgctcaaatccaaatttaaataaagcaataaagactcaaataaaggaatcaaataagagcaaaattttatgcatagatcattttacatgagcgcgaataaataagacagactcacataacgataaaataatgggaaattagatacataataataataacgaacaaagcataaacaccttgcaacccatgttaccgagctaggacctaatgcatttcacccctcaaaccccaactgactgacgaataaatcccaataattttactaaaaccctagactgactcgttttgaaaaactcactttaaacgagcgaccaagatttttcccttgaaccacaagaacagatccccattttcccggaacaaaatccaattgcaaagaacatatgcaatgaaaaggattcagagggctcttaggtctttccatttggcttgtcctacggtcaaggtcggctctgataccaacttgtcacgcccagaaattcccgaatagaattccaagcagaatgtgtattaaaacccccgtccaggaccagccggggtacacaaacgacaatgttgacatacagatccacgtcttacaaacattataaaggtcttacagaaatgcagcggaaaacaaaagataactggagctaatccttgacttgaactgcagcgggaacaccactccacaggcatcctcgacggcacggacgaagcctactcctcggagaacctgccatcggacacatactcgagctctgaggttggggggaaaagtagagcaagactgagtactacccactgtactcagcaagtcataccggaatagaggtatgatgcagggatttaacaagggatagctaagcaggttcatttgcataaatactggcatttataaacaggaattgaatgcgaaaacagttgtaataattaagcagtattaaacatccgctgtccaacgctaacccacgttgcgacaggcccaaccatccacctaaactatccaaattcaacagattacactagggtgagactaatcacggtgaatctggttgaccgcccataaccgcgggcacggctattcgaatagttttactctgatcagaggtgtacaactgtacccacaagacacagccccacgacacgtttccgtgcgccgacatgccaccacgacataccggaaagaggccgtgacaggacccttcgcataaccccctctagccaagcacaccacacctcaggtttcacccccgtccccagcgggcgacgggcagtcccctctcgtgcctaggtgaatccggaagcgacagaggccgtcgcagggcccgccccgctccatcacgcccacccttgcctggatgcgtcgactagaggaaagctacactacaagcccagcccgtgcccacgctggcttgtggaagtacgataaattcttcagggcaatccgcgaaccggccttaactgccatgggtgcgactagaaaaccatgcacccacaagccaccatgtggt

SEQ ID NO: 4637 - DNA, 3096 bp, Oryza sativa
ttggcgcatatttcccaaggtggcggctccttcttatcacaggtgtgctctccctttttttcccaggtggcgcatcatggtacaatccacctaggaaaataatcttcccaggcggaccgtctgcgaaaatcgtcaattttcataggccctacaggtggaacagccgtccgtatagtaagaatgatcttggccgcttgtaaaaatcttttttctaagtagtgaggcctactctcggagaaaatttagcattatatagtacgctgttttttacaagttaaattttgatcaaagtttatttttaatcctagaatataaaacagcgatatttttcagccaaatatttatatcgagataagtaccaccctggctttattagaaatgaaaaatacacacacagcgtcgtgcatatttttacgggttaattggatccatgccactacaaatatgccaaattagaaaaataccactactattcacgatatcggttgggtgccactacaattttagtaaattagatccaagccactccgtcgcgttttccatccctccacgttgacgccgtctctctgcgtcactcctggctttgccttcctgtgttccacgggcgcctactccgacgccggcaacctcgacttttgtgatgatgagtacttcccagacgacgtcgactgcagcgccagcgactgcgtctacaccgtcgacgccacccacgggcgcccactggccgtccctgagggctcgtgcacgccggccgggaggtcatggtgcggcgacgatgcgccttgggtggaggacgaggagcacgatctcacctcgccgcatgccgccggcggcggcggcagcggtagcaggccggcgtcgaggtacctccggccaatcgacaccgtgctcggcggccacggcggtgagcccgtactccacggcgccgtctagcccgcgcggccgcctcgtcacggccacggccgcaagccaatttgacagcgcgcgcggctgtcgccagactgtccgacgccctcatggtgcggcagccgaatgccgcacctcgcccgccgatcgacctcttccagcactgcagcaatgacgcgaggaggcggatgaaccgacgaagatgacgaggagctccagctacgggcgttgtagtcaccagcgtcgcggccctctcacgctcacggcggcgactatcaggctcatcttgccccagcgttgtctcctttctccttcctgacatcctcgctctcgctgctcacgccggtccatatatacatgcataaacctgcatggccatggcgctaagtgtacatgcatctccatggccatgatgctctgcactgcacacgcaagtaactaatgtgctctgtcctgttgcgcgggagcagctgggaggtgtcgccgggccggcgcaactcgatgacggcgagcaacactgcggtgaacagcaacatcgtcgcggcattcggcaagaagggcgtgagcccgcgcgacatgacggggtcagggagattgattcattcgaacaggacggcctcccctactactccgtcgccgccacgaggctgctcggcggcgccatcggcagcgacgatgacctctagagcttcgcgtggtcagcggcgccgccgccgccatcggccccgtcttcccgtcccacatggcgatggctgcgtccagaccccgggccccggccggccgcaaccgccttcgatctccgcgatggtgtcgtcgacggcgaggttgacctccatcgagtggagcggcggcggcgtccatacacaggaaaatgcgaagcggcaccgcggagagacggtgttaacagagagtggatggaaaaacgcgacggagttgcatggatctaattttctaaaattgcagtgacacccaactataatatcgtgaatagtagtggcatttttctaatttcacatatttgtagtggcatggatccaattaacccttttttaccggtgtacaggtcactcaatcgatcaggcccacaatgagttcatgttagtgaaaaccactatatggatcaaaatcacagtgaaatacaatttatgtgaaaattaatgtgagaaacaactttttgtcctatttcaacgcgtgaaaaataaatatgaaacacactaccaaaaaactatgcttaacacgattgttttacttcacaagcagcccacgagggaaccggcctgtgcagtacactagaggatgacctcacactatacgatcaggtcatatgtgacggactcatacccttacctgcgatgcgttaggtcctcatcacagataagtgatcactgataactctggattaaaagacccaccaatggtaagagttaaccttgatggactgtaaccaaaatccgtcgtatgtaacattcatatgtgacgggtagttattttaactcatcgttggttatgtttatctgtgacggatcataattggaacccccctctctctctcgccactctccctttgcgcggcagcggcgacggagtagcggcggcggccttctggcccggacgccctccctcttctctcctcctccagggcggtgcaacggtggagaaggccggccggcgcggcggtggagagggctggccggcacgggtgtggccggcgcggcggtggaaaaggccggccggcgcgggcgcggctggcacggcgatggaaaaggccggccggggcgggctctctcctcctccagcgcggagggcgttggaaaagggctggccagcgcgggcgcgggcgcggcagctgaccctggggtggcggtggtggaggagggcttgatctggccagccccctctctcccgggggacctcccccctccagcactacgttgggtggtggccgccggcacggaggcgggcatggctaggtgccggcgtggaggccgggccaggtggtggtgacggcgtggagaaggccggcgcagtgtaggtgccattttttttatttttttaatagtataggtgcgggttttagaaccggcacaaagaaagttaagacaaaggtgccgacaaagaaaccggcacctatagccagttcccaaccagcacctataggggtttttgtactagtgcgaccacctcttcttc

SEQ ID NO: 4638 - DNA, 10215 bp, Oryza sativa
ccctgtgattttctctcttttctgttcctccattcttattgcttgtccgtttcaagtttctatatttggttgcaaaaacttgatgcgattcattgcaatgcgttctacggatatctattatctagctcttcaaatgctttaaattcgtgtcggtgaggaagtcctcgcatttgtgcaaatatggtgaagcatgtgtctgcaccaacgtcatcacatatttatcctttatggagaagacatagtgtcattatccgaaatattacaaatgcgatccaaaatagtttaaaagacaaagaatgaaaatggaggagaaaaatttgcttcatgtatgcactctaagaaatattgcttcatgcaggtggtaaagctccactccacatatgttgttggactaaactctaactgcaatacattcttattcatctataccgctagcgaacatgtacatgtgtatatgtgctgacttctgaatattcatgcgtcgaaaagcatctagctgcatcatcattcagctgaagattttcaagagtcagagcagcaaatgagtctgtaatgatgtggcatgctgtgcgagaacttggtttctatcagtggtcagagagaaacaatctgtactgacttgggagacttcaggttggtgtggagcctcctaagagatttgtttgagtacagtgatgagataatttcttcacaagttcacatattcccttatgcctcctatccatatcgcattatatgctaatttggttttagataatgatccatgccactacacctaggggtgtatcacaatgtagtgtacaccatgaaacttcgatctctctctctcctccttcctgttccaaagtctttgttggatgcctagttcttgctagttgctatagttagaatgtgttggtgtggtggcaagagctgctgcatgcatgctaaaataaggatgcatgccaactcataggcaggtccttgaaaacaaccgctaaatgggtttgtgggctggccggcttgtatctataatgctaaaagggttttttttaacgagtgcgaagttctatcgatagagtagaaaaaaattacaagattacaatcccgggaggtcgtaactcataaccaggaaaacaaaatagtatacaaccacccacacaccgacagtgccaacacacagacccaggagaaggctagcaccggaccggctgccgctaagcatgaccgaccgccactaagccaacaacggaacacagccgagatcgcccaaaactcgacccttataaccgacacaaaaccccgctctatccaaatcttcgggattgaggaagagaggtgagacagaagaatggaactgctctccccctaggccctccgacggctaacttgcggaagctaggaagccgacaaaagaggatatgaatctagagcgaggttgcaccaattgcttgggaggtttcggcaaggggtgcctagacaatgtctttaaaaagagaagcgacgaaagcaccgccgccgccgtccgtcaaggtctccaagagaactgagactgggctttcatccggcagccacactagagggggtgagacggcatgacaacgccctcaagaggggagtggcactcgaacgccaccgttgttggcccggccaaggtcgggctgtgttttcacccgttgtccacctcctgctgatcgaaagctgttctccattgctccaaccactgacccttcactgtcagcgcgtgtacaccactgcaccgacgcccctcgccggccaatctccacgtgcctccacgcaggcctcccactcgccgcaccggacagtcggcaagccgctaccaccaccagccgcgccttcttgcgccgtactggcttccgttgtcaccgaccacacctcctcgtgccgtgccgacctccactgccagtgtgcccgcctccttcctccagcacacgccggtctctactactagctgcatgcgccgcgcctcgccggtcgcgcctcgcctgcacacccacgccggcctcctccgctctattgcccgcccttgccgcgagccgctcgcctccgccgcgccgtctcctccggccgtcaaatccggccgcggcggcgtcggatccagccgtggagggccggatacggccgcaggcgatgcccgagacatgaccccaagccgcgccgctgcgcggcctgccccacgtgccagtccgcctcctcgcgccgagatggggcacagccgtggggggtgtggccctgctgccaccatcccggcgtgccgcgcggtttccggtggcagcggtgggggaaagagggtttcgccactgggtcatccgcgcgtggacgacgtgggggggggggaggttaggtcatacatatatatgtactactagaagatggattattgaattactaaaggctttccttgtaaattggaaaaaaatgtttagggggctaggcaatgaaactctggagtagttaccatcattgattcatcaacctccagaatttctcatgccattaatccatgttcgccaagtgcatcccatatttgtacttaactctgggcaactactctgaagatcccttgtatcatatatccaaagtgagcaatcattttcgcatctgcagggatagagaatttcttttgcctttgggacaagaaatttcccgtccatgatcctcacagaaataattctagggtatcagatttatttgctgaaaggttggccaaccaattttattaacatcaaagcagaaacaaaaagaaagatgacacaacatttgcagtaggttgtcaaaactgggaagtcatgactcatgagacgcccttaagggttaaaatccaaaactaattacaagcgtctacagcagatacagacagctgctattatcctcgcctttaggagatcacttcatgaaagaatgcagatttcatccttgactacagtgaacaactccaccaccattttcatttccaccatgaagatgtgcacatgtctttcattccaaactagccagcacaccgtcacctaaatagttgcataaatgttgatcaaaatttgacacgacagattgtgatgatacaagtcagtacacaaacatgtaaatatgaattcgctctgaatatgtatgcatggaggaacataaacaaatcattcttcatatgtcattgcatatgtattattcacttgttgattttgtaatttttgtttcacaatgtatacatcgatcctatacctgcatgtctgtgtagtgacttatactattgtaatccatctcgtcaaaatttttatacaattagtattatgtagtgtgaaagtaattggtgcctttgcacctaggcggctaggccattctacatatgcagtgagcgggcccattctacatatgccttttatcagctgtatgcccctgattccttcacgctcatctgagacccaagcctccatcctacacggctgcaaatcttgtggtcagttgctggccatgacaaactctagaatacatgttttggaaatacatattgtgccctccacaggttgccttgtgccagatcaacaaaacatccaactgaaactacaaggttttatggtcatatttttcctgatgcctcctagtcatatcaaactgagacatacactaagctcgatctctattgatttcttttatcctcctcctcttaccacatactttcttgctttttcacttgctacagtacttacctattatgtctattgacatttgacaggaagtgaatttgtgatgcatagtgaactgaatactgaaagaaggggtggtatatagaaggaccaggaaatatgatgcggttattgcccttctatgttatatatacaaggtggtcataattaaatttctctcatatagtatcatcaacttcttgggttgatctgaattaaatagtgaaaataaatgtgctatgatttctacatagactttttgtaccattaattactcacccttggagagctagaaataatgaaggtaaggttttgaaacttttatatgacttgaagttatatgtaccgtagtacgtctcctcagaactaagggcaagttttataaaagatgtggtggtcacctccaattttatccaattatccatccctagcctatatagatgtattgcatttaataccctagtcccagtacacttgccaccaatcaactcctctaattttctcttgttcttgaagtttgtgtggaggttgccccttgcgtgaggggtggcttctcctctctcttctcttctctcttccgcatcatcatttaagcatatagtggatgcaatggaaagttaattgtgttgggcacaaccaccactgacaggcagtcaggcatatatacagaggtcaccaggttttgtaatggtatgaaaaaaatggacagagatgaattgccttgcaacaagatgagcagcactatatttcttttcctgattagaacaactaccaatctgtgaaagaactattaacatatacatggaatgcttccacctgtatcggtgttaatctctcatcatgccattaggcaatggttggtaactgcatctgctagatttttaattcactatcatcccagatgtagctaatttctaatccagcctcgcacaatcattgaacacaaccgatgccggggacctccacaaattgcttccactggcggccacagctagctctcagctgcaaaatgtatattcctatcctccagcttctcgtgaataaactggaaatccttgtaataatgaatggttgagtgcatggcttatgcagagaccggaataatatattcctttatctaaaaaatgtgcacaatgctgtgccatggctagtactcgtgttggggaaaaggatagaaggtactcctgttcagctagccacggtagctagccagccgctgaagtaagccataagggaagatccatactactggtcaccatgactgtcgtgacaatttttaacggtctactacgggagtggattctaatccctcgaggggatatcccatcgtatatctttttcttctaaatttgatgtaaatagttgtgaaaaaatctgaaaaaaattgacaatgtatagtataatgatacctactagttcacgaaaattcagtttcaacttcgatctacacatcgagaaacaaaaaagacaaatttagatataaacagtacgctactattcatatgctgaatttgtcttttttatatctcgacatgtgagttgagtttgaacttaagattttgtggagttgtatatatgtgttgtatgaatgttgccaaattttttcagaatttttcataaccgtttatatggtttttaagtaaagaagggaacatcccctctcgagggattagaatagtttcctaagttgtgctcaactaataaagtatatggccacttctttgccgctgcttcccacttccatatcacaaaggcaagacagctcaaaatgtctatcttccatcccccattctcttgttggttgttgcttgctagttgctcctacttgcaatgggaagccaatactagtgaacgaaggtgcatacccaaaatttgaagggttatatcagagagttagagaagctttttattggagatggtacttactgctatgtactagatggttggtgtgtgcattttctaccattttccccagaaaaaatatatgctaattttcgaacgataattactatcatattttcatggtagtatttgcatttattcctatatgtcaatgcacgtgccaaaaaaattctcatatccaataaggggtgtgacggttccccataaaaaatggtacatagtaaatacaccattttctaataaataagtaactaaagggctcgaggaaaaaaatgccatacacctagttttataaaacaaaaagagagtgttagtagacaatgaaaaatctgctatatatacattagtaaaactatggctttgatgaagaatgctcctgataacaagtagaatatagcatatcgatcggtaactgaaactaagcaactgaaccaacaattaattacacggtatacagacctgcctggaaaaaaataggaaaagtaaaatatatttaccttaacatgccctgtggctaggtagatcgaatgaatatttgacatgctggaaaatgttcctcaggagtaagggatttcctactagccatcatgaccttttgttataagatgatttggtgaatcattgtacttgtccgaaattctatttggcttggcccattggctagcgtggttaccgttttcaggatgactctcattcgtataacataaacaaaatttcccaaattttgcctcatcatatttatccttggccccttcatttctgttgtggtatgtatatcaatctctacaaacatactattaggtgtagcgtcacaaacattataaaaaagatgccccctttttaactagctagggaaataagatgtgaatgtttaaagaaggggtgatatatatagaagggtaagtcgatatggaggagagccgtattgctttgtgcactgcagtactataggatcactctttaaatctcattatctctagacttcaattatttagtgcggtcagcaatgcgcgcggtggcatcaccaccagagctgcagcaaggagcaaaccggggacaaatgggaggggggatgtagaggaggccagccaggccgggtgccgcaccgagacgttgatgccttttgatgctggcgaggtcgggaggcggcatggtgaggatggaggaggcgggggactgcatagtgtgaattgcaaagggtgctacttcctgcacataaacataaaacaaaacaaaataaatagggaggcgggggactgcatagtgtgacttgcaaagggtgctacttcctgcacatgcataccaatgtcacaaaacataaaacaaaacaaaataaataggaatactgaacgaataggaaaatatttcttctttcatagaaaaacaccaagttctataatagtagtttccatcttggtaaacatgaacataaaaaggccagattctatgaataatagttcccatcacgagtagacataaaaatccttttagcattactggtaagctgataagtagggccaacactactcaacgaccatgaatagataaccaaattgcactttctttctgctacacatgatacttaattattcaaatggaataagaatcgagaaacaaaaacaatcgagaaccaaataacataacaacattatgtacttaaaagttaaccaaattgaaacctgaatagataatagaaagttaggcatcatataagcacgaaataatcaatattaataattactcatcatgttaataatcgacaacaagtgaattaaacatagtagtcatccatttattacatgtcaatcatattcatcatgcacttgccttaattgaatataacccagcatcacgccagcggcgccaaaaccccccagacctaaaagaataaaataacagtaaaaacctacttccgaactaacaatatatatgctactagctaaatactccatgtaatccctcagaacaaactagagaaatctgaaactcggaatttgaacaacccggctaaaactctatttcttaccgttaccataaattacttttaaaccagtaaactagacgaagcatttgagtacctctcagacatctatataaagttatctacaagttttgtgttatacaaaagatatacttcaatttccatcaagctcagatctaaagaaagtaatggcagtactggttttcttacaggtcaacaacactgattttcttacaggccttaacccgattgccacggcttcgtccgaactccgattatggcaatcatatattactaagcagcagaacaaacaatatgtgtcacaatgaggtgtatgcaaaaaaaaaaaaataaagaaagaaaaatctgttactcaggaaatttcttccatgagaaaaaaagagtaaagagctggataggtttttgtcagctttccttcctctttgtacagtcgttgttagctttatcactgcttaattctagttgtatcacatcaaatggtaaaaaaaaatatcgaatataataaaaagcaaaggaataatgacaatggaggaaattttatttttatgtgtcacatttgttcaatcttaagaaaatatttgcttggcacttaacactttttttagaaacacattacatacacagatgtccacaacgcacgtacagtcacctctatgaacgcacacacgcacatcgtaccttgcatatcactgaaagaataattatccgtaaatgggagcatccgtgttaaatctaaaatttgaacccgggtggattggttccaccacaaggaacctaactagttaaactatgctcacttcgcgcttcgaacttaacacttagttgactcatccatctaattaaaatatactttttattcatatgcaaagtacagctaatgaacatgtacacgcatatgagctatactcgcctatataggttcacttccgaatattcaggtgtgtctaaatagcctggtcgatctctttcatttgcagatttcatccttgattacactgggaaagtgcaccgaataccattttcaactatgctcttactatatttagtagaattgttatatgacacatggttttatttatgggagaactacgtcctcgagcctgaggtctgaatttattcataatagtactcctattgacttcggctttagtgatgaacaaatttgctttgtcgaaatccttataatgagtagcatttgctgctgccgaataaaccaactttaagatgggataagatgctcgataaggcatgaggtttaatatcataacagtttcttcgtagtaacaccaacaaatctcatccataactctttgtactttgaaaacggacatgtggatgtgttttcgtgctttgaaaaccctcgtacttaagtagacgatcggttggtatacttttcttctgagtttctttggcccactcttcttcttctttatcctaggggtatactttaacagtttgaaacttgtcataaataagattattccccgcttacctatttcttttttttaacacatttgtttcgttctagactagccatcacaccatcatcaacaaggaatcaaaagccttctcataaccaagcctcgtcctgatcttgtggtcttatgaacttaacatgcagctagccggacatctttcattgcacaaattcttagaaaaacataagtatgtacaccttgaatgccaattctggaaatatcgtgtcgtccactgcatgaacaaagcaagcaactgaagctataagcttggatggccaaattttcccagatgccccctagtcatatcaaactgagacatacactgagcttgatctctatcaatttcctatctcctgcttttattccaccatccttactttccacttactatagtttcctattatatctattcataagatgtgaaatgtttttgatgcatagtgaactggggtactcgaagtgaggtgctatatatataaaggggagaggaaatatataatgcctcgatgcattaagttcatctaggcatagaccccgctatgttcatagatggtggtggtaattacatgttaattatgctttctacatatagactttttgtagcattccttaatcacccatgtgaagaggtaaaaacagtgaccataaagttttgaaacttttatgtgacttgaaattgtatgtactatataatcaagtcaccttggaactaaatatagtggacataatagaaacactgctaaaaaaaccctcatagggactggccttataggtgctagttcatttaaaaccggcacctatagacttttttccacctccgcacgttgaaaaaaaaagaacaaatacctttataggtgtcggttcattagttaaaaccagtaccaatactatatgtgccggtttttttaaaagaactgacacatatatataatatattataggtgccgttaaataaaacaccgacatctatattatattataggtaccggttcttttaaaaaaccagcacctataccaaaccgagccggccgcctatatctactcgcgtgcgtcttttccttatccacaatcctacgcgtctcctccttgtccacaattgcgcacgtctcctcttctccgtcgtgcccttctctcccttccttccgcccccttcccc

SEQ ID NO: 4639 - DNA, 5356 bp, Oryza sativa
tgttcatgcttgtttaagtgttgttttggtgattttgttcttttctctttagattccgacgttcccggagagtccgattttacaggggaagattttgaagagtttcaaggccagcaaggcaagtcacacagatcccaaacaaccctttgagcatgttgatcatgtttaaagctattgtttttattcaactactgcatttatttttgaatgtcattgggtggaaataacctattgttttgttatagccctttttgttcttgattaccctattctttgataccttgggttattataacttgactagttgagctttatacattggttcagctagatattagatataattgcacactagtgggataacttatgcttcactattatttaatgatggcttaatgatagctcatgatggttaatcatgattggttaagtaattaatttgccaactaaaacctgataatggtgggttgtgagcatatggttttgatggttgtgctcatgacaattaaggaccggttcacgattttcggttgtgaaacatttaccgtgccatccacaaaccagcgtgggcaacggctttactttctgtatagtatggttcatagtagagcaccagactgtgaagtggcggagataagcccaccggggtcgctggggagtccataccttgtttataagggggtgattatgatccgggaacggtgcactgctttgaattgtgttatgcaggaggtattgtcacaatctctattcgggtacttgttaagtatcgcgacgcatggttgacatgatgttgaggttgtgtcttgtgggtacagtggtacacctctggctagagtttaaactattcgaatagccgtacccgcggttatgggcgggtctaacaatgtctttcgtgattagtttcacacctctcaccgtaataaataatgttgtaattggtaataacttgtttagctcctggtttggaatggtatattcctggtttggagatagaactgtgcagccgggattggttgttcagaatggttgggcctatgcaacacgggtgtgttgtatagtgttgatttaatattgtttaattactcaactgttttattattttctcaattgcttattaaatgctgtttatgcaaatgagactatattatgccatcctttgttatcctgtgcacttgcatatttgctgcgtggcttgctgagtatgtcatatactcaccttgcaatcattcatcagaggaggagttctacagtgatgctaatggtgtggatgattaggtgtagccctggtcaagctacctgtgaagtggagtcgcctgcgctgtttattttattttccgctgcttagatctttattgattgagaggaactatctacctctgtaatgacattttatacgcttattaattagagtaataattgtactctattatcaatttgttattgtgtgcctcggctgattcctggacgagggttcacacacatgtaagcgtttggaattttggatagaaattccgggcgtgacacccggtgtgactggcaccaaaaccatttcaccatatatctctaaatatcagtatcaattatctctcgtgccaattgtttatcatgaaataataatcaaaacacactttgatttcacatatgccaatgtgtattaatgtttgtggaaagcaaattatcatttgctgcgttcagggagctcactttgggaacttttcccccacgcacatttaacggagcaactcatttgcacatgtttagctaagtatcagctaaaatggattttttaaaaactatgattttaagcaacttttcaagattttttttttcaaaaatatacaccttttagtagtttgggaaacgtgcgcatggaaactcacatgtacgaacacagcttaagtggtattaacactacaacaaaaacctcgtatagaggcacttttgtagaggagttttgcaaattgcttctaagatcataagttttatagtgtagagacacttcaaaaattatctagaaaacttttactctagagacaattttagctcagtttgttagatcttatcttatagaggcattctttcggcactataaaatgcgtttaatatgtaaaggcattttgttgagacattttaaactatgtagagatactttttagaatgataatgtgtaactaaagaaacaaacatacaagtaatgacatggaggtgagttggttagtgcattgaagattaaaatgatttaaccaagagatcaaggcttgacaaaagcaaggatattattatattctcttttttggactggttttatatggttgtggtacaatttaatgtctctagaaaatgcctctacaatcttatagacattttataaaatctctcttcgtttatagagagaattcaccataagacacttattattagacatgttttaaaatgcctctatattgttgtaaaggcatttgaaaagtgcctctattatactagaaaaatgtctcttacaaaacatttttcttgtagtactgtaacattaggtgctagtagcagtttcactgccgattatgcacccggagattctaaagcgggcagcaaatagagtgttgtcacactactacagattcgatttttccatgtagtcaaaaccgatttttccatgcggaggtagcgcccatctgcacctaggtgtttgcaaaaatcaacattatcgcgtgcgggcagcccaaccgcacaggatactctattatcccgtgcggccgggttacgtggactgcacgggataatcgattatcccgtgcgatcgagttaagaggacctcttgggataatagattatcccatgcgttatgttaagtggaccgtacaggatagtagattatcccgtgcagttcagttatgtcgaccgtacaggataatctattatcctagtcggctagcatgtgctaggccgaccgcacgggataatagattcgtgcagtcaccctagcaattgctaaccgtttgggaaaatgtacgtactcattattttttgtgtatttttgaatcgtaaagttacatataaattatacaagcacaattagaaacatcgatatatatatatatatattacatagcatatgtacatgtctagtgttcataatattaaaaatagatgttttttattctattgcatgttctctctcccactcccttaggtttttgaattgggggtccatagcaagttcgctgtaagggtcatagaactcccttggatggttgcggatgttgcaacgaatgaaccggcataagtccgcgcagatgttcagaagcgttttctggtcgaaccagtttgctgtatatgggatgctcggaagctatggaaaatagaagaaaaatgatatgtgttaaaagcgacttaaatgaactatttcctatatgtaaggagcatgatgacttatatctgtaaactcagttatgtatctcccacggaccctgagcatctcgcacacttaatatccccataggttggtactgttgggttgcttgtaacactgcgtaagaacagtagacacgtcagtaataagaacaaacaattgcatcatatacttaacgaatatatatatttgattacataccggccagcgtccctttacgagaagtcttgtcctcttttgatcctttacgaacccgccatgttttctgtaatagtcgtgttctctacaaagatgaaatatttgattgagctaactttatctttgatcctttgctttcttcctcttgattgccttcttctataccttcccgaacacgaccttaatcttcttggccatgtcgaagacttgtgcaccagttcatgcttcaggaggaagatcgttctctacggacttgtcaaataagttggccatcttacgccacttgtgcctctgtggtaagaaccgacggtgacgcatgtacactgtcttccttgaggaggtgaggtacctgtatgacgtgttgtcgatacatataagacatccgaacttcctcttaagctatcctgggagccaaaagttaaccggcaggtcgttgatggtaatgaatataatggcacgtagagtaaaatgctccctacagtactcgtcgtacactcgtatcccttctttccaacgcttcccaattgtcaaaccctcatcttgtactagctagaacctctggttcaacgtgccacaacatatcctccagatcaaaatcaatatatgtatcatctataccagagccaccacattttgggtgaagatgcacttaaaccccctagtgggttttggtgattaatgacaatgtggttaaaggggactaacgtgtttatcaagtttattcacaggagtttagtcccaaagcaagttgtgatgactaagaatgcaaggagaccccccaattcgaatgttcctaagtgcgaaaatcgctgtaggtgattagactaggtttttcactttcgaaattgagtttaggaaaaaccgtactattaagaggggtttcaagtgtggttctatggtatacaaagtgctcttagtcatatccatgagtcaaaagatttttggaatcatttttgaaaaatgattttctccccaggacagagagggctacccgaaggttctggccggaacttccgggcgccgtttaattgcaaaaattttcctaagtgctgcccagaagttcctagcacttgcccggaacctcatggcaggtttccagttcaaacatgtgagtaacggctagatgacatcacctagccgttataaatatggatttcatccccaggtcaccctttggccattccacttcagttctttcatgttcgagggttttctagccactcccaagcttcctttgctttctccactcaaatctagagcctatcttgtgagattgagagattagatgagagtgtaggagtgttttggagatggcttgaagattaggtttgattgagcactttggataccttgtgggctgtcacttgggcttattactcttggagatcttctcctagatggttaggtgtctcccgtgagcttccaaagatcttgtggatgtcgtaggaaagtttgtgaagtttttcctcacctccgcaaggaaacgaggtaagtgagtaaagattcttgtgctgagttttcagaggttgtcctaggtagagcaacttgcacttgtggtcttttctagaagaaattttgagttggatcttggtggtctctcaattctagaaaataacctagaagtgttgagttgaaggctgtggacctcttctgggatctttgcataagtgagccaaggggttaatcgagacccggctctttggagcacctcaacggagagtaggattcgtgtgatccgaacttcgggaa

SEQ ID NO: 4640 - DNA, 5209 bp, Oryza sativa
ttgcgttttgcctttgcgagaatgcttaatagaaagatatgatgactagagattgcgtgcagtccgctgaaacccagcgcgtagcaatgaggctgtcggttaatcatccataggatgagcctatggaacacctctgattaagctgcgcttttggtcatcatcttcaaaattatttgctcaccgagggttttgaggtttgtgtagatttaatgataactgtgatatgggtggctttgcttcgccgaaacctggtcacaatatattatcaccacatccatacgtggatcaggtatcataataaagcggatgacttttgcctcgtcggtgcccagtcatatataccggcctttattccagcttgccaatggctttgcccaccgcctcctctgttcccgctcgcagtgtgatgacgccggctgccacctccgctcgtagtcgagcgtggacgtcgacgaccgtcgtttcctcctctcccgtttgagtgcgacactagcaactgccatctcctccgccccttcttaatcttcctccccctccccctagcgcctccactctgcccatcccctcagccagatccagccaccgccgaggttggggcgccagatttggcaaggacgacaggccggcaacaggaggcctttcttggctcgatcgggggcttggcgacctctggtgcagtggtctggtgtgcggggacgtcaggaggtctcaccatcctcacagtacagcggatgcagtgactgtgtggtagggcgacaggaagggagacatctcagatggcagatgtcagtgaacatcttgtataggatctttcatttattttgcactcgaggcgttcgacgaaatgcccatggtataaacatgagaagttttatttctgtcgcgcccagtttttagtttctgatttctgttcagcagaaaaggaggcatgcagacaatccattgtggcacggctgatgatcctagagggacagtaactggagttctcttttgtctgtctagtctatctctggttttgagactttataacattatgtaatttgaaactatgtaatctcaggctacataatggatttggacttgtcttgttgtttagtcctctcgtagtgttctttagtcctggggaggttcataagtaccggggaggttctgccaatttttttattaaattttgacaacttttaacatatcgcattagttggcctgtttggtagagctctaactcctaaatttaacttcagaagttgggtctagagtggagttgaggtgctgcctaaaaccagctccacctctttagtttattttgtgagagagctccacacagttccgctctcattctaggtggagctgagctccagctctaggagaggtggagctagagctggacctgtgccaaacagaccatgtaagcgttaattaattaatgatctttgttacctacaaatacaccgataatcttattcatatgcaatactagtattaaattcctatgcagcacaggctccgtagcagtcggcccattagtcctatactcctattcgccaatccaccacttctcacaggtaaagcaccttttcttcctctcacattcgtcttcctcgatgcaccctctccttttcatttttacgcaatctttccttccgccatctcctttccattcactggcggccggctacaatcaatctccggcgagctcccactgcaggttctcctttcgcccccgtataaacctcccacttgatgcagcactccaacacactgtatgacccattttcatttctcttcatctggacctcccaaaagctcgactgcagccgcttggaaattgtgaccatggcgagaccgacagcggaccacaacaacgaaggaattttgaggtggcgcgacatggagagataagatgggggagcactggaagaaagcgtcgggacttggggagaaatatgcgggcttacggcggcaatgctttacccattctaatcttaccccttgcaaatggatggatgtgagtggtacctcgtggtacctggcacctcataataaaaactctcatttttttactctactttgctctatgttcaagtcagtgatctaagcataacgctgtaattaactatcctatataaaaactagatatatgttgattaattttgtttcactacccttgaaatcccatctccgtcctgtattcaatatttcgtatatatttaagttatgacatgaagtgaaattaagatcctaaagctctaacctcagtgtttcacgtcatcgtcagttctcagccgttggatcagtgacttgtatcgtttctcagccgttggatgaggaaaatgcatcactgtcagattgaagacagcccaaccatcatctcacacacagatagcacatgaggcccatgtaataacttggaccacgtgaggcccatgtaataacttggaccatgtgaggcccatctgtgtcgatctaggcccaatcaacagtgaaggagttagggtttgtttttttttttttttggctcagtgggggtttcctcatggagttagagtggtggcggtggcggcgcttctttccatcaacggtgctcgggaccgtagcgttagcttctcctattctaaaacatctttcgcttcaacttccctgttcgactcttcatctccttagcaacgaaactgacagccacctccttcgctaataaaagcatgcaccaccaacgattattcttagcgatgcaagcagagctgcgtagccaagcgcctgcttgcctagatcaactattgagctcaggtagtcaggtaattaatcagtttaagcatgtcaggttaatttctttagctccctctcactctctcaacattttcttttaatttcatggatcccaatttttccttttttatttcttcttattaatcacacaaccaattcaaattcgacaaatttaatgttgttaagtagttcttgttttcactgaaatctctgaagttgttggaagaaatcagtggaccgaccaagattattactgtccgcatcacatctgatagatagtttcagcaaattctcggtaaaatgctttagcagtgcagcatgagtggtaagaagaaccacatctttttcgaatcatgatatttatgtgtttctatatattgttatggtcttagagctgttggttgctccaagtataatttttatatgctccacaaattattgccttcattgacaatgttttaatatacagcttattactctgagggatgagtggtggtatgatatgctgtatattttatctgtgcagggcactttttttctctgaatggaccataatatctgttgagatattgcattcttactcacctgttcataagataaattattgcatggaaccatggactgaatcatatatcgtgtgctctatgcagtatggacatttgctaaaatcctactcaatttatggtgtaatgtatatgtagctcctgtaagttcttcctagatgaattctgaatattaatgtttgcttcaaatgtaatatagcgttgacagtcactccattcttaccttaagttataaatatctcaggctcttactttctctgttctgctaatacaacttcgaactagttatctatataaactaatttgttgtaatagccacagcttccatattcttaatttacctacctgctcttttatagaaaaacaattgggaaagcccctcttgtatattaattgtataaagtttattttaatttctctaccccttatggtttacatcttttgctaaccaaataggaatatatattaatgtacttcaactggctattttttttattattggaatagacatttctcattgatgtttatattattttatatatattacaattttatgactgaattgtatacccaaacatcccgcatcaacgcgtgaggtgtcaactagttatacatatgtcagggatctctacagtttactctgcggctcttcctttagtctcagatccgctgctcccgacatgagctgcgacccgctacatcgcaccactcgtacggtttccaccggcatccaccacacaccacaatatggtttgctgaccgaaagctgcaaacaatgtactcccatcagccagctttgtgcgcatgatgcctcaccatggccggcactcacaccgggtaaggatggtgctcagagtcagagatacttggcaactcacactctcgagtaaccacggcagctgccacagcgagacacattagaatgtcagcactactagtcactatggatgtaatgaaaaccttcgaattatttttcttgttcggtccacttcttttctgatgcttcctactcccatcacatcacaatgcaagacaacttgaagaaactagattctcttatatatctacctctcccattgtcttgttgattgttgctcgcctgctaattgctcctagttgcaacgacgagagcccatatgtattgtagtgaagaaagatgtatatatatacccaaatctggagggatgtatgaaagagttggacaagctagttattgaagatgatacaaactgttatgtcctggatggttggtaggcaatttttttctgtcgtctgcctccagaagtattttaaaatttaaatagcaattactatcaccttttgtttggaattagtatttaaatttggacatgtcaagacatatgccataatttattttgccttttgtcccatataactatgagatgaagatttccgagaaaacaaataggggcaccggcctagtactacgaaagtaactaaagggctcgatgcttgaaaaattaatagtatatattcatagttctataaaacaaaaaagagtgtaagtagataatatcaagattctatatgcatttctacgactgtctttgataaacaatgtggtcctaataacttatcgatgagacaactccattgatatgtacgtagtacaaataaaatatgttttccttagcatgtatgccacgtcatgtagctaggtagatggaaggagtactcaatatcctaaataattattgttcctcaagagtatggagtttctaaacagcccatcatgaccttctgtcactacaatcctataggtgccggttgggaactggctataagtgccagtttcccagctggcatctttgccttaatcttattggtgtctgctttaaaaccagcatctatactattaaaaa

SEQ ID NO: 4641 - DNA, 12249 bp, Oryza sativa
agcgcttacacatgttttatagttgcaaagcctaattataataatccgcaaatctccatataacaacattaaactccggatgatcatatcttggtcatacgaactctgaatcgacccgttcaagtctcctaatgtttgttataaactaaagaaccgtgtgctttctttttatgtattggttttgcttctttataggcttgtagctttgcttgtgtgcttcgcgtagcttctgttgttccggaggttctcgaagcgtggttcgcgttcgtcgccgaaggttcggaaggtcgcatctctctgagcgactctagtcacatcatccttgagcatattgaatcccagtttataaaattattttgatttaaattaatgcattaccgctttatttaaattcccgcgttatcactgttttatttagccatgcctatttacctttgttatgacattattattgctattgttattattaccttgttaaccctagaataaataaaaacccaactagtgggtactctattcatggttccactagtatgaagttaggtagatgcttcgctgattaattaggcaacattaggtggttttataactctagactttgggaatattcatatcacttggacactatggaatggttggattattgtggaattggatgcacacctccccctcttctcaaaaccctcaaaatggttttaggctgggctcggggtgcatggttttgttagtagcacctcggccacataaggaccggtcttcgggcctctgttgcaaagcactaccgtacttccacatgtctagtgggtaaggattagtttgtggctcagtctggttataaacaaaagtacacggatggagatggacgaagtcgggggtcaatggacatctctaggacaaatgaaggctacacgagctgcggcccggtagtcgagatgtcatggcacagggctggtgtcctgctgctaggggctcaattctgcctgcctgtccgggggttccggccgtaggtgggttgggttggtactcttgtctatggctaggatgggttggaaactatgtcatgtcttccgtccatatgccgtggtggtatgtggcacgtggttgcacgtgaggaagacgtctcttgtgggtaaagatgtacacatctgatcagactaaaacctattcgaatagccgcgccctcggttatgggcaagcctagcaatgtacccaagttagtgttttaaattcttaaaacctgcttaataactaaaatgtggaatggttggcctgggttggcttgggacgagctgggacccagggtcgggttgctagttcggtctgaatcatcgtaagccttgggtgaaggcaggttcgtgtgggttcacggccttgattaataatactgtgtagctctaggatcgtctttataaaatggctttgggcaactaagtgacttttaaatgctgtttactgcaaaacttaacccctatattattatcccctgtactcccttgcattaattatgcatctccggtgtggcttgctgagtactgtggttggactcattcttgctcaatcttttccccccttcagtaagagaagctttggagaagaagtcttaggtggagtcctggcttataccctagttgagcgccatgaagatggagccgtaggcccgctagtccgctgctgtttatttttgattgtcaggcctgaagtgcctttgtaataatgtaaatattatcgatataataaagatgtgtcttttatatcatgtttgtgtggtgtaccccggcttttcctgggacggggattaatacactagcgtttgggaaaaggcaattttctcggtcgcgacacacaacaagaatcttggagatattcttgccttggagtatgattggaatgaggaggtcattgcacagttctatgcaacagcattctttggtactacaaggaagggaaccccatatgtgaagtggttgactgagggtgttaggcacaagatttccatggcacagtttgctgagatgctggggttagatgaagaggatctcaataggcccaacattcatagtgaagcacccctccccatgatcaagaccatgttcatgtatgcaaaggatgctcctaggacttgcatgggatctactcatggtttgcatcccaactataaggtgttgtattccatctttcgttggtccttgcttccaaaggttggagatgctactgctttgtcatccaagcatgctcatcttctcagtcgcatacgctaccatcagcctcccttcagtgtgatgaagttgatttggtatgagatagccaacaccattcttgagcctaagcggggttgcatctatgctcctttcattatgaagatgattgagacagtcaccagggtgttctacatcaaagatgggcgccacaatccttttcgccctcgtgctccaccttcctcttctccagtgctacctagatctgttccttctacttcagctggtctttcttctagtgcctcaccaagttcctcgagttcttctcccatcaagaaggcacttcaggcaatcttctgtatgtgtgctaagactgccaagaaagtgaagaagatagaaaggcgtcagaaggaagatagaagagaggctagcaaagaagtgtcagatgattctgaggatgaggtctatgttgatccattggaggcttatgaggcagcccgcaacgttgctggtgaaggtccttccacctacttcaatgaagaatcttctcattctgatgatgatgataatgatgatgatggtgatgagggtgacaccgaggcagctgctgaggatgctcccactgatgttgatgagggtgataccgctgctcagtccgatgagtctcatctttccggcgataccgagattgttccctctgatggagatgaagatgagtgatcctcttcctctcatagtttctcgctttttggtgtcttgatgccaaagggggagaaattgtgaattgaagggggtcatttaaatccttttgctaccttgactattgtctggtcatttggccggaagctccgggtcctgtgatccagaggttccggccaggcagatttcctctctattatctctctctatatggacatgtaatcgtattctattatggttggatgtaatgactattagatgctttattttcgtttatgtcagtaagttagaccatatggatgttgcattttgatgtgatgttgtgttcttttcatctttttgagtgattggcttgtcatctagtctttctttttgcatcactcatcattcaagcacttttatctacatctcttatttgatgaggatagtgtgaagtttcttttgagctttccttcatcttatgcataatgtattcatttcaagttcattatatgcatatctttagggggagcttcacacttctctcatcattctaaatttaaatcctattatttttttgtgtactttaaccatgttgtcatcaatcaccaaaaaggggagattgaagatgcacttaaaccccctagtgggttttggtgattaatgacaaggtggttaaaggggactaacatgtttatcaagtttattcacaggagtttagtcccaaagcaagttgtgatggttaagaatgcaaggagaccccccaattcgaatgttcctaagtgcgaaaatcaccgtaggtgattagactaggtttttcactttcgaaattgagtttaggaaaaaccgtactattaagaggggtttcaagtgtggttctatggtatacaaagtgctcttagtcatatccatgagtcaaaagatttttggaatcatttttgaaaaatgattttctccccaggacagagagggctacccggaggttctggccgaaacttccgggcgccgtttaattgcaaaaattttcctaagtgctgcccggaagttcctggcacttttgcccggaacctcatggcaggtttccagttcaaacatgtgagtaacggctagatgacgtcacctagcggttatatatatggatttcatccccaggtcaccctttttccattccacttcagttctttcatgttctagggttttctagctactcccaagcttcctttgcttcctccactcaaatctagagcctatcttgtgagattgggaaattagatgagagtgtaggagtgttttggagatggcttgaagattaggtttgattgagcactttggtgtcacgtcctgataaattcatcccaaaattaaaattcattctctaaaaggaataatagaattaattaaaattcgaaaagaaattggcaaacactaaaatacgtacaagaaaaattcaaatgtggcccggagaatttttgttaaattctccttggtctaaaaggagccctcaaattttagtggaattttcagagcacaaataataattattaagaaataaacaaagttgaaaaggttttataaaaagaaaaatccctaaaagaagtccttttccccccctcccttcttgggccggctcggcccagtccctccctctctctctcttcccccgcggcccatcggcctcccgcgcgcgcgcgccgctgacaggcgggcccgcccgccgccctcgctgacgggtgggtcccacctgtcgtcttcctcctcgcgccgcgccgccgctcgcccgtgccctagcgccgccgccgccgcggatttcgccgcatcccgccgtccccgcgcgcattaaagagggggaaaatcacccccgtgattccctctcccgtttccccctcttttccctcttctctccctcggattcgttcgaatcgcgcccgcaatcctcgccggcgcaatcaatggcggccgagatctccgggcccgtttcctccctctccggccgcgctctccccctctcggcgctatataatcgttccccgagctccgctcttccgtttccgccgcttgccgctcgctctcgccttcggattcgtgctcgcgacgttctcctctctctccgccgtcgccgccgaccttcggttagccgccgtcgtcgctccggtcttcctcccgactcggcgccacctccatcggcttcgccgcgttgtcgccgaccccgtccgccccttcgcttcgcccgccgaccgccggagctccgtcgccttcgtcgtcccgaaccgcgccgccgcgttcctccgctccggcagtcgtttccgccgtcctcgttgtcccggggtgagccgtggaccgtccctctcgcttccctctcctctccgctctctcgggcgccgctccgccgcgccggtggtcgccgacggtgaccatcggggcgcgggcgcgcgtctcccgtcggtcgagccggcgaggccgccttcggccgcctcccgcggctgccaggtggggcccggccgtcagccgcccgcgcccgcgggtgcggctgacgcgtgggacccacggcgccggccgccgccagccgcgtgcacccggtccaccgtggaccgagaggctgacgcgtgggccccactcccgtggacccggtccgcgcgcccttctccctcggctgacgcaataaatgggtttttaattaaaatttaaatgaagaaattcgtaaatatccatttaaagagcatataaacttcaaatggccataacttggccatttgaactcggaattggaccgttcaagtctctaatttttccttaagaagtcaagaacccatttttgtgctttgtttctgctgttatgtggagtttattagcgtaaaagccttttcttttccgtcggtcgtgtagacgctgcagcttcggaagatccgctcttcgtggaagttgaagccggcatttgggaaagcgagcaaggcaagtcacatcatccttgagcatattgaatcccagtttacaaaattatttttaatttaaattaatgcattatcgctttatttaaattcccgcgttatcactgttttatttagccatgcctatttacctttgttatgaccttattattattgctattgttattatttccttgttcaccctagagtaaacaaaaccccaactagtggacactctactcatggcaccactagtttaattttaggtagatgcttcgcaatttaattaggcaacattaggtaattttataactttagactttgggaattttcatatcacctggacactatggaatggtttggttattgtggaattggcttcacaccgctccttctattcaaaatccccaaattggttttaggctgggctcgaggtgcgtggttgggttttgctagtcgtacctcgggtactataaggattaagctcgggcctctgttgcaaagcactaccgtacttccacatgtctagtgggtaaggcttagtttgtggctcagtctggttataaacaaaagtacacggattggagatggatgaagtcgggggtcgatggacattctccagggcaaatgaaggctacacgagctgcggcccggtagtcgagatgtcatggcagagggttggtgccctgctgcttggggctcagtcctgcctgcctgtcccgggggttccggccgtaggcaggattgggtcggtactcttgtctatggctaggatgggttggaaactatgtcacgtcttccgtccgtataccgtggtggtatgtggcacgtggttacacgtgaggaagatgtgtcttgtgggtaaagatgtacacctctgatcagagtataatctattcgaatagccgcgccctcggttatgggcaagccgagcaatgtacccaagtcagtgtttcaaattcttaaaatttgctcaacaactaaaatgtggaatggttggcctgggttggcttgggacgagctgggacccagggtcgggttgccagttcggtctgaatcatcgtaggccttgggttaaggcaggttcgtgagggttcacggccttgtttaataatactgtgtagctctaggatcgtctttataaaatggctttgggcaactaagtgacttttaaaggctgttactgcaaaactcaacccctatattattatccccttgtactcccttgcattaattatgcatctccggtgtggcttgctgagtactgtggttgtactcattcttgctctatctttctccccccttcagtaagagaagctttggagaagaagtcttaggtggagtcctggcttataccccagttgagcgcctgtgaagatggagccgtaggcccgctagtccgctgctgtttatttttgattgtcaggccttaagtgcctttgtaataatgtaaatattatcgatataataaagatgtgtcttttatatcatgtttgtgtggtgtaccccggcttttcctgggacggggattaatacactagcgttcgggaaaaggcaattttcccggtcgcgacaagctggtatcagagccatctcgactgtaggataagccaagtggataaaacctaaggacatattttaaaaatgaaactatttgcgaaagtccctttttcctcctttcccctgtgctatttgcaaagtgtttattcccttttcttccttcttcaaatttcaactagtactagatggtcagctttgcgaagaagaagatgtcgtcagttgtttgccgaagctccggaagactgcaggatccgctagcgaagcgaaggaagaagtgaagccagctgtgaaggagtgaagatcttgggaacccgtcgcagaacctaagccaccctgtagggtagtgttgttagtcgtgtgttccttgcttgtgtgtgtagcgcgtggtttgcatcggtgggttgtgatgtaaccatgctaggttgattgcttaatcaacttgcagaataagtgaaacaaacaacacatcagcaagaagagttagttcctttaaggtcctgtctctagttctggtctattctttcctggcttgtttcctctctcacctcaatccctgtaacagatgtttaacagagaaaaaggaaagaatgtcagcgggtatgcctcaagtaactcaagttttcaactcaatccaccactggcctcaagagagttaaccagggcacacccttggtccattccaagcatgccgcttagttcacagctaccattggttggaagtcaagaccaaaatcagtatgtgtttgatcgagcatttgccacccaggtcaatgagcttccaatgccagaagaggatgtccccttttgtcacgattgtagagaacaaggacactatgccctgaattgtccatgggtatatgccaaagaagccccttcctttggtttagcagggcagacatcgctaaaccagcctcctcacaccaagacaagcttgcagcctagtgtgcaaagcagagagcccaatgaagagaatccattgaatcctgggaattgctctcctcctagcctttcgtaccacgtggggtcacgtactaagcacgccaaaggcaagaagagtaagaatcagaagagaaaagcgccgatgcgaactgaagaagaagtacgtaagatgactattaccagcaccgaatggtctacagcagggataactattcctagacgtcaatgaggaaataccttccgaggtgcacgacagttgacccagcacctcctaagccatggtggcagagtatctgatagtgaagggtcagatcaagtctcctcggattatgaagatgagtcccccccacatctcggcgaggaagagatggaatcaaaagcatgcccccgttgtggagaaattggacacattgctagcatgtgtctcacactctgccctcattgtgaagaagaccatccaccaggggagtgtcccacccgcaaggtcacatgttttctatgcgaaggtacaaaccatgtgcccaaggattgccaactcagtgtgttgttgaccaagaccgcagaaatccaacgaacgaccctacgattgtctcgtcagctagtcagctccaacagcaatatcgacgatatcatccacagcaccaatgctcctcctgctgcacctgactctgcaataaatcatagcaataataccttcagcaccaaccattctcggcaccgacagcctcagcaatgaattgtcgtcgatggaagaagttgtttctctccccgacctactccaggccgagcgaagggaaatcaacatcaggagggtgataccaagcagaagaccgttacccacttcaaccagcaatcagaaggaatttttctcctgtgaatgatagcaatacgcagtcctaccacatcatcacagaaccaatcaaggatgcagtcactaggacaatgccagctatatctctcctgaatcaaaatgagcagccccgtttgtggttttcagttcgctacttatcattgtgtaatagaaagtttgcagcaatcatgtaataaataaatatattcatgactataaaacagtgagcttgctatgtttatggatgattcctgttgaggatacaatgtaccgatgttaagcaccttccctttttgtttaagacagtgccttgtattcatgtaaaatgggagaaatttgtaataaaaacaagttctaagaggattctttcggaagatgctgatatgggattatgtgtttactgtcaaaggagacctagggtctcatttcaaaggaactatgttccaacctcgagttaataaccaacctgatgatagaaaagaaaatgccgagtccgggaagatatctgttgcttcaattgtcaaggaatgggtcatttcgccgacaagtgccccagaccgagaaacatagctgccagcacgtcagtccacgcaactccttgcaatcagaagcttgctcctcagcgaattgtcatccatgcatcccgaagcagtcctatagaccgcgttgcaacagctccaactccagcgagtgcattaccacaagttgtcaatgctcaatttcagccccagccatcagttgacaagacagaggccagtatcggcattgtacctttggatgttccagcacagcagccaaagaaatcaagtacaagatgaagaacccgagcgtaagaaagttattgtctgttacaaactgtagtacctgttaaggaagcagacatgccaatcgccaagtggtcactggagcaaatacagtacctgataagcctagcgctagtcagaagcaaccataatactcttatatcagtgttcaaatacttttgttttatagttgttccccgtcaatcatgtaataacagagaaacatgagataatgaatgagtttgataagcttatgaaggatccatgttaagagtgcaagtgctgtgagttgtgcacattttgttgttgattagggagacctagggtctcatttccgtaaacccaaaatctgttaggaatcaaatagtctagcgattgatggcgaagaaaatcaagtgatcaaccaaagaggcatttgtttggactaagagtttcagatgtgtctcttcggatcaaaggcaacaatcgtcagtctagtctttgacgaaccacatcaaggtttcacggaaaggcagcaagccaaaggacctcatcgtccccagaagcgtccgcaatccacatcaaagaataccacctgttagagataagccggaagatgattgataaaagagattggcaaagatgttctccagcatgaaagaagtaggccgaaaggtgattgataaacagaaacatgctctgcaccgctcaaggaagacccctgattgtaattgccccgcagcagtcaccttgtcattaagtaagcaagatgacctaggtaaaagtgtttttatgaaggcaaagagtgaaatcttcaactcggtatcagatgctacacggagtgaaaagtgcaagcaccggttaccaggcaatgccatgacttgggagatgatccaatgggaaagaacacatcaaggttaaaggtgtaaaggaatacgttgaatgctaactgaggacaacctgaagataataaggggaagtaaactgaatgtaaagaaagtgaatccgagttgcttgttcgtgagggctattcccagttatgaatcaagtgatatgttcgaagataatctacagaggtcagattaaaagcacatctaacaacgaagcctcagatttgacagggtaatgattagacaataacaaatccagcaataaagccattggagaagacgtcaaagtatgtcaagtgggataaattggttctcttgggaagcataacttatagttagagtggttgacccttgcatcgaatagccgaagtacctagcaccggagaccaggaaagctaatatgagacagttgatggcaagttagaagtgaatgacaagcatgatattcttatgatgacaaacatagtatcctagtaatgacaagctagtgttgacgcatgacgtgaagtggtaacttgtctgaggttgactccgaagatatgaatcatgagaagttctggaacggaagcatcactgaactaccgcaacctagtctgagtcagccaaaaggtgcaccctggtccaagtcaggtgaagagaagattccatctgcaacaggagatcgagccaagcagtccagagtgaagaagtttgttaggcaagtttgttatagaagacggagcggaagaagtcagacaagaagagaagaccgcccaacctatcttcttgctagcctcctcgaatctcggggacgagattcttgtaaggggggtggatttgtcacgtcctgataaattcatcccaaaattaaaattcattctctaaaaggaataatagaattaattaaaattcgaaaagaaattggcaaacactaaaatacgtacaagaaaaattcaaatgtggcccggagaatttttgttaaattctccttggtctaaaaggagccctcaaattttagtggaattttcagagcacaaataataattattaagaaataaacaaagttgaaaaggttttataaaaagaaaaatccctaaaagaagtccttttccccccctcccttcttgggccggctcggcccagtccctccctctctctctcttcccccgcggcccatcggcctcccgcgcgcgcgcgccgctgacaggcgggcccgcccgccgccctcgctgacgggtgggtcccacctgtcgtcttcctcctcgcgccgcgccgccgctcgcccgtgccctagcgccgccgccgccgcggatttcgccgcatcccgccgtccccgcgcgcattaaagagggggaaaatcacccccgtgattccctctcccgtttccccctcttttccctctctctctccctcggattcgttcgaatcgcgcccgcaatcctcgccggcgca

SEQ ID NO: 4642 - DNA, 9840 bp, Oryza sativa
gctagggtcaatcgtcagccgtgaaagggggttgcccatccaactgatcgtaagcctcgtcagtcttgtccccaactccgacgatttttgttttgcctgggagaaccacttgacgcttagctcatcaggccctctacccttctttcctttgctagacatgtccttcacgaaaaagacttgcgttacatcattggcaaggacaaaaggttcgtccgagtatccaaccttgttaaggtcaacagttgtcatcccactgtcatcaatcattacgcctccaccagtcaacctaacccattggcaccggaacagaggaaccttgagaggaccatagtcaagttcccatatgtcctcgatggcaccgtaatacgtggcagttgttccatcgtgtcccatggcatcgacacgaacagcgctgttttggttcgtgctcttcatgtcttgggctctcgtgtagaatgtgtacccattgatctcatatccctggaatgtcgtgatcgacccagacggtccctgtcacaccctgaaaattcaaaatatataaattgttgtttaaatggaatttctagaatttattttaaaagtcttgaaaagaaaatctaagtttaattaataaattccaatataaaattgggccagataaaatttcattaaatactttgcttaattctataattcctagatttttctgggatttatttgagttaagaaagtatttttaataaatggaattgcatttaagaaataattttaattgaaaaaggttttaaaaagtcttcttttggctttgggccgaaagtcggcccaaaaccgttctctctctcctcggcccagtccggcccagtccgcagccgcgcgcgcgccctcgctgtcgctgacaggtgggtcccgcttgtcagtcgtcgtcttcctcgggccgaaaccctagtttcgcgccgccgagctgccgtcgccgccgctttccaaatccggccgttcctttccttctccggccgaatcaatagaggggaaatgatctccgggatctcctctaccttttctcctttggaatctttggttaaatcgctttggaaagctttggaatcgagttcgattcggatcggttttccctctctccaagccgaaggtttccttcgccgttgccgtcgccgtgggcctttgccgccgcctccgagcccctttaaaaggacccccggtgtctcctctacccgtcgccaccctcgccttcgcctctcgtcgccggagtagccctagcgccgtgtgccctagctttgccttcgccgccgccgcttcagccgtgctccgccgtcgctccagctgtcgccgccgctcgggaagaccgccgtcgtcatcgccaagtcgccgccgtcctcgtccgccccttcgcagccgtcggaacccgccggagcttcgtcgccgtcgacaacccgaaggtagccctaaaccctaaaccctaaaccctaaaccctaaaccctaaccaagtcgccgccgtcctcgtccgccccttcgcagccgtcggaacccgttccttctcgtcgccgtcgtcgtccgttccttctccgccgccgttttggtcaccggtgtgttcgccgcgttgtcctctacgtgctggtgccctccgttggtgccgtggtgccgccgttcgccggcgagtgtccgccgcccgagccgtcttcttcgccgagccgccgccgtcgttggtgatgtcatcgttgacgtcatcgggatcctctcccgtgagccggtcgtggaccgatcgatctcggccgtccgatttggatcggaacaatctcagccgtccgttcgtgtgaaccgccgcccgtgcgccggtccaccaaaccctagcccgctgacgcaataaatccccttttccttttcaaaaataattcattattgcgtcataattcaatttaaaccgatttaagtgttttaatccgatttaatctttaaaaattcataactaattcatcttagctccgatttagttggttcaagtctctaaatttttctaaaattgagatctacacattaaaaatatccacatgtactgttcatgcttgtttatgtgctgttttggtgattttgcttctttttgcttagattccgtcgtttccggagagtccgttttcgcagaagaagagtttgaagagttccaaggccagcaaggcaagtcacacagatcccaaacaaccctttgagcatgttgatcctatttaaagctattgtttctattcaactattgcatctattttcgaatgtcattgggtggaattgacctattctttgttatggcccttttgtacattgattaccttattccttgataccttgggttattacaatttgactagttgagctttatttatattggttcaactagatattagatataattgcttagccctgcttagaaacattagtacacttatgggataactaatgattcactattatttcatgatggcttattgatagttcacgatggtcaatcgtgattagttaattaattaatgtgccaactaaaacctggtaatggttggttgtgagcacatggttttgatggtcgtgctcatgacaattaaggaccggttcacgagtttcggttgtgaaacatttatcgtgccaaccacaagccagcatgggcaacggctttatcttttgtatagcatggttcattgcggggcaccagactgagaagtggcggagataagcccacgggggtcgctggggagtccatgccttgtttataagggggtgattatgatccaggaaggtgcgctgcaatggattgtgttatgcgaggggtattgtcacaactcctttccgagataccgtggtggtattgaggcacatggtgacatgatgtggggttgtgtcttgtgggtacagtggtacacctctggccagagtaaaactattcgaatagccgtgcccgcggttatgggcgggtctaacaatgtctttcgtgattagtctcacacctctcatcataataaaagatgcttaatctggtaataatttgtttagctcctggtttggaatggtacattcctggtttggagatagaactgtgcagccgggatggttgttcagaatggttgggcctatacaacagggtatgttgtatagcgttggattaatattgtttaattacttaactgttttatcaaattctcaaatgtttgctaaatgctgcttttgcaaatgcaaccctattatgccatcctttgttatcttgtgcacttgcatatttgctgcgtggcttgctgagtatgtcatatactcaccttgcaatcattcatcagaggaagagttctacaatgaggctgatggtgtggaggattaggtgtagccttggtcaagctgcctgtggagtggagccgtctgcgccgtttatttaatttccgctgcttagaactttattgattgagaggaactatctacctctgtaatgacattttattcgcttattaattagagtaatatttgtactctattatcaatttgttattgtgtgcctcggctgattcctggacgagggttcacacacatgtaagcgtttggaattttggatagaaattccgggcgtgacaagttggtatcagagcctctttgaccctaggttatgccaaatggttacccatagaagccctctgaaaaatattggaaaagtagaactgttctcctccctttctcttttaattaaaccaaactaatggcacatgcacttcataatctcttttaatggttctcattcaaaatttattccagtgttattagtactgtacatctattactgtactaatggctcatttaccagcaaaagttttacaatactgttttatttaatcttgctgcaataaaataaatttagtatgttgattttataactttcttttgaaaccagttattcaaaattacaaaatttgtgacctcgtttccaactattttaatttatttcgcaaagcttggtttactttatttacttacctttttactctgattttctaactttattcaaattaatccaaaaacttgtgctattaattggataaaggtcttaactccctcctttcacttgtctttagatgccgcgttacaagcctgagtacctgtttggtgttgagggttttgtccaggagttgcgcacgatgtcctttgtcattggatttgggactgcccctttttatgcccagattcctcatgaccgtcatgaagagaagtgccgagtcaaagtcaccttgaacagcaatagtgaagaggtcccctcagtgatgtttgaagctggaggaagaaattacatccatgcatgtcaggaagtggcaaggatcgccataggagagctccgtgatcgctacagtgatcaattggccgacactgagtatcgctaccatcctcgccaaccccagggaagtgaccgtggcagttaccttgagactgaaggaattgagaatgatgttaccacgaaacatttggttgagatgttgtgggctatggatgaaagtcgtgcggagactgtgttagcagctcaagatcgtgaagatcggaatcgtggtaagatttgcaagctagaagacaaggtggatcgtttggagaaggaattagccgcattgaagggagaagcaccgccgcagaaggcctggattcgtcttaccgcaaggaagagagctctatttgtccctcgctatcaattggcgccaaaggttcgtgtggtggagaaagaagttgctccagctcaagcggatcctccggtcatcatcataagtagtgatgaagaagaagaatccaagcgcatcaattccaagattgagtgggtagcaactcaagatgatgaagacgagccctcaatcgacctccgatgcttggaagaactagagtgacttgttaagtcgttgtcttagatcgatgtgttagtttgcttgttttaagtttgcttgtgtgtgtgtggctcgcatgtgatttacatcagtggtgggatgtaagtgcatgcgtttgtttgcttttgagtgttaggaagttggtgagtttagtggtgtgagagtcttcagtttgtaataatgaaactcagttaagatcaataaaagttaaagtaattctctgtcctaagtagttcccccgttttctcttcttgtgccctgtccatgccagatggtgaacactcgtagcaatgggaatggtcccaacaaccccaataacaacaacaatggagagaatcccactctggcccaagttcttgctcaacagactcagcttatgaacatgatgatgcagcaatttcagaatcagcaaaaccaagggaataatcatgcacctccacagaacaagttagcagaatttcttcgtgtaaggccgcctgttttctctagtaccactaatcctgttgaagctagtgattggctgcatgccatagagaagaagttggatttacttcagtgtactgatcaggagaaggtctcatttgcatcacatcagttgcatggccctgcctctgaatggtgggatcacttccgccttaacaggactactgatgaacctatcacttggcttgaattcaccgctgctttccgaaagacgcatataccatcgggagtagtgtctctcaagaagaaggagttcaggtcgcttactcagggatctcgctctgttacggagtatctgcacgagttcaatcgtcttgctcgttatgctccggaagatgtgcgcaatgatgaagagcgccaggagaagtttttgggaggacttaatgatgagctttcttacccactcatggttggagattatcctgatttccagaaattagtggataaggctattcgtcaggaggacaagtataatcgcatggagcagaagaaacgtcggattgctcaattcaagacacaacagggaaataatcagaagccgcgtcttactttaggaccccagcccatgtcacagggaggttcttcgtctgttgttcgtccgcagcgtcagttcttcaacaacaatgctggcaacaacatccgtaatcaagctccacgtcctgttgcagctccagcacagcaacaacctgccaagagggagcaaggcaacaagcccgtggtgtgtttcaactgtggagatccaggacattatgctgacaagtgtccgaagccccgacgcgtgaaggttgtccctacccagaataactctgctgtaccagcatcaaaggctcgtgtaaatcatgtcgctgctgcagaagctcaagatgctccagatgtgattttgggtacgttccttgttaactcagttcctgcaacagtacttttcgattctggtgctacacattcattcttatctatgagttttgcgggaaatcatgggatggaagtagaagatcttagacgtcctttgatggttagtaccccaagtaatcaagcactctctttgcaacgtagcccctctgtcagaatagaaattcaaggagtaccatttctggccaatcttatcttgttaaaatccaaagaccttgatgtcatcctagggatggactggttagccagacataaaggtgtgatagactgtgccaacaaaaaagtaactctcaacaggctatgatggtcgagttgtaactgttcatgcattgtcatctgagtctttaaggtcaagactgaaccagataactttggaagagattcctatagtccgggagtatcctgatgtgttcccagatgatttacctggtatgccgcctaaaagggatatagagttcagaatagatttggtacctggaacaactccgatccataagagaccttatcgaatggcagccaatgagttggcagaagttaagaggcaagtagatgatttgctacagaaaggatacatcagaccgagttcatcaccatggggagctccggttatttttgtggaaaagaaagaccatactcagagaatgtgtgtggactatcgtgcactaaacgatgtgactattaagaataagtatccactacccaggattgatgatttgtttgatcaacttaaaggtgccactgttttctccaagatagatcttcgatcagggtatcatcagttgagaatcaaagaggaagatatacctaagacagcttttaccactaggtatgggttgttcgaatgtaccgttatgtcttttggacttaccaatgcccctgctttcttcatgaatttgatgaataaggtgtttatggaatacctagacaagttcgtggtggtctttattgatgatattcttatctactctcgaaccaaagaagagcatgaggaacatcttcgtcttgcattggagaagctacgagaacatcaactgtatgctaagtttagcaagtgtgaattttggttgtccgaagtgaaattccttggtcacgtcatctcagccggaggagttgccgtcgatcctagtaacgtggaatccgtaaccaattggaagcaaccaaagacagtttcagagattcgcagtttcctaggccttgcaggatattatcggaggtttatagagaatttttccaagattgctaagcccatgacacgactgcttcagaaagatgtgaagtacaagtggtcggaagaatgtgagcggagttttcaagagttgaaaagtcgcttaatatccgctcctattttgattttgcctgatccaaagaagggttttcaagtgtattgtgatgcatccaaacttgggttaggttgtgttctgatgcaagatgggaaggtggttgcctatgcctctcgacagttacgtccgcatgagaagaactaccctactcatgatattgagttagctgcagtcgttcatgcattgaagatttggcgtcattatcttttcggtactcgtacagaagtgtacaccgatcacaagagtttaaagtatatctttactcagccggatctgaacatgagacaacggagatggttggaattaattaaggattatgacatgggaattcattatcatccgggaaaggctaatgttgtagcagacgctcttagcagaaaaggctattgcaatgctacagaaggacgacagttgccattggaattatgcaaggaatttgaaagattaaatttgggaattgtcggtagaggtttcgttgcaaccttaaaagccaagcccactctaattgatcaagttagagaagcccaaattaatgatcctgatattcaaaagatcaagaagaatatgagaagaggaaaagctattggtttcttggacgatgagcacggaactgtatggttgggtgagagaatctgtgtccccgacaacaaagatttaaaggatgcaattctgaaagaagctcatgatactttatactccattcatcctggtagtactaagatgtaccaggatcttaaggaaagattttggtgggcaagtatgaagcgtgaaatcgcagaatacgtagcagtatgtgatgtttgtcagcgagtcaaggcagaacatcagaaacccgccggtttgttgcaacctttgaagattcctgaatggaaatgggaagaaattggtatggattttattactggtttacccagaacgtcatcaggccatgactctatttgggtgatagtcgacagacttaccaaagtggctcatttcattccggtaaagacaacttattccggaagtcgcttagcagaattgtatatggcaaggattgtgtgtttgcatggcgtccctaagaagatagtgtctgatcgaggcagtcagtttacttcaaatttttggaagaaacttcaggaagagatgggttctaagctgaactttagtactgcttatcatccgcagacagatggacaaaccgaaagggtgaatcaaattttggaagacatgttgagagcttgtgctctagatttcggtggaagttgggataagaatctaccctatgcagaattttcgtacaacaacagttatcaagctagtctacagatggctccgtacgaagcactgtatggtcggaagtgccgcactccgcttttgtgggatcaaacgggagaacgtcaggttttcggaacggatatcctaagggaagcagaagaaaaggtaaagatcattcaagaaagattgcgtgtggctcagtctcgtcataagagttatgccgacaatcgccgcagagatttgagttttgaagagggagattatgtgtatcttcgtgtcacgccttttcgaggagttcatcgttttcgtaccaaaggaaaattggcaccgcgttttgtgggaccttataagattgtcagtagaagaggagaggttgcttatcagttggagttacctcaatctttggcaggagtacataatgtgttccatgtgtcgcaattgaaaaagtgtttaagggtacctaccgaagaagctaatattgagcagatagaagtccaagaagatttgacttatgttgagaaaccaatccgtatcctggaaacaagtgagagaagaaccaggaatcgagttatccgtttttgcaaagtccaatggagtaatcactcggaagaagaatcaacttgggaacgagaagatgaattggagtcagctcatccgcaattgttcgccagttcttccgaatctcgaggacgagattctgtttaaggggggtaggtttgtcacaccctgaaaattcaaaatttataaattgttgtttaaatggaatttttagaaataattttaaaaagtcttgaaaagaaaatctaattttaattaataaattccaatataaaatgggcccagataaaatttcattaaatactttgcttaattctataattcctagatttttctgggatttatttgagctaagaaagtatttttaataaatggaattgcatttaagaaataattttaattgaaaaaagttttaaaa

SEQ ID NO: 4643 - DNA, 10916 bp, Oryza sativa
cccgcagccgagcgccgcccgcgcgcgcgcgtcccgctcgctgacaggtggggcccacctgtcagtcttcgtcttcctcgcgcagctgccacgcccgaaccctaaccgagccgcgccgccgtctcgttccaaattcgttcatccctttccttttccggtgaaattaatagaggggaaatgatccccgagatctcctctatcttttcacttttggaatcgtcggctaaatcgtttggaaatcggtggattcgatctcgaatcggattcctctctctctccgaaccctaacctttccatcaccgccgccggccgccgtgggccttcgccgcggccccctagcccctataaaaggacccccggtgtctcctctacccgccgccaccctcgccttcgtctctcgccgccggtagagctctagcgccgtgtagcctagcgccgccgttgccgcagttcgtccagccttgcgccgtcgccgctccggtcgtcgtcgtcgctcgggaaggccgccatcgtgatcgtcaagtcgtcgccgacctcgtccacccctccgtcgtctctgtaggtcgccgaagcaccgccgtcgtcgtcaagccgaaggacgccgccgcttcttcctcgacgccgtcgccgtccgttgatcttccgccgctactttggtcaccggtgagttcgccgtgtcgcccgcaacccgtaggtgccgtccgttcgcgccgccgcgccgtcgttcgccggcgagcatgcgccgtccgagccgtcgccggtgatgacgtcaccgctgacatcatcgacgccatccgccgtagaccggtcgtagaccgtttagatctcggccgtctgatttggatagatcgatcccggccgttcgtttccgtgagccgccgccgtgaaccctagccgctgacgcaataatctctttttccttttcaaaaataattcattattgcgtcataattcaattaaaatccatataaatgatttaatccgatttaatctttgaaaattcataactaatttatcttagctcggattttgttggttcaagtctctaaatttttctaaaattgagatctacatgttaaaaatatccacatgtactgttcatgcttgtttaagtgttgttttggtgattttgttcttttctctttagattccgacgttcccggagagtccgattttacaggggaagattttgaagagtttcaaggccagcaaggcaagtcacacagatcccaaacaaccctttgagcatgttgatcatgtttaaagctattgtttttattcaactactgcatttatttttgaatgtcattgggtggaaataacctattgttttgttatagccctttttgttcttgattaccctattctttgataccttgggttattataacttgactagttgagctttatacattggttcagctagatattagatataattgcacactagtgggataacttatgcttcactattatttaatgatggcttaatgatagctcatgatggttaatcatgattggttaagtaattaatttgccaactaaaacctgataatggtgggttgtgagcatatggttttgatggttgtgctcatgacaattaaggaccggttcacgattttcggttgtgaaacatttaccgtgccatccacaaaccagcgtgggcaacggctttactttctgtatagtatggttcatagtagagcaccagactgtgaagtggcggagataagcccaccggggtcgctggggagtccataccttgtttataagggggtgattatgatccgggaacggtgcactgctttgaattgtgttatgcaggaggtattgtcacaatctctattcgggtacttgttaagtatcgcgacgcatggttgacatgatgttgaggttgtgtcttgtgggtacagtggtacacctctggctagagtttaaactattcgaatagccgtacccgcggttatgggcgggtctaacaatgtctttcgtgattagtttcacacctctcaccgtaataaataatgttgtaattggtaataacttgtttagctcctggtttggaatggtatattcctggtttggagatagaactgtgcagccgggattggttgttcagaatggttgggcctatgcaacacgggtgtgttgtatagtgttgatttaatattgtttaattactcaactgttttactattttctcaattgcttattaaatgctgtttatgcaaatgagactatactatgccatcctttgttatcctgtgcacttgcatatttgctgcgtggcttgctgagtatgtcatatactcaccttgcaatcattcatcagaggaggagttctacagtgatgctaatggtgtggatgattaggtgtagccctggtcaagctacctgtgaagaggagtcgcctgcgctgtttcttttattttccgctgctcagaactttattgattgagaggaactatctacctctgtaatgacattttattcgcttattaattagagtaataattgtactctattatcaatttgttattgtgtgcctcggctgattcctggacgagggtttacatacatgtaagcgtttagaattttggatagaaattccgggcgtgacaactcactggcagcacctctggccagctggccgccagcgaaaactattttttgtagtagtcacaacagttcagattggttcactagctcaggatagctcatctgtaataggcgggaagccttatctgtgtcggcgaggggtactgtcacgaaccaaaggttattaatgtgaaaagtcatatgtgtcgggtcagccaccatcacggacgaccgtcatccttatcgggcctaaataaaagacccaaactcatctatgacgggtcatagttaagacccgtcacggataagagttatccgtgatgtttcaagctcctacttccaagaactgacttttttgtccccaagagtgatgtctggcttgccgccgatctcgaccgggtcgctgccattgacttgtctacggctatgttccgagctttgagtgacaacatcaggtgttggcgtcagaacccgacatcgtcaatagcctcgtgcgtcgtcttaccggtggtaagccctttttctcatttatactttgtttggcccaaattcttactcgcaaaatgacgctttattgcctgctgccggtttactggatatgatgcaatgctcactaacattctaccttcctgcacagttattatatcttgacaacatactcccaccaacagacgttggtctcgatctagtgttcacccctcgtatacacgtgtatactaaggagattgtcgatcggctggttagtgcggatcaggaagctggaggggatggcacgcccccgttttgcaacctccctgtaagtgtttcacattccttcttccccattttcctttccattaataaaaattcatgtgctcacatacactggggccggcgtacgcgggtatttttaatgatcactaaatttgtacactaaaacccaatcataaagttatcatgagggctcctgaacaatgcacttgcattttcatttctatatagctttcaatgcacccctattatcgtatattcgttggtaatcctgcatatacatttttttttactaacgcgctgtttgtacctcacagctgcgaccgttggagagcacttgctatgctatcaagcaacccggcaaggggaaggggccaatggttgaagccatcagggcgccggcgtacaccttcccaaatatgtctgccatcatctggccacacctaggtgggttgcctaatgaacagaggagtagcttgcaagaatccattgccgagtacgacaggcaggcgaaagagagtgcagtggagatcgagcgccatttcaggatagttgttgacaagcagcatatgctatgtcagcgtgtaattgatgcgccacaagcaaacagagcagcagcaccccaacccattgtgcctcagcccgcccgatgccaagaagtcaaccggaggcaaagcaacgtgcaacccaccggcgccgaaaccaatcccaatgaagaggatgagcagcagcaatagcagctgcagcagcatgggtgcgtcgctaaaccgagtttgcttgatcaacacacagatcaccctaacgatcccacgcaagtgagccggcccatgcatgcaaattgtgccctacgtacctcctgtgcgtcatgatgcagcagatcaggcccagtcttggattgctgactcaccggttctgacacagcgcacaccacccccacggacagcgcacccctcacaactgaggaagttgccgctcaagatccaaggcgccagacaccgtggaagacacactaggcgtcgaggctgtgtgtgcgattggtattgatccagttgcttcaaccggcattcatatggaacatgctactagtgccggtgaacaacaatctcacccgacggaggaaacaactgagctgccccacgccgaagataccacgcgatgtaaggagaattagttacccattatatcgttatacatacatcagcaaagtgatatccttgtagtacatttcattacttcgcagcctcgcaatttctttccgtcacgccgtcaccgtcatttgttctaccgccggacacggacatgatcgacacacaagtgaacgagaaaatcaaggagatttgcaggctcgagggggctcctacattctccgtggttgtattctcaaacatcccattcgtcgagttcacttgtgcttcattgcatcaaatcatattctcgtagtttgggtttcctctggacacatttttttttgtcatcaacttgagcatgagcacttagggattgtctgcttggtcaaacagtacgcaccaaaagtttaattctgaggcaatatgtgaggtgttttctccagttgcaaactgcagtaagatagtcatttattaacttcactgatcaaggaaccactaagctagtggttcaaataaacaacctcactggaaatggatgagaaatcaagaaaatatcattatgagtaaaatttgaactaaactctttagttcattatttttgttaggatcatcacaaacttttatctgctatagcacaatctaccaaaaattaaaggaaaaaattaactaataccaggaaaactctgtactatacttatcacaatgacacagctggtagttatcttttaactgcaaaccttttcttacccaagtttacaactatctgtccttttgctacatatcaaaggagcagtcaactcttatattgtgctgtgctttgatggttcatacagcgatacacaggtagatggcagttaaaattatactttgtccgatcgtcctctactttcggttaacattttttccccttacacaattattgtgtttttttggcagcttttgcccgagaccatgcctgacaccaacgacgtaaattcaacgccatggtctctgccaaagcggttcatacaagagccggcaatatttgtttcgccggtggttgttggccccggtatgccgtcatcggacgtgtcgcttagcatccagctcaggcacttcttactgaccaatggtggtcgtatggacaggttggtgttcatcatcaccttgatgatgtgcatatggtgcatcatattttttcgcggaccaccttttttttccttgcttagattacgggtttacatgttaatatttctggtatgcttgcagcgtgaaactgctagagatcgacagctctgttgcgtatggaaacaatgtgctggaatcgttctccgacgggagcctgacagaggagcttttcatagacgtgttcagctcgattctattcaaggatgacatgaagtacaggctagataattatggaaaaaggattttcattccgacttccatatcagtaacgtgaataacgccaatttctactgtattcctttttttcgtacggtgcagcaacatgattgtttttctgttcttttttttcgcgagatgtgactcttttggttcacaccaacacatggccacacttttttttttttgcagtttctcctgaacattgattttatcaaacaaaatggaaagatacaaattttccactgatgctttggccggaaacttgcgcgactacatccagcattggttagttattaatttttgcataaagactaatgccatgtctacttttttcccctgcatcgagcatcttttaaacccagcaatgctattgtaagtttcgtttctttacttccaaacactgaatggacagataatggttcctgtgctccaccactatcactggtctctagatgcaatcaacattgcacacaggctggttgacataatggatacaaacaactacactttgctcggaacactggtaagcgaccaccatggtgcgttggccaaacgcatcgtcaagcgtctgagcgatgcgctgcaggcggtagtgccgaagagcttctgcaggttcggcggctttaggaagaacatgatggagtgcccaaaaatacaaatttgctccatcgactgcgccttctatatcatgcggttcatggaggcttacgacggcaacatggaatccatcgagaatctttccatcccggtaactatagcaatcacccccttacatttgtatactgactcattcgtcgttcatttccacactattctataccaattcacgtccaacatgtgttttgcagactgactcggtgattgtccggtcaagcaccctgcaccagctgatgttcagcgagtacaaccaagccgcgcctctccattccgatatctagaagttccgcggaactgatgttatcgatcctgcggcctaaaaaaacagtcatgctttacctttttggaaaaactttttcattgggatacatgatgtctttaccatagcttagaactagtgtggtctcactatatatgtttcttttggtgtttgtcactgtacatttcgaatggtactggttagtgtgatgaccccttatagaatgtcaaggttggtgcatatcctgacatgtgtttttgctcggcatgcattatgactattggtacctgtcaacttcaatccactagtctgaaaaacaaaaaccctattttttgtgtttcctcctattggagtcaatttttaactcgcctagcacaaccaataaggtcctgacttcggcaaggtacattcaatgaattcaccagagtcaacacacaagttactttttaactgaacatgtataccccactatctatgaggaaaaagaatccgtgtttccactgtgagtaaagttaaaaaaataactcctttttcatcccgcctaatgttttcaaacacttcaaaggttattacgtgaagagtcaagcaattgcccaacaaacggacgtagcttgcttcactggaagaacagaatattagttaaaaaaattactctcaaaagcacaaatcaatcttgcaggcacgaacccgatgatgagtaaaaaaaaactagtttcgcgtatagggggcaacctgtacataatccatccaagtttacgaagcattaagttaaagaattactcgccattcccatcctgaccatcgatctgctgagattaaataaaaggattcaagaaaatctatgtatacttactcgtacgtgtgcccgtaataatagttaaaaataactattagtagcaaacacactaaaattctccgtggtgtatccaaaagctttaactatcggctagaagtaaaactttaactattattgccacaggtaatatcagttaaaatttaactggcattcaaatctacaccacgactgtaacatacccaagcctataaacctgagaactaaatttaatttaaatgcatcatgtggttgtggagtgattttaattgtttttggatcttaatagtaatatgtccgtactaacgttacggtgtcataacattttttcttaataagttattaaaattcgactgcaatgaaaataattttcctagaatctgtccatttaagctttcagtccaaggtcatatataaaaaagaaatattatgatataacttaaaattatttattcaagatcatcaatgattatatctaatcaatttaatatacactatatgaaggtcatatatcaaaaaaaaatattatgatataacttaaaattatttattcaagatcatcaatgattatatctaatcaattcaatatacactgtatgaggacaatgcatatccacacaaaaaagaatggttgagttattcctcaagaaattaagatagacaagtatgaatctttttttggtaagtatgcaccgttaacgacccaactgattactacaaaaaaaacattgacttctggtaaaatatggttgaattttgtcaaaaatttaaagtcagttcgaatttttaaacttgctgaaaacacaaaaccaaacatttttgccagtctaataagtttgatttttcttgtaaaccctgctggagagtaaacctcaaatatttataacaggacgtattaacaacaaaatatataactcttcttatcattattacttcttttgcatgtcttaaatcaatctcctttactgaaacatatattgtcttttgattatttgatttgcattatcaaataccgccgtgactataatactcttttggttatcgctgattcaagcattcaagctaagtatttgtcagcaagctgcaagccattcctgatgcgtttctgctttccagcggcatacatccttccgcgagccaaaagttctatcaaggccatctgaagtataaatagccagctacatcctttgattatagttgagtcatcatgtgtacagaaaaaaagaaatgcagtattacctcatattatctttctactgctacaactttattaattttaatatgtttgcttcgtcgtagcatccgccactttggcacaaccttcatttaacattgtcaagttgtcaacctacatgctacagcacagcctcaaccctgcttccatgcatagacaagctctcttccaatgccatttttggcctcaaccatgcttccatgcttagataagctctcttctaagaaatatgtccttttaatataaagacctaatgagtttcagtgttattacatatctcttctatataggaaatatgttgttaatcaaaacaatgcaaccctgatcggcaagaggcaaagataaatataccatccagtatctcttctgtacaggaaatatgttaactaaaataatgcaaccctaatcagcaagagacaaagataaacatgctatcactgaatgtgagatacatatttatccagaacaagtgatgtcaagaaacatagctttagaaaattatctgtataatatttgtatgtttatcttccctaacattaattttctaatcgttggattcagaccatgtcccaatccactttacttcccacacattccaggccctaatcttatatatacatctcattacactatgtattgattgtatcagtacattctatgtcattgcaaaggcaagtttctctacagactaataaaatatgtgctatttgtttcttctgtagaatgatttggtctgacagaatgagaagtaaacaaaaatctgaaaagcaacatatactataaggaactgaacttcattcaactaccactacagagtgagactgattttacttggcactattatggagtaccaatcaagtggaagccgcagccttcctgaccttaccttaatatatgtggtatttgatttaacaaattaatccaccgaaaaaagtcaccgctataaagtttcagtgtctgtgatcaagacgatcagatcaatacacggtggctgccaagagtaccttcgaggggcgcaacaacccacaccgaatcagctacaagggttttttatagtatagatagaagcaacttccatccatccaatacttaacttattttatccaagtttgcatggcctagtgaagttataagtttggaatggagtatacatgtgttcctacttgccctgctgccgcacctccatggcaaacaacaaacagtactatctgatgctgtctacaaaaatcttagaaattaaatgggctgcatataactcttcttcccctgcaagaagcatttgagtgaagccattaaggaatataacaaaaaaaaattctgagaaccattgtacaaaagctcaatgaaatgaaattaaggagtacctgccggtgtactggatgtgaagaacagatatatatatcatgcaatggcatgcttaaataagtgtcctgacaatggcatctcgtatcatgccatattgaaactaattttaagcaaagccattatgccattcacttccacttcaagtacatgtatcgcagattatacactaatatcttatgagtcccacttccacttctggtttgcataaatgaacccatattcacaaactacccaaaagtaaagttggaataccttcgcctgaataccaatgtttctacttttcagcaatttggctactgaaacagaaacaaattatcaacaattccttctcagatatagttgtaaagatatttatgcatcatggttcaattgcaccttatgagtattgacatgaaaatggataagaaatatcttgcagagatgcttctactctgagtagcagcagacgtttacctgcatgataagcttccgcatccaaccagtagatgaagaaacacaaccaaattccactgcagaaatcttgcgtttgtagcaaaattccacacacggccttctacatattacttttggtgctcctcatatgcagcaggtgctttatatttcccttaaccagttgtcctggtaaaaagcaaaattaagacgccacaacatctagtcatatgtagataaatatatcattttagccaactaaaggtttggataaaatat

SEQ ID NO: 4644 - DNA, 8056 bp, Oryza sativa
tatttttctaatttggcatatttgtagtggcatggatccaattaacccgtaaaaatatgcacgacgctgtgtgtgtatttttcatttctaataaagccagggtggtacttatctcgatataaatatttggctgaaaaatatcgctgttttatattctaggattaaaaataaactttgatcaaaatttaacttgtaaaaaacagcgtactatataatgctaaattttctccgagagtaggcctcactacttagaaaaaagatttttacaagcggccaagatcattcttactatacggacggctgttccacctgtagggcctatgaaaattgacgattttcgcagacggtccgcctgggaagattattttcctaggtggattgtaccatgatgcgccacctgggaaaaaaagggagagcacacctgtgataagaaggagccgccaccttgggaaatatgcgccaacttttgatttttcccgccaaatttttaataatatttttttatcaataatgttgcaattaattaattaactaatgcatacacaatattaggaactaacaaacatttaataccgacaaaaatacatatattgcattagtgaaaagtatcgtgaatatgttacaacattttttacattgtcactgtggttttcactaacatgaactcattgtgggcctgatcgattgagtgacctctctatatatatatactcctagggaaatggttctatactcctagggagtacgtactcctgctctcatccaccgttcatcaaaagcagtaccgatcctggatgttagcggatgctattgttgaaacccgttttgattttcggtaaaaacaattcccgtaatactttaattatcccatgtttatcggatcatgaaaactgaccgcatatatcaaatgagtcccagccattcgtctttcaccggcgcgacgacgacggcaaaatctaggtgggcatctccatcgtcggtggctggtttgctgatcgccaccacgagcggcgtacccctcgtcgactctccacgacgtgcaggttcgtttgtttttaacgcgtttgttttcattcggaatttcggatgatcacccgatcgcttgttctgattccgtgccgtctcaggatcatggtcggggcaacgagacatcaggcgctggtgacatcctggcactgcttgtagcagaggcaacgggagttcaccccgatcgcagatcagagcagcccatccaagcggtggagaaattataagtagtgagggcaactccccacaattgtctcgatgatggtaagaacaagactttccagtccgatatttcatttcatattcatcaatggcggcgacgacaacacggcatcgatcgatttgcgaagcctatgcatcacggcatcatggtggcggcgacggcaccgccgcagcaatcgaaggagcagagaggcggctgcaccacagtgcgccgctacgactcctcgctaccgatgtggaagaagaatgatgaagctcctaattaactagttctttgctccatacagatgcatgacaaatacaccattgatggtggccaacaccgggcagtattcgcatagttgcatcgattagctgatgtagatgcagaaaatgtggatttggcagtatgaaaattctgtccaaagcagcttgtgcaggtcaagaattgggtgtactgtacattcatttttcttctttttcagaatggctaaatatgtatgaatccatatactgcctgcattattgcaagttctcttgtgatcagactatgcttcaatttaatctaaatcgaggaaagaactttctattctttaaaatttcatgttcacacctgaaatcagaaaatataatttgtggaagaaattaaatagtatatcagtacactcattgaaagaagagtagtacaaacttgtttagaaaagaactcgggatatactcgttccaagaaattaaatctagtatatactcagttccaggaaaaaaaaagtaagtatatcagtactctttgaaataacagtagtatatactgatactcacctaaaaaaatatactgatactaacataaaaaaaaggtactacttacttaaaaaggtatatactgctctactaatttaaaaagtacataccgttactaattgtagaaaaggtatataccgcttctaacctaaaaaggtatatactgctctactaattcaaaacagtatataccattactaacttaaaaaagtatatacttaacttaaaaaagtacatactgtactacatatatacatactggatattacaataaaaaggcatatactccagcaaacaaaaatctagtacatgctagatcataaaaaaaacaatatatactagatcctgaaaaagaaaaggtatatatatactccttcaaccttggttctggtacgtacataccgaaatgcatggatgaattattgactagatacggatgcacatcagctgatttatgtgccttcgttgcccatgcatgcgggaaaaaatattttgatttttgtttttcgaactagctcatcagttagctattggataatccactagggggagggagtacctgcacctgggtgtacagaagagtcatcatatatatatatatatatatatatatatatatatatatatatatatatatatatatatatagtaaatttgtttggtgctccatggtgcccgggcaccattgttgaaattgagtatatacccaattcaaatgagtatgaaactttttcaattacttaggtattaacattaactactttactaactagtttaaagcaagtttgaactgaatttgaacttgtttttgttagattttgattctaggtatatagcatccatacatataattagttaggtatgtaatcatggattgtgaaataaagttaaatttgagttgttttgttgataagtataggtatgaatcaaattattataactaggtatatactcacaatttgaaaattttgaaaaatttgagtgattttgtgcattagataccatggtgcccgggcaccatggtgccccatatgagtgtcctatatatatatatatatatatatatatatatatatatatatatatatatatatatatataaggaaggtgacaataggcatcgatccacagagagtaaattaacatgagatatgcatgcacatattaattattgatcagataggtagctgcaggccagcacgacacactcgatttgcatatgttctcgtgcagttgacggcactcctgatccaaagcactgtaagttcagacttcagagtatctatcgctagctaccagctccatcgtttctttttaaatatctgtggttcagctagctagaaagaaattaagatcgaagcccaagtaccgtatcgaatctgatataaggggggaaatcagtgatgcaggcgctgcagtcatttcagcgtgtctggtggcatatttgtaggtgtataactgaggtgcacatagtagttgcaagtttcttgcctggccaactatggtaattctccatggcatatctatggaaataagtttaaatgtgttcaaaacaacatggataagtatgatccatatccatgataagcttgtcaagcaaggcaaagtatttggcatatataaaaagataaatagatccatttgagtacaaacaaggtattctaattattccttcattagaattacatgtgcaaattttgtaaaacaacatgtttgccgaaagcttgagtttcaatatattcaaagggagggagggtacttgccttgattatgatccttaatcgggttaactatttactcaacctccttattgatgacatccactagtacagaaaccccctataggtgtcggttgagaaccggcaataggtgccagtttctctgccggcaccaattggttggcaccaatgacactaggttattggtgtcggttatagaactggtacctttgtgctctccccgaatttcttttaaaaaaggaaaccacctccaagccgagccaatgctttctatgtctcacatatcacagaacgtttttgatcctgaagatttaggcccccttcaaacattcgcaaccgaaacagcgtgtcagcttgagatgcttttcgctccatcttatttcaatatgatggagcatctgattgtccacatcgtccctcagattatcgaaattggtcccctatacctacatcagatgtgggcgtctgagaggtacatgtcagttctgaaagggtatgtccgtaacccagctcatccgaaggaatcaatgataaagatattacatgaaggacaccacacccattggtataacccccgttgaacacgagggtcagttaactgggaagtggaccatagacaagaaaagattctatgataacgactacaaagctgtagcggaagcacatagcggcatgctgcaacaactcgccatcctcaagccgtacattgagggacactgttgacggtcgttagcgatcagtttcgaccgtcaatattaccaaaatagaggagaactagtatttggttagaacaataatattccactagtatttggttcactaaccttttgcagagaataaccataaagtggaggagaatcgacatcaaatcagacgataaatcaatcggacgatgtcgtgaatcagacttatgtataaatgggccaagaactcagaaatgacacgacgaattgggccaaaattcacaagtctgcggagaggagcagtagagtaggccaccagcgaagttgttggctggatgggcctgcccctggtttggctgttggatccaggttttggctggacggctgagatgaagcccctatgacggttggagggtaattccgaccattccaactgtcagaaccgtcatagtttagctataaaagggcttcatctccttacttcttccacacacctcaagcaagagctctctcatattctctcaagttagtttagtgttcttaagctagtggaataggaatagagtagagatcggaatctggaagccttcggaagagttcaggtattgctctagtagctcttctattctcttttgtaagctttgtactttatctagaatactcttctttatacaattatggtattgaaatactttccgagtatatgaatgccaactttacatattgttcacgttatacttattatactgctagcttatctgggagatgctttggtgaaggtataatgtttgcgtatgcaattactctatgccatgacgatgatattagagtagtatctggcagtttagacgtggtgtctaaattacggggtatcattatggttatatgctgcggatgagaggtgggccgctgatggtgacagctcagaatgggtattcctccaggcgtgtatatagtcctaagttactttcctgggaagggtactcctccgtatttagccccggttgtatggtcatgacgggctgtcgtaaggagcttggtcgtcaggggtggcttctcaaagtaccaggagggcatcagatagagggtattagctagtatatcaaataactagaatgtatgtatactatgtatagtagaagtataggaatagattctctttctcttttctttccacttagcttagataatttagtatgagaatgagtagtctgcttgtgtgtcactgtacccttagattatcttaacccctgcttagactatgactattacaagtaacaaataaattattagtcaagttctctataccatgatcttgccactggattaaataaatacgatacacttggaatactctcgggtgaaatgctacaatggtatattcgtgcgcttgcggatgaactttgtaaccataatatactaggagtatttctgcgccattgctgggaattatatttctagtaatgtcgttaagaaataccaacagacacatgaacgagataagagcctggaaccctagaagggcggcgacttggatctcaaaggaacataaatgcaaatttcctgaatggttgaaggaaaaaaacttgccgttcggtgaatcgcttgcactggctggcaactggcccaagtagcctcatgaactcatggcaattgtacgacatcggcggatttatgttttacacataggcaaggacaagaaaagcgcaggttagaatagtggagttcgtgtggaggcgttggacgcaataggggagaataagtcatactacggataatacaagacatttgggagcttgactatggcattaacatccaggtcccggagctatgatgccagtgggtcaaagacacaacaggcctatccatcgattactacggctttacggttctggaacgtagtaaactaagccacaaggatgatccatgtgttctcgctaatcgtgttgcacaggttttctatgtgaaggacccatctgacgagcggatggacattactgtaccgggaaagcaacacatctttggcattgataacactaaagacgcgtcagtttacaaccaatacgacgacgtcccattattcacagatctacctaaccagatcaagcgaattgagacaacccttgacgaagagaagttttcgtccgtgtggaaggatggtgttgcgaaaattgtaaaacattagtatatatatatatatgtatatatatatatatgtatatgtatatatatatatatatgtatatgtatatatatatatatatatgtatatatatatatatatgtatatatatatgttgttgtgtacaacttgtttttgtaaacgattaatgtacccaacttatggctcccttcaaacgattaatgtatcaaacttatggttccatgtttatccatactatatgtgtcgttctcaatttatatggttgaataatttatttctggtaatcatatggttgaataattaagatgaggtttgatcaatatacaagcgatttaattagatgcgattgaaattcatttgtggttaaataaatatatttctatggttgaataatttatttgcattaatcatatggatgaataattgtattgattaattaattaagttgtggtttaattaactataactatatttagttatagttaaagaattatagttaaataatttatgggtttaattaactatagctatatttaatttgtggttgaataattatattgattaattaaccatattagatgggatttattaatttatctgcatttatttttgcgtgcgggtggcttaagccgtccgcacgggataatatcatcccgtgcgtgctacttaaactgcccgcacgggaatatcgattatcccgtgcgggtggcataagccacccgaggcgataatatggatatataagcactgggcgggcgtacgaaatttgcacctacactgcccagtttttcaccgccgctgcctcctcaccgagcaccaaaagacgccgccgacctccaccagcgccgtcggctcatctcctcctcgcccttaacgccggggacctcctccccaaccaccaccgttgccgcctcctctacacctctcctcctctacctctagccatcaagatttgggccgctgctgccgcctctcctcctcgccctcaccgccggtgtcgccgacctccaccgccggccacctcctctgcaagccattggcggtaatcatttttgagttttttttgtgaaatttgtgatatgtgcaatttgtgatatgtgcgcaatttgtgacatgtgcaatttgtgatatgtgaaatttaggatatgtgcaatatttttatatatatgtgcaatttttgatatgtgaaatttgggacttagggtgatatttatgaaatttgtgagatgaccaattatcaaatttgtgcgatgtcaattgttaggcaaaaatgtagatgcaattttttttatatgtcaattttgtgatttttgggatataggatatgtggtatatatgtaatttttttgataattattcatttatatatggatttagttcctagcttatcaattcatcacataatacgaggtgctccgggtgccatgttggttcggtcgggatag

SEQ ID NO: 4645 - DNA, 20233 bp, Oryza sativa
accagttgtagcaaccgtgaccaacaaatcgagcctaaagaagatctttagtaccggttctaaaatgcatattaagtcaaaaaaaatgtgggggatacatattcaaactcaagacctctcacctcaaccctcacacacctaaccatcccaccaactccacatatttgacttggatagagattatttctttttaaactaaccctagaggcatgtttagtccgggttggtgttaccaactgggactaaagatctggttggtgtaaccaacctgtactaaattaaagatgcatttttactacctattggtaacaccaaccggaactaaagatgtttttggaacttggacttttagaaccagtactaataacatattagtaccagtaccagttcttaatctaaccgatatatttgtgtttttgtatcatgacaaaagatcagttatccagtagtggataagacatttttttgggtatgcaagagcctttgcatggatgtgaagaagttgtaagtatttgaaattatcaaaacattcattctgattccatgtggatcaataaggtgagagatgattgataatatttcctttatatggacacagaaatgcatgcattgtactgctgaggtttggctactggtgatactacaatggtagtcagtagaggcttgctcgcaaaagatgagcaggaatatgtttcatttctgcttatagaacaactactagaatctgtgaaaaaactattaagatatgtagtgcctccactgaccacttgtatcggtgttaattttctatgccactaggccattgccgataactgcatccactatgtttttatttcactctcataccatgagagattcaggtgattatttgtatccaaagactccattatttgtatcctatattcaggtgattaatcatttgtatatacatataagaagatagaaaactgcccatcgatgaaaccgtgatcctcgttttccatgctagtgtcaaatcattatcttttaacacatccttgaccctgcgaagcagtgagcggtggcggcagcaagcaaatgtatcaggggtgttgagctctagctcatgtcggcagcggggcttggttctagggggtgatagaggcagagctcggatgtgagggccagtggccggagtgactagtaaagcatgtggtcacacctttgccgatgcctcctactcccatcacaaagcaagatgatgtatacttggaatctctatcttctctctcccattttgtttgttggctattgcttgctatttgctcctacttgcaatgagaaaccatgcgctgaaaaggaagggctgtatcctaaatttgatggggtatataaagagttggaaaaacttttttattgaagatggtacaatgttttttttttgttctgctgatcgaatgaaatggaatgctttaaaaacataaaataagctttatcattcttagccaattacatcaagataatataattactctaagactacttttggcattaacataactagaatgcacatacaacctattattattacataaagagaaatattatgccgcagcagactataacacaagctatttcttcctaacaccccacagcagcaacacttgggctgcaaaacaaaaaaggctgtcctaacgatgcctccgagaaagaaaatgacactcaaacgtgctgccattgccatgaccgaacctgtaaaggccaaaacatatgtttctccttcattagagagcaaatctttgactctaggcagtgccttcaacatggaagggaaacaccattggcaggaacaaccagctaagggctgtcctaggaaaagatgatttgtagaggcatgatatattttcatatgcttataatatcttttcatattatcttttcattatgtgtcccatggagctccttatctaccgatttgcaaaataggctatattttatagatatttggttgttaaacctcgaggcattttgtggacctcagtttccgtttgaggtgtagccttatcagcctcaacctgcttcagttactttgaggcagagataatcttttgaggcagtgttctctgccacaatagacaatttggggcaagagtatctgagacatggggaggctatctcgtaatctcttttgagatagactttgaggctgatttggttgctttgttataaaaacggcccagaaatcacatcggaaaccaaatcgcggaagaaaacgccataggagatccaaacatgatgacgacaccgaggtacgatatttgataatggagttcagccgaggcatacatcttcggggcactgattacgggcactccttcccgatccagtatattagagcgtatcaaagttataacgactcacggctggtcgccgccggcagccactccctctcgctatgctaaatcgccatgcggttacaacaggcatgctcctctatttatgagagatcctaggatagactccgactcatactcgagtcctaatacctattacaactccaagtcctaaattgtaaccgactttgtatacatattcgacataaactctaacatgtttcatgttgtctatgatcctgtagtgcttttctgttgtggcatgctaattttctagtccaacatacggagtctcgctccggtgctttctacttggagtagaaactaatttgagtcgttgatcatatctaattgtaggattgagatctatttctactcccaccagagttagtggtaatatatatgtggaggggtatattcgtccaaggatcataattcgcgtaggggtattatgtaatttatcagtatcgacgccattcccatccatccccgcctctgttgccgtccatctccctcgtcgcctccgtcttccatcctagcgtctcctccccctccagcaccgtccccttctccgctccctccgtcgaagctcgtctccacgccgccttgtgagccccctccgttgccgtcatcctcccccacccccttcttcagcgagttgcctcacatcgtcgcgcctccacctgccaccgccgccacattctcctcgccatcagccttctccgccacatcacctccacctgccaccgccgccacatccttctccactccaccgccgcccccttttccactcccctcggtgatctcgcatctccatccgggatctccagagctccgccctatcccgccgctacccacgtcgacccaccttctgccgagttccacctcagaccctagcaccgcgccactcaccgccggtgagccttcgtcctcctcgctatccccttcctcgccgtcggccacctcccccacgctcggctctagccccgtccatctccgcccgccgttgctcccacagccacgtgggagagcccccaatccatcaccccacaagcggaggacgcagcctttggatccaatggcagcgcacgcctggttccccttcgtccccatgccgcctcaagcacctccatcggagcaggaggaagactcgccattggagaatagcggaaggtaatgcccggaaatttgcagtaagacgcgctcccctaatgcctcccctcaactttcaatctcaagttgttttttttttaaatttcgatttgatttctgaggctaccggtttcctgttaatctgcagcatgaaggatgagatgatccatctatatctgaacaactccaccatggcgttggcgatcctgagagaggcatgcttgctgggtgctccgaggtgccatggcattgggatgctagtgggagcattcggtatttgcaaggagcaagtgcgcgaagccatcttggaaggtacgtgtggctgcttcgttgtatcaattggatttggcgcgcaatgttgtgctattgaattatgatgtctaaagttgtcatctttctgaatgaaactaatgttcacctgttgtgggggctttagaatgggtggctattactagtggctatatttgcattgaattattatgccaccatcaattaatgacgagtagatgatgcatggtgcttctttcctttgaactctggttgccttttcaccaattatattgctcgttttggttcagtaaatgcactgtttatttcagaacaaaacggttaatgttaacagcatttttacttatttactctgaaccacctgctgatcttgttttttgctccgtgattgttgtacatatcatggttagctagctgtaacagtttatttctcaacttgcccttttgacataagtgctcatggaatttacttgttcccatgtgatcatctgatctcttatatgtagttgcctcctctttgtataaaggaaagaaacttgaataattgtaaaaggcaacaaaggttgagaccagtcaaatattgaaggggtaaataaattgttactaagggcctcacttgatgaataaaagatagcatggtatggtaattgtcctttatagtattgttttgcatggctgattttagcatgagaaaaacccatcctcttggacaaaaatccatttatatcgtggttggtacttggtagcagtggacagtctttaatcttgttcagtttggacttgatcaaaattcctgctaagtcttgtcgaaatatattcatatcttgctgcataaagtaaagggagaacattttatatgattttcataatgggaagctttggtgcaaaatatgaatagagttcattgtggttgcctgaaatcattgtattgatgtcagaaatcattgttgattcacacagataatagacagaaaagggaatgaattgagcaacccatataccaacgttacatgtccttcagttattggatcaaccacaggaaggttaaaaatattgaccatataagaggaattttgcttaagttctaaaagaatatctgaatcacatcgtaattcataaggaatttcgcttaagttctaattaactttggttgatcatgttgcctgactcactacataatatttggagtgttaatgccaattcatatagtgctctactatcactattttagtagtgcatatactgttaatcaaaataatttcattttgcaacttgtatatatatctctacatgaggactttgcaaagcaacatctcaggggcctacaatgagttgttgctcaggtaacaagtttcagtatcaaaattcataatatgttcactacaggtttcaggttcatatatctgaccaaagtactgtccttgccagattcagttccaaaatgagacacagttctcaccaggattacaggtgacggaacactttgtcgtggctacatagcacttgcatgcagaggggtagcagcttatgaagccacctcttgtttcatcagaggtaagattgagctaaagatgatgaatttagaaacttcataagctggcatgaactgaacttactgacaaatgcttaatttagaaacctgacaagatctcacgaactaacacaagaaaatctggtctttatgcacgaactttgggtgttcagccagcaggacgttgcggagctaccaggtctacttcagcatgaggaagcagtcaaccaacaatatcggcagcaagcacatgctgggaatgagactgtgttaatcttattaaatcaaaaaattagttcatgttatgccatttatttagtgtaattatagttatatatgtcctgttgtatgcttatgctgccatcggccaatctatgccgttaggatatgcatgtaagaactcagaagcggtgtatcaatcgaaaatcgattgattttttttctcacaaaacaagcatatgatagataaatgatcaattgaaaatcggttgaatttttttctcacaaaacaagcatatgatagataaatggtctctgatcttttcagcctacctaatttttttctccaaaacaaaccgttctgttttttattctatgcgcggtcgacaaaaaaaccatgatttcttaaaatcgacccaatctgaacgatcatcctgggcttaataatttttttgtccaaaataaaccgatctgctttattctatacgcgatcgaccaaaaaccatgattttgaaaaatagacccgatccggacggtctcggacttaatatttttttccataataaacggttctattttattctatgcgcgatcgactgaaaaaccattttttaaaatcgacccggtccgaacggcctcggacttatttttcttatccaaaataaacagttctgctatattctatgcgcagtcgaccaaagaaccatgatttttttaaaatcgacctggtccaaacggtctcaaacttaatatttttttttgtccaaaataagctttattctatgctcggaagacctgaaaaccaattttttttaaatcgaccaggtccgaatggtcctggacttaatattttttttccaaaataaactatcctactttattctttacgcgatcaaccgaaaattcttgattttttaaaatcgtcccgatctatacggtcctggacttaatattttttctaaaataaaccgttatgctttattctatacgtggttttttaaatctatccggtccggacagaccgaacgtgtaccttttactacctagtagatgttcgacagttttttttaaccataacattcgatatttttagccgcatgatccaacatcaacaacggtgactgttaagtggctaacgggtccacatcaaaatacagtacaacaaacgaaggatgatgtccgtaaaatctgggagaaaaataggaagttacagtgagttacagcatgtaactgcatgtaattagcatatactataactagtataaatttgccttcaatcctcaaattggatatagctcagtgacaaggaagtcatgcaggtgacgcggaagtttgagggatcgattcctatgttcgcttgtttttgctgctatttcgtttctcatcctaagcacgaatcttgatgttaatccaatgacccagaaatcgacagtttttctctgagaaatctgtcacaagttatttagggcccctttgaatcgcagggtagaaaaaatggaggaataggaaaaacacaggattctgacaggatttgaagtgtaaaacagaggattgcaaaacacaggaaaaacacagaaatgatcgtttgattggagcgcaggaaaaacgcaggaattagatgagagagatagactcaaaggaaattttccaagaggttggagctcttgctaaatttcctccaaattcacatgcaatatgccattccataggaatttcataggatttagaaagcttcaatcctttgaatcaaagggccaaataggaaaatttcctataggatttaaatcctatgaaattcctacgtagatcctttaattcaaaggggcccttagcaattccgatccagataggtatcacgtacccaaaatccgatcggcctgagatgcggtggctgcgtcgtgcctgatgcgatcaagccaaaattaccaaaattacccttaatcagcccatgccaaaattacccctaatgcatattagggagattactaatctaccctttaaaataaacggtcaagattaattctacttggagtatatactacaagtagaaagcaccggagcgtgctccccaacatacgtagattagaggacgaggagaattctatgcgcgttgatttcaaatttattgaattttctggacatgatctcattcatagaactatcagtttaatttgaagtcattcatcctaggcagtgtcaagtcacaacttagatttctcgtctgacaagcttgatttaggatctttttctggaaaactttgtatacagaagttgtagataatgttgtaagctttccagcgaatccaatattaggtcaatccgatacattcaggagaagttttgccctttgaaacttgattattctgtgaatgggcggagatgctgattcgtttttcagtgggtaatagaggtctgcggatggcagttttagccctgtcacccaactaaacttaggtggaaatttctgtgtagttagtcatggagtatttctttgttcaattcggttggttgtgaggaaatgggcagatggagcgatgtaaaacatttctgaattaggtgtttacagcaggggatcattcaggtactcgattcaatgaataatttgctttcctgtgatctgtaatctgtgacaagagatggttcattatccttcttgagcatgtgtattgcaatgggcacataccactgggaattagttggattcccctttctgtgtatcgcaattggagaaattctctgtttgtcttgcgggagggtgcacactgcacagcatgcgaggggagggaaggacggacgactctgctcttaggacgtgctttgggtgaggggaggaaagggcatatgaatcaaatttttaagtagtacagataaaattgaggattgttattctctattttgttcaccaagcgcaaaaaaatggtttgattgaaacacatggttttttcttatgtactggtttgtttgctccgttttccaaacctaacccttctaataaactactccctccgtatcatctgttttatattatatattgctttcacttttgtaaaaacaatctttttattgtttgacctagtttatagaaaaatataacaacatttatagcattaaattagttttattaaataaacattgaattcattttgatagtttctttattttatgttgaaagtattgctagatttatctatgaacttaatcaaagttatgttaaagaaatttgacttagaaaaaagtcgaactgacttataatatgaaacgaagatagtagatatttatgattttaaaatttattctacttttcataaaacacatggcacaaacaagtacatttcattatctcaaaatgaaaaaccaactacaactacgtttgattagacgacatacctactttcttctatcaaaatggagcatgaggcattgctggtctatggattacaaaacagtatcatttagagaaaaaaacagaacaaaagttcaaagggaggacgggcgatcgactacgccgcgcgcgtacggcgcacgttctttgccaagatcatgtctagatgcagacaaaatggaggtgtggctgctggctatggcacggcatggcggctggggcaagctagggttcggtagacacctctgacatcggtgatgtctcacacatcttactggaggtgatgtgcctggtttttcctcttttataaatttgtgcgttctggtagatctaagggttaaaaccttgatgtcaacgttcttgaaggcgtcgcattgaaagttttctggtattgtatcctttgtggctgtccctattggatcggcttcgatgaataggcgatgacaaaatctaggcgattgaatgcttcttgctcagtttatatgatgttatcttccacttatggttcaacatcactcatgatggtgatatgtgtaaaattcgattgacaatgattgcctacagattttagagattccgcttttagttataggaagacaatgagtagatataacttgtaagctattgggaagaaataatggttatgtacattttcaccaaccattgatagaaattccctgtctttgagaaaatatttgaagtagttttcttgttttagtaaagctgtgatttttgtagttcgcatattcatgcatcctgaaatctctgtaatgattggttgtatatttttataaaatccaagataaaaataaattttattatctaaataaattgctggcctatatgttgggttacaataaaatccgtgctacgtggttgatatcatgcatgttgtcagtggtggtgatattgttcacgtagaagtgtgtgtagtgaatacaacttaacaactgtagtaggaggaaaccttcctggacgccatcaccgccagggactgaaactttggaatgaaatttcaaaaatacccccacccccaccggcaagcacatatatctcacttgaaatttccggggttttttttttcaattgtttgtgaatttgatcaattttatttaaaattaatcaaattttcaaataattttggtcaataaaaataccgaaaattcggtaatttcaggaatgttggacccttggctcacgctctgtcgccctgatgacgcctagcgaggtaaacacctccccctcacacacaagtgtagagactcgtcgctggcaagaaacacacccaccggagaaaataatctagccctgtcgcgatcgtaacaggagacactaatcatcgccacagatcagttttgccgacagtattggttatgttggggaatctggatcctctgatatccaaatgtggaccattgtcaacacaaaacttgtgcacttctccccaaatgcctcctattcatatcacacccctctttctctcactcatcttctttgattttagccactccttgttagttgctactactccacttcgctatgtgtttgtgcagtgtggaaaatggaagctacaagctagctcaaatatgtggtggtatagaaaagagttggataagttgttttcagtttttttccctcctagtacaattgtttttagcatgtcgtgtagtagccaaatgttacaaaagaggtcaaagagagaatgaaatggagcagcacacttaacaactgctgcatgcatgtggagaaagctccatctaattgcaatatgttttttttatattcatctgcaagatatacctagcgaacatgtgcatgcgtatgagttatatgcttacttctgaatattcatgcgttggaatagcagccatagttgcatcatcatattcagctgaagatgtacaagagtcagatcagaaaacgtcacatacgagatgaatcagaaaatgctgaatcagatctgaagctgcgagaacattggttttggtgcgcatgaagcagaaaatgtgcgtgcacatgcgtacgagtcatttagacaatgctgtgagaacgttggtattggtaaattctgtcacccctgtcaacacagattccggagatgaacaatctatactgatttgggagattctttcatgggatttgttccacaagatatattccctgatgcctcctattcatatctcgtgttgtaatttgttttggaaaatgaaaccaaccattccatgcctctgcacctgagggtgtatcacactgtaatacacccattatttccctccccctctctcaatcatgttctaaattcttcttggatggctcatgctgcctgccttgctattgcttgaatgagttgtgcatgtggtggaagaactactgcgagaaaaaaaaggcgaggcggtataaatactactaggagatagatagatgaattatatataactaggaaggtggcccgcacgatgcgcgggcatttatattgttgaaagataagattatagtttatttagaaattgtctcataggtaataaacttgggatcgaacaatatccttttaaaatgattcaggggttctattttcttaatgtaactcaaaaaacattcagactcttgaatacaagatggattaagttagtacaactttactaccgctagcttaattatcaaccatatcacttgtatacataccatgcaaatatgggtacaagcgaaaattgcaaaatcaaggaactcaaaatggatcatcttatgaaggcatataacgaacaaattaatggtaaattaaaacttggatttcccccctgtatataagttcaacaatttcatattttctccatagttttgaagaactttaaaaggttttggtgcatacaaatcacctacaccatcgctttgcttggtattgcaaaatatcaacattgtttgaagctaaattctttagtttttgcaagtttcattattttcttggaacaataattgtttaaaataagactataattatataaatttaattagtatgggtagtttacttataaattttgaagtgttttgaagtaaagtttttctatcatgtagtctggttatatcaataatatagttttgttcaataaattcaatattatttacatcaccagaattaataaaaatttataaaaccatccatgactacttaaaattttggtttgtctgatttgtttatttcaaatttagataatcacatattctccttctaatcggtgtgtttgtcattattcataataaaaaaaacactccttgtacagctgacacatcatattgtcactcaatcacatacaaatgtaaaatatttgtcattattctcggaccgctcattcctcattggtatcttccactcatccatcatcttataatagaagtatacaccatattttgtctaactatttagtttacgtaagggacaacaccacgctcctcctccctcatgcatgggacacagtgtccaatttttttccaaagcaagtttttaattaacacatgtaattagaatattacatgtgtaatatatgtgtatgtgacacatggtaatttttattctagcttcgccctgcttatatactgtatagagagattaattatattcaacctgcagtgcttgattcttcttctttctacattgcatcttcgcgatttgttttcatgttattaaaaaaaccaatcgttgcccattgatgatttgacacattttcattttagcgaagcagtagcgctataacatcatgatcaccttagctaccttaggtatacgatgcttcgtcatgcgtgtagaaggtaaagacgtcacatgtgttgtatagagagacaaagaggacttccgaggctagatctcatggtctaaataatatgtccaccggtttaactaaaaatcgataaacaaatatttttattaggaaatagtctaaaataattggtacataatatcatataatggtgttaactctatttttaaatattgtagatctaatttatttacatctaattgtaaagagttatatgttgacattcaatattagtaaagcaactattatgtaaagtttattatcatgaataataataattatagtggctcaactaaatacatggaaaaatggaaagggaaaaagaggaaggtcctcttgagttgaaggaaaggcgggtacgtagggagagaagaggtggaatcgtagtttaatctaacggcttataatattggacacaccaatttatgtggaaattaagggatatatgttttgttttttttctcaaattttgtagcatttggtaacttgagagcgttttgaggaactttaatggacatacgtcgtatcgtttggttgagacacttatataaggacaatattaaccggagaacatccagcacgttttgtccctaaattgttttcgtcagttttgctttttataattttgtaacataatagttatctttatactatattgtatttatgtaatacatagaagcaattatttataatgttattcatcaactgtaaagaatggtaggcttattttctttaaaaaagcatgcatactaaattaagtgttaaatgaaaattaagacttttttaattggatataggttattgttttctattaatggatgaattgggtggacatgaaagtccactaaatgcattggttatatagtctaatatgatttggtgtagttcgagatgcggcccaggaatccaagaattgagaatttttttacggtggattaattgttttttggattttaatatttgtatgttaaaattcagcagctatcagtgagatggagtaacctcagttttgtatttttcttcagaacagaagaattaaacattggtgctaattacgtctaaatagaaaaaagtacatttagttctaataacaatgattaaaagaagcaatattaaacacataccacataactgttgatcttcgttctttctgccccataatgttttcttgtctgtaaactcaaagtagtagtccgagaaacattcttttttgcttcgacctattttattattgtatcgtgataaaaaaagattttgagatatctttcggtacacagtacttatcatgttccataactttgattatttttaaaaaatgtataatgagtttatcttaatttttggcctaaagtggtttgccaattgctttgggattgaggcatgtattgagttgcctcgaagaaaatagtatttacataatagaacaatatattaaatgacatgtttgcaacaatcataccttgcatctagtagactcatctgtataccatagaactcacagccattgtaagattaaccgcatcctatagcctaatcactcttactttaattatacacaatacttatcatgttccataactttggaacttttaaaaatatataatgagtttatcttaatttttggcctaaagtggtttgccaattgctttgggattgcggcatgtattgagttgccccgaagaaaatagtatttacataatagaacaatatattaaatgatatgtttgcaacaatgataccttgcgtcaagtagaatcatctgtataccatagaactcatcagccattgtaggattaatcgcatcccattgcctaatcactcttaatttaattgtccacctatcattttttctgtgttaacgcagtaatcaaattgtaaagtaccatgttatctgcaaatgttcatatgcaatataatatatacatttatgttattcaatagatgcaatatagtgtagccttaattaatacaggatagcattattgtgttcttctataggtgcacgattaccttcttttgccaaatatgagcagcctgaattgactaatgtcaccaaacacctcttatgccaagatgagtcgccagatagagtcgtgtattgtagagattaaaataccatctggtcgtggtgttgctgaaggagataacactggtggagaaaccctttgtagtcccggttcgtaacccccctttagtcccggtttccaaaccgggagtaccaatccgggactaaagatcgctatctttagtcccgggtgaaataaccgggactaaagatcgagctgacctttttttttttcatggccctgttgctgcatggtttatatatatatatatatatatatatatatatatatatatatatatatataaaccatgcatatatatgtttcaatacatatatatgcatacatatatatatatgtatatatatatatattatattatattatatgtatatacatgcataatatatatgtatttatacatatatatgttatgcaaatgcatatgtatatagatatatatatgaccaaaatatatttacattatagaaaatgtgtacacatgcatatagaaacatatgtagtcatgtattaattacaatccattatatgtcctagctagctagctatcatttcgacgtagtagtactcgctgctagctcagaagctaaggaccggtgaattgtgtttccgtcgtagtagaattcacccttgggattaaggatttcttcgttgatgaatcccatgagttgttcttgaaccgccgtgataaattccttgtgtgtggtcaggttatccctcatgcgaataaactatatgaatgtatgaaattgattagtaattaaacaagaaatcgctacgtaatgaaattttgaatttatttgtacgtacatcgagctctcttgtggtgatgatttggtttgcaaggcagtggcaatactcgcacacgtaatagccgcacaagttatttccctgcttttgctttgcgcactacaaataaatgacaaacaacgagagatctaattaatatacacttgtatgtatttgaatcggagaaatataaatgtagagcatgtgtactcacaggaaatttgaacttccgcctaagtctttctctccatttgccgcggaccaaatgacggaaccgataccaagccctacatggagtttaaagctatgattcgtagtagcaattaacataacaagattttcttaattaacaaaggaacttatgacggtacctgtctataagttcgaaaaccttgtcaaacgtagactcttttttatccattgagtcatatacgttgacggtgcaggcctccaggtcgaagagtaaaagcacccagtggaatctgcaatgtgcgtgggatgcattacatatgaaacacttagcaagttcgtacgggaatgaaatttggtatgtaggaagacagtaaaattaaactaactctgtgttgtatggcaacagtatgaacgtcttgtaatgctgcgccttcaggagatggacgagattgtcctctgtttcttgtggatattggtcgagcattgcgacgtttactctccgagggtcgatgaatccagtatcgaaaaccctccgccgtcgggccctttgaatctccattctacaacgataaaagggagtatattattttctatagtctacttatatacaaggacctaatttattaaaggagacgtatagtaagaaatctaaccgaacgatatacttacaaaatccagcaactcataatagagacgtcgagggcgtccagctggtatagttcgtagattcccttgaaattgatccagagaatgtcatctccttgcaagaagtccgtgtccctgatcctcgctccgatcatctctctaccggcggcgctcatctccatgtacagctgatggaacttgtacatttgtgtgggtagggactgcagcagctcaggcttgacaagcggtttaccgagttcgtacatgtatttcacttccgccttttcgattggtgcgactcctagcaattgatccgtagttagaccggtgtcagtaataaattgttctatcgtcatttctttaccggtaaccaacggctcgatctcctggtttggttgctctccaagctgagggactggtttggactttccagaagatgctttcttcagcgttcgctcatagtccgatagcttgatggcctccttgacagatgcagacatacccctgaagaagttcctgacactggggtctataggaatcttcttttctggacttcgaggcttgaattgtctcttgacttctgatgcaacgtaagcgtcaagctcctcttgcgtgcaatcgtaccccgggtccttgttcttggcggcgtcaactttcgccttcttcgttgcccttgtgtgggcaggcggtggagctggggggcccttgagtttgaaggtgccggaagaggagcttgcgggggagtaggtgtaggagcacgaggaggagtcggtgcaggatcctgaggaggagtcgatgctggagcctgaggtggagacggtgctggcggagcatgaggaggagacggtgcaggatcctgaggaggagatggcggagccggaggagatggtgcacgagacgccgcttgtcgcccagggaggatgatgtaccgcctgcgccatagaataatggcatggcttgtgtctcgtagatgcgtctcaccgtctcctccagggtaatccagctcgaggtcctcgtacgcgccttcgaccaactcaacttcgaccttcgagtatcctgctggaatcggcctgcagtggtaagtacctgaagggtccgttgggatggccatgcccgacgccaccttcatgttgtgagagattatttattagtaatcaacatatataagcagcaactagcggaatggctaaatcttacctttattgataagttcttgaaaggaatatgcagctcacatggtgtccgctgagtgatgtcatcaacgggacatgtcgattcgtcctgtgtttgcatggcgtccatgctctgtgatcctacctgccccgttgaggcgcagctgctacggtttcctgacgggctcaccattgcaggaggaatggtcggctggggatcatgggaccgatgtgcggacatgcgttcatcaaccttccttgccacctcctcttgcatgttgagttcgtagctcgatacccggaactctaggtctgcaatcttcgcctcggtatctctcttgctcctcatccgactcctgtacgtgtggatgtcctccttgaaaccaatcttccaaggaatcacccctttccctcgtgttcgtcctggatgctctggagtttgcagggcgagtgtcagttcgtccctatctctgtctggtcggaacgtgccctgagaggaggcttccactgcatctgttagtcgtcgcgcagcctctcgtatctgatcgccgaagaccagtgagccatcagctgggttgagcgttccaccgtgagcatagtaccagaacttcgatcgttccggccaattggctgttgccggttcgatacccctctcaatcaagctagcctccatctcctcccacttcggcatcgcgacgctatagcctcctgaccccaagtggtgatggtacttcttcttggcggcattttctttgtttctttccatcatcgcctgcccttgttcacctgtcttatatgcaacgaactcgtcccagtgatcccttagctttgggaatgtgtcgaagttcggtgtctgccccttcagtatatacttctggtacagatctcccttgaagctctgaaactgttctgccattttcttcagagtccaccttttcactttgtcctctgtacccgcaggaagggtgaatgtctcgagcattgtggtccacagcatctctttctccgaatctgggacaaagctctcatgatctccgcgtgcccttgttcttcgccagtacaccgtactgacaggcacgttatcccgcacaacccaaccgctgtgacgtacatagttcttggcggcttcggccggggcactaggacgtccatcttcttgcacttccgttatgatgtgtcgaccctcaagcttcttcgctgcacctcgttgcccgcgtgccctcttctgtccaacggagggttgactaccactagcctcctcctcctggttcccctccacatccctttccacgtgcccctgctggttcccctccgcatccctctccacgtttccttcctcgttcaagtactggtttggatcctcgttcccctcttcttcattccagtactggctgcttccctccgcgattgtgtcgtacaatatctgttcctcatcgcggtcagccatctgttgatacaagaaacatctgctaagtcacgagacatttatgttttaacaatctaagtcatgtatgctaagtgtaaatgtcgtacattagaaccctacacaaccttacgtgctaagtctaattacaaatcgtgatataagctaagtctaggtgacgtatattgtacaaccctagctagtaaataattatatactaagtctaattccaaataaaataatcttatattaaaactcaaataatattacatgctaagactacaatagtcatgtatatgctaagtgtttcgtgcgtatatgctaagtctaattaagactacaatagtcaattgctacttgtcgcaccaattccgtagtcaataattacatactaagtctaattacaaataaagtaatcttatattaaaactcaaataatattacatgctaagactaaaatagtcatgtatatgctaagtgtttcgtgcgtatatgctaagtctaattaagactacaatagtcaattgctacttgtcgcaccaattccgtagtcaataattacatactaagtctaattacaaataaagtaatcttatattaaaactcaaataatattacatgctaagactaaaatagtcatgtatatgctaagtgtttcgtgcgtatatgctaagtataattaagactacaatagtcaattgctacttgtcgcaccaattccatagtcaataattacatactaagtctaattacaaataaagtaatcttatattaaaactccaataatattacatgctaagactaaaatagtcatctatgctaagtgtttcgtgcgtatatgctaagtctaattaagactacaatagtcaattgctacttgtcgccccaattccgtagtcaataattatacatactaagtctaattacaaataaagtaatcttatattaaaactcaaataatattacaacactacacaatcttatatgataagtccaattacaggtctaataatcttaattaattgcattacaaatataacaatcatttatattattacgtcacttgcctgctccaattccttctagggctagctcttccactcaggcttgacggacgactccaacaacacgtcttttctgcaagataaaaaagatgtattaggataaatgcgaagtaacatatatatatatat

SEQ ID NO: 4646 - DNA, 13553 bp, Oryza sativa
aaatcggtgccgccggccgccacagccggaagcaccgtcggctgtcgtcgcgacacctcaccatggccgccgcctaccgaagcccgcaccacggtattccaaaccgtagaggggagggggttggaatagccttgccatcgttatcgtggttgccgtcctcggcgcggtagacatcgttgtcattgtggcagccgccgccggatccacctccttcacggttgtgaaggacagcccgagcaacgccgccaccggatccgcacccaccctactgtcaccgtcgctgccctccccgccggcctcccccattgtcgcggcggctgattcggcgtccacggtcactgcggcggctgatccggtctccccgtcgccgcggtggtggatctggccacccccatcgtcacggcggtggatccagcctcccccgttgtcgtggcggccagcagcgaaggaaggccggtgggagaccggggggggggggggagggaaagaaggcgtgggccatcgcagtttgccggccgcctgtcaccgcgccgctgttgagccaccccctcccctgcaccgctgcagccgagcaccgccaccccgtgccgcagccgagccaccccctcccccgccgccccgtgccgccgagtgctgccgtcggggccgccgccgctgcctacgtgagccgccgctgccggtggggtgggaggaggagaggagagtagtggatggatttggatggagaggaaccagaaaaaaaggaggaggaggagaagcgagtggatggataaggaggtgggcggcaattttttttaagggaaacgcgcacggtgattttttttaatgtgcggggattttttttaaggacgatgctgcctagtaaccgccagcgaaaatcagtattttgactggctgtcttttaagagatcgcttgtaaaaacataggtattttttcaagcggactttaagcaaacgctagcgacaattcattttcactggcggtcctaaactctccatctcttagttacaatttcacaagcagatttcttatataaccgccagtaaaacaaatagagtaccgccatgaaaaatattttttctagtagtgcgtggcacatttcaaggattcggccgcgtccagttataaagtttgttgatgacaagaagttgtacgttggtcagaaacctgcattagcttgcaaatacccaatcctgatgttctcatggatcgctactgttgtgctcgagtgggctctaatgctactgatatgtttacatatatgtacctatactaacatgatatttactagatgcttccaagttaataaaaatatctagccaattattagctggatatgttatactatcatatccattgatcactaaatctatgtgtgtttgttatagacaatactaaaatctgtctatcctaccccacttctgaaacccccatctacttctaaatcccatccgcgtgtttcatcacttcatgatgtaaaataaaagtattagttgccggtctatatgaatattataacacacaccgtgttcaattaattaatatgctgcatttacctgtagtacatgtgtatttatatattgggtatatccatgagtaaaatatttaccggttgcacatgatatattgtagttacatgtgcaaatataattgcatgtaagttaaaataaaattacaccacaattatactataatttatatctgtcaaatttttgaaagaaattcacaactacaacaacaaactttctgtacgaggacccttggcggcgtctgcaaaaatgacctccattttcacatacggctacttaatagacccgcatgcaaaaatctattttcttagacgagcctcttaaggggctgcaaataaaaatgagcctattatcgcgtgcgggcctcttaaaggtccgcatacgaaaatttatttttgcatgcagatcttttaagggtccgctagcaaaaaaattttcctcctcaccgcttcaaaatttttcacctttcatcctctcctctctctcccctctgatattttccaccctctcttccttcacctctatctctctttcattctcttctctccctctctttggccctgtttcgttcaggggtgaaaagtttttgcgtatcacatcggatatatggacacacgtttgaagtattaaacgttgtctaataacaaaacaaattacacattctgctcgtaaactgcgagacaaatttatgaagcctaattaatcgatcattagcaaatgtttactgtagcaccgcaatgtcaaatcattgcgcaattaggcttaaaagattcgtctcgcaatttacacgtaatctgtgtaattagttttttttgtctatatgtaatactccatgcatgtgtccaaatattcgacgtgacgtggtgaaaagtttttgtctagcaactaacgaaggcctttctcttcctctcctctctcacttctatcacgggtggcgaggccgacaagaaggcaccgggagcgggcgccgccgctgcattcacggccaggagcggcgggcagcgcggccgatgaggaagtgctgggagtgggctccgctgcagtgcgggcggccaggagttagcgatgccaccctgcgacgcagattccggcagcggcgctgggcgaaggccacggcggtggccctccccagcccagatctgccggcggctgccctcccccgccccgatctaccggcggcgaccctcccccgcctggatccgccggccgccgccctccctgcccagatccaccggcgtcagcggcggcttgagaacgacagcgatagctggaggatgaggacaggaggacgacggcggaccggcggtgggtatatttttcaatttttggaatttttatttttttcgtgatttatccttttcgcatgcggccggctcaagtgtccacatgcgaaaattgtgttttttgcagaccttttcttccatgccatcgtctgtggaaatacgttttgcccgtttacaaaaacggttttcatagtagtgaaaatttgtcaacaaatacatatataaaaatacatatataggtagtctctaatgtgatctataaacatgagttatggattttctgagcagctatttcggactaagccttggggatgggaaaaatccaaatcatttagaaatcatgttttcttttgaaagttggatgacatgttctgattaaagtaacattacaacagtaaccgaaacttattttacattttcatgcattgtgtatatatgtctgcacaattgatgtcccattgcagttcacccacactgcaacaggaaattattttcattatgtcggagcaaaatagtgtacttttttgtgcaccaagaaattagtgtttgatatatacatgtggtaatagagaagatgatgttgaactgaccaacgtctccatcaactaatagttgagatgcaatgtacttgctttactcttgtttactcggaatattgaggttagtcatactattattttgaggtttgtttacagggtgcctttgtaatttttttttcttttgagaaacaaagaataattagcataaatgcaaccactcgtatcaaatctaggatttgaactcgggtggattggttccactaaaagaaacctaaccagttgagctacgctcgcttagcaagggtcctgtctgaccggtccactccagcagaaaaacttgttcatcgtcagatatctgttcacaatatttgcccagtctgcccagccccaaaaccacttcatcaccatatatttctaaatatcataaccaattatctctcgtgccaattgttcatcatgaaataataatcaaaacacacttttatttcacatatgccaatgtgtatttatgtttgtggaaagcaaattatcatttgctttgtttaggctaaaaatgcatctaaggctgcgttcagatcagcgttcacaatatttgcccggtgtcacacctgaaaattcaaaatttataaattgttgtttaaatggaatttttagaaataattttaaaaagtcttgaaaagaaaatctaattttaattaataaattccaatataaaatgggcccagataaaatttcattaaatactttgcttaattctataattcctagatttttctgggatttatttgagctaagaaagtatttttaataaatggaattgcatttaagaaataattttaattgaaaaaggttttaaaaagtcctcttttggctttgggccgaaagtcggcccaaaatctctcttctctctcctcggcccagccggcccagtccgccgcagccgcgcgcgccctcgctgtcgctgacaggtggggcccacctgtcagtcgtcgtctaccttcggccgccgccgcccgaaaccctagtttcgcgctgccgccgtttcccttccaaatccggccgttcctttccttctccggccgaatcaatagaggggaaacattctccgggatctcctctaccttttctcctttggaatctttggctaaatcgctttggaaagagttggattcgagttcgtctcggatttgttcttcccgagctttccttcgccgttgccgtcgccgtgggccttcgccgccgcctccgagcccctttaaaaggacccccggtgtctcctctacccgtcgccactttcgccttcgcctctcgtcgtcggaaaagccctagcgccgtgtgccctagctttgccgtcgccgccgccgctccagccgtgcgccgccgtcgctccagccgtcgccgtcgctcgggaagaccgtcgtcgtggtcgccaagtcgtcgccgtcctcgtccgccccttcgccgtcgccggagatcgccggagcttcgtcgccgtcgtcaacccgaaggtttccgccgtttcctcctcgtcgccgtcgtcgtccgttgttcttccgccgccgttttggtcaccggtgtgttcgccgcgtcgtcctctacgtgctggtgccctccgtttgcgtcctcgcgccgccgttcgccggcgagcgtgcgccgcccgagccgtccgttccgccgagccgccgccgctgtcggtgatgtcaccgctgacgtcatcggggtcgtccgccgtgagccggtcgtggaccgttcgatctcggccgtccgttttggattggatcgatctcggccgtccgttcgcgtgaaccgccgcccgtgcgcccggtccaccaaaaccctagccgctaacgcaataaaccctcttttccttttcaaaaataattcattattgcgtcataattcaattttaaccgatttaagtgttttaatccggtttaatctttaaaaattcataactaattcatcttagctccgatttagttggttcaagtctctaaatttttctaaaattgagatctacatgctaaaaatatccacatgtactgttcatgcttgtttatgtgctgttttggtgattttgctcttttctgcttagattccgtcgtttccggagagtccgttttcgccggagaagagtttgaagagttccaaggccagcaaggcaagtcacacagatcccaaacaatcctttgagcatgttgatcctatttaaagctattgtttcttttcaactattgcatttattttcgaatgtcattgggtggaatcaacctattctttgttatagcccttttgttcttgattactttattccttgataccttgggttattataatttgactagttgagctttatttatattggttcaactagatactagatataattgcttagccctgcttagaaacattagcacactattgggataattaatgactcactgttatttcatgatggcttaatgatagttcatgatggtcgattgtgattggttaattaattaatgtgccaactaaaacctgataatggtgggttgtgagcacatggttttgatggtcgtgctcatgataattaaggaccggttcacgagtttcggttgtgaaacattaaccgtgccaaccacaagccagcatggacaacggctttatcttttgtatagcatggttcattgcggagcaccagactgagaagtggcggagataagcccacgggggtcgctggggagtccatgccttgtttataagggggtgattatgatccaggaaggtgcgctgcagtggattgtgttatgcgaggggtattgtcacaactcttttccgaggtaccgtggtggtattgaggcacatggtgacatgatgtggggttgtgtcttgggggtacagtggtacacctctgatcagagtaaaactattcgaatagccgtgcccgcggttatgggcgggtctaacaatgtctttcgtgattagtttcacacttctcaccatagtaaatgatgctataattggtaataatttgattagctcctggtttggaatggtacattcctggtttggagatagaactgtgcagccgggatggttgttcagaatggttgggcctatacaacagggtatgttgtatagcgttggattaatattgttaaattaattaactgttttgttaaattctgaaatgtttgctaaatgctgcttttgcaaatgaaaccctattatgccatcctttgttatcctgtgcacttgcatatttgctgcgtggcttgctgagtatgtcatatactcaccttgcaatcattcatcagaggaagagttctacaatgaggctgatggagtggaggattaggagtagccttggtcaagctgcctgtggagtggagccgtctgcgccgtttattttattttccgctgcttagatctttattgtttgagaggaactatctacctctgtaatgacattttatacgcttattaattagagtaataattgtactctattatcaatttgttattgtgtgcctcggctgattcctggacgagggttcacacacatgtaagcgtttggaattttggatagaaattccgggcgtgacaagttggtatcagagcccccttgaccctaggttatgccaaatggttacccatagaagccctctaaaaatattggaaaagtagaactgttctcctccctttctcttttaattaaaccaaactaatggcacatgcacttcataatctcttttaatggttctcattcaaaatttattccagtgttattagtactgtacatccattactgtactaatggctcatttatcagcaaaagttttacaatgttgttttatttaatcttgctgcaataaaataaatttagcatgttgattttataactttcttttgaaacctgttgttaaaaagtacaaaatttgtaaccttgttttcaactatttcaaattatcttgcaagtttggtttactttattcacttaccttttactttgaatttctaaactttattcaaattaatccaaaaacttgtgctattaattggataaaggtcttaactccctcctttcacttgtctttagatgccgcgctacaagcttgagtacctgtttggtgttgagggttttgtccaggagttgcgtacgatgtcctttgccattggatttgggactgcccctttttatgcccagattcctcatgatcgtcatgaagagaagtgccgagtcaaagtcaccttgaacagcaatagtgaagagatcccctcagtgatgttcgaagctggaggaagaaactacatccatgcatgtcaggaagtggcaaggattgccataggagagctccgtgatcgctatagtgatcagttggccgacactgagtatcgctaccatcctcgtcaaccccagggaagtgaccgtggcagctaccttgagactgaaggaattgagaatgatgctaccacaaggcatttggttgagatgctgtgggctatggatgaaggtcgtgcggagactgtgttagcggctcaagatcgtgaagaccggaatcgtggtaagatttgcaagttagaagacaaggtggatcgtttggaaaaggaattagccgcgttaaagggagaagcaccgccgcagaaggccaggattcgtcttaccgcaaggaagagagctttatttgtccctcgctatcaattggcgccaaaggtccgtgtggtggagaaagaagttgccccatcccaagcggatccttcggtcatcatcataagtgatgaagaagaagaatccaagcgcaaccattccaagattgagtgggtagcaacccaagatgatgaagacgagccgaacgagccttcaatcgacctccaatgcttggaagaactagagtgacttgttaagtcgttgtcttagatcgttgtgttagtttgtttgctttaagtttgcttgtgtgtggctcgcatgtgatttacatcagtggtgggatgtaattgcatgtgtttgtttgcttttgagtgttaggaagttggtgagtttagtggtgtgagagtcttcagtttgtaataatgaaactcagttaagatcaataaaagttaaagtaattctctatcctaagtagttccccggtttctcttcttgtgccctgttcctgccagatggtgaacactcgcagcaatgggaatggccccaacaaccccaataacaataacaatggagagaacccaactctggcccaagttcttgctcaacagacacaactcatgaacatgatgatgcagcaatttcagaatcagcagaaccaaggaaataactatgcacctcctcagaataagttagcagaatttcttcgtgtgaggccgcctattttctctagtaccactaatcctgttgaagctggtgattggctgcatgccatagagaagaagttggatttacttcagtgcactgatcaggagaaggtatcttttgcatcacatcagttgcatggctctgcctctgaatggtgggatcacttccgcctgaataggactactgctgaacctatcacttggcttgaattcactgctgctttccggaagacgcatataccatcaggagtagtgtctctcaagaagaaggagttcaggtcgcttactcagggatctcgctctgttacggagtatctgcacgagttcaatcgtcttgctcgttatgctccggaagatgtgcgtaatgatgaagagcgtcaggagaagtttttgggaggacttaatgatgagctttcttacccactcatggttggagattatcctgatttccagaaattagtggataaggctatacgttaggaggacaagtacaattgcatggagcagaggaaacgtcggattgctcacttcaaggcacaacaggggagtaatcagaagccgcgccttactttaggaccccagtctatgccacagggaggttcttcatctgttgttcgtccgcagcgtcagttcttcaacaacaatgctggcaacaacatccgcaatcaagctccacgtcctgttgcagctccaacacagcaacaacctgccaagagggagcaaggcagcaagcccgtggtatgtttcaactgtggagacccaggacattatgctgacaagtgtccgaagccccgtcgcgtgaaggttgtccctgctcagaataactctgctgtaccagcatcaaaggcccgtgtcaatcatgtcgctgctgcagaagctcaagatgctcccgatgtgattttgggtacgttccctgttaactcagttcctgcaacagtacttttcgattctggcgctacacattcattcttatctatgagttttgcgggaaataatgggatggaagtagaagatcttagacgtcctttgatggttagtaccccaagtgatcaagcactctctttgcaacgtagcccctcggtcagaatagaaattaagggagtaccatttctggccaatcttatcttgttagaatccaaagaccttgatgtcatcctagggatggactggttagccagacataaaggtgtgatagactgtgctaacagaaaagtaactctcaccagcaatgatggtcgagttgtaactgttcatgcattgtcatctgagtctttaaggtcaagactgaaccaaataactttggaagagattcctatagttcgggagtattccgatgtgttcccagatgatttacctggaatgccgcccaaaagggatatagagttcagaatagatctggtaccaggaacaactccaatccataagagaccttatcgaatggcagccaatgagttggcagaagtcaagaggcaagtggacgatttgcaacagaaaggatacatcagaccgagttcatcaccatggggagctccggttatttttgtggaaaagaaagaccatacccagagaatgtgtgtggattatcgtgcactaaatgatgtgactatcaagaataagtatccgctgcccagaattgatgatttgtttgatcagcttaaaggtgccactgttttctccaagatagatcttcgatcaggatatcaccagttgagaatcaaagaggaagatatacctaagacagcttttaccactaggtatgggttgttcgaatgtactgttatgtcttttggacttaccaatgcccctgctttcttcatgaacttgatgaataaggtgtttatggaatacctagacaagttcgtagtggtctttatagatgacattcttatctactctcgaaccaaagaagagcatgaagaacatctttgccttgcattggagaagctacgagagcatcaactgtatgctaagtttagcaagtgtgaattttggttgtctgaagtgaagttccttggtcacgtcatctcagccggaggagttgccgttgatcctagtaatgtggaatccgtaaccaactggaaacaaccaaagacagtttcagagattcgcagtttcctaggcctcgcaggatattaccggaggtttatagagaatttttccaagattgctaagcccatgacacgactgcttcagaaagatgtgaagtacaagtggtcggaagaatgtgagcagagttttcaagagttgaaaagtcgcttaatatcagctcctattttgattttacctgatccaaagaagggtttccaagtgtattgcgatgcatccaaacttgggttaggttgtgttttgatgcaagatggcaaggtggttgcctatgcatctcgtcagttacgtccgcatgagaagaactaccctactcatgatattgagttagccgcagtagttcatgcgttgaagatttggcgtcattatcttttcggtactcgtacggagatgtacaccgatcacaagagtttaaagtatatttttactcagccggatctgaacatgagacaacggagatggttggaattaattaaggattatgacatgggaattcattatcacccaggaaaggctaatgttgtagcagatgctcttagcaggaaaggttattgcaatgctacagaaggacgacagttgccattggagttatgcaaggaatttgaaagattaaatttgggaattgtcaatagaggtttcgttgcagccttagaagcgaagcccactctaattgatcaagttagagaagcccaaattaatgatcctgatattcaagaaatcaagaagaatatgagaagaggaaaagctatcggtttcttggaggatgagcaaggaactgtatggttgggtgaaagaatctgtgtccccgataacaaagatttgaaagatgcaattctgaaagaagctcatgatactttatactccatgcaccctggtagtactaagatgtaccaggatctcaaggaaagattttggtgggcaagtatgaagcgtgaaatcgcagagtacgtaccagtatgtgatgtttgtcagcgagtcaaggcggaacatcagaaacccgccggtttgttgcagcctttgaagattcctgaatggaaatgggaagaaattggtatggattttattactggtttacctagaacgtcatcaggccatgactctatttgggtaatagtcgacagacttaccaaagtggctcatttcattccggtaaagacaacctattctggaagtcgattggcggaattgtatatggcaaggattgtgtgtttgcatggcgtccctaagaagatagtgtctgatcgaggcagtcagtttacttcaaatttttggaagaaacttcaggaagagatgggttctaagctgaattttagtactgcttatcatccgcagacagacggacaaaccgaaagggtaaatcagattttggaagacatgttgagagcttgtgctttagacttcggtggaagttgggataagaatctaccctatgcagaattttcgtacaacaacagttatcaagctagtctacagatggctccttacgaagcactgtatggtcggaagtgtcgcactccgcttttgtgggatcaaacgggagaacgtcaggttttcgggacggatatcctaagggaagcagaagaaaaggtgaaaatcattcaggaaagattgcgagtggctcaatctcgtcataagagttatgccgacaatcgccgtagggatttgagttttgaagaaggagattatgtgtatcttcgtgtcacgccttttcgaggagttcatcgttttcgtaccaaaggaaaattggcaccgcgttttgtgggaccctataagattgtcagtagaagaggagaagtcgcttatcagttggagttacctcaatctttggcaggagtccataatgtgttccatgtttcgcaattgaagaagtgtttaagggtacctaccgaagaagctaatcttgaacagataggagtccaagaggatctgacctatgttgagaaaccaatccgtatcttggaaacaagtgagagaagaaccaggaatcgagttatccgtttttataaagtccaatggagtaatcactcggaagaagaatcaacttgagaacgagaagatgaattgaagtcagctcatccgcaattgttcgccagttcttccgaatctcgaggacgagattctgtttaaggggggtaggtttgtcacaccctgaaaattcaaaatttataaattgttgtttaaatggaatttttagaaataattttaaaaagtcttgaaaagaaaatctaattttaattaataaattccaatataaaatgggcccagataaaatttcattaaatactttgcttaattctataattcctagatttttctgggatttatttgagctaagaaagtatttttaataaatggaattgcatttaagaaataattttaattgaaaaaagttttaaaaagtcctcttttggctttgggctgaaagtcggcccaaaatctctcttctctctcctcggcccagccggcccagtccgccgcagccgcgcgcgccctcgctgtcgctgacaggtggggcccacctgtcagtcgtcgtctaccttcggccgccgccgcccgaaaccctagtttcgcgccgccgccgtttcccttccaaatccggccgttcctttccttctccggccgaatcaatagaggggaaacattctccgggatctcctctaccttttctccttttggaatctttggctaaatcgctttgaaaagagtggattcgagttcgtctcggatttggtcttcccgagctttccttgcccgttgccgtcgc

SEQ ID NO: 4647 - DNA, 43543 bp, Oryza sativa
ccgtgcatttggtccaagaaatcccactcttgtatcaatgatatgggaaaggaaagacttcaagagactcaccccaagggacattcttggaagaattgtgtctcatgagatgcaagaagaggaagctcgtgaagtgagacaaatagtgaagaatgccgctatgatcaaaaatcaagaagttgctttgaagggaaaacaagaagaagagtcaagttgtgaagaaagtaaagatgaagagatggcttttattgtcaagagattcaagtactttcttcgcaagagtggctatggcaaagggaggaaggatgatgataagggaaagaggcaatcaaagagagcatgcttcaattgtggcgaatatggccacttcattgccgattgtcccaagtcaaatgaagctaaggctaagggaggcaagaagaagccgaagcgtgctcatgtggcggaggcacacatggcggaagtgtggtactccggagatgaagaagatcccgatcacgaggtcaagctcaagcccaagtcaaaagacaaggttgaaggagaaggtggtgttgctaccgtcgccttcaagtcatcctcttcaagcaaggagcatcttttcaacaacttaagtgatgacgacgacgactcctaccactactcttgcttcatggcccaaggccgcaaggtgatgactcaaaagccctctcaaacttctcttgatgttgattccagtgatgaggaaagtgataatgaattagatgatgtacttaagagctttagcaaacccgctatgcaacatttggctaagtgaatgagagctttagatagtaaagaacaatcactcgaaaggtaagaagaattgcttattcttgagaagaaaagaaaccttgccttagaggagagcttaactaaagaatgtgctaaaaatgaacaacttgctaatgagcttaatttggctaatggttctttagctagccttagggatgtcaatgaaattcttcaagaaaaatttgttaatttagacaaaagtcataaagatcttgaagttcaatttgacactctttggaatagcacctctcaaccaaatgtggtttctaattcttctaaccctactactagcaatggttgtgctaggtgttacaatattgatttgaactcttatgctactaatattgatgctatgcaagctcttaagaaagagaatgaaaggttgagcacattggtgaaatatggatgcatgaagacataccattcaaaagatgccctttacaagaccatcaccgctcatcctaacaagaatggacacggctcgggttttcgggtggaagtcatgtgtctaagcgtgtgatggtaaatgggaaagaatgcttgatgtttgtgagagaaggtacgtaaagcaccacaagcaagtgaggtgactagtcttgtgagctgccagggacccggaacatccggacaaaccgggagaaacttccgggtgggagtctctgtctctcaaaaattcccaccaggaagttccgggccaatggccgtgcacacgatatgaccggaagttccggtcacaatgccaggaggttccggccagagggtttttactatgattcatatgtaatttccaaaaattcagagggcaaagtggttgcctattttaatgggaattacaatgatgagtaccgcacttgtgtgtgggtgacaaaggctttggtaactaacatcaagggacccaaacttagacaagtttgggttcctaaatcccaagcttgatttcttttgtaggcatactcctccggtggttcaagttaggttgtggacagtggttgcaccaatcatatgactggagagaggagtatgtttacaagtcttgatgagaagaacggaactcgtgagaatatcatgtttggagatgatggtaaaggaaccgtaattggtctaggtaaaattgccatctccaataatcaatctctctctaatgttcttcttgtcaattcattaagatacaatttattatccgtttctcaattgtgtaagttgggttacaattgcttgtttaccgatgaggatgtgaccgtctttagaagggatgactccgttgtattcaaaggcaagttgaagggtgatctctatcttgtcgatttcgatgtggatagagtgaatccggaagcttgtttgattgttaaatcctccatgggttggctatggcatcgtagactagcccatgttggaatacggaatttggcaactcttctaaagggggaacacatcctcgggctcactaatgtcacatttgataaagatcgtgtgtgtagtgcttgccaagccaggaaacaagttgggaatccacatcctatcaagaacatcatgactacaacacgccctcttgagcttctacatatggatttattcgggtccatggcctacataagtattggaggtaacaagtatggttttgtcattgttgatgatttttcccgcttcacttgggtgtattttctccatgacaagagtgaggctcaaaatgtcttcaagcgcttcaccaagcaagcccaaaacctctatgatctcaccatcaagaaggtgcgaagtgacaatggagaattcaagaacactcaagtggaggaattccttgatgaagagggaatcaagcacgagttctccaccccctatgatcctcctcaaaatggcattgttgagaggaagaaccgaactcttattgaagccgcaagagcaatgcttgatgagtacaagacttcggatatcttttgggcggaggctgtgagcaccgcatgccatgccatcaatctcctctacctccataagatcctaaagaaaacttcatatgagctcttgagcggtaagaaacctaatgtttcatatttttgtgtctttcggagcaaatgctttattccgagtaagaggcctcgctcatctaagttctcacctaaggtggatgagggattcttacttggctatgaatcaaatgcacatacctatcgtatcttcaacaaaacatccggtattgttgaagtcactagggatgttacatttgatgaatctaatggctcctaaggagagcaagttgttgtacatgttgtaggtgatgtggatccaagtcaagctataggtactaaggctattggagatatacgactagtcgagacgcaggatgaccaagaagatagggatcaacctccgtcatcgacatccaatagccctacaagtgctgtgtctgctgagccggaagttccaggtcctattgaccggaacctccggacatctccaggcccagaagttccgggttctacagtccggaacctccggaccagcggtagtgaagacgtgccaacggcgcaagtggatgggatcgatgttccgggcactttagagcatactgatcaggctcaggtccccccagtgcaccatccaaggatacatcacattgtccaaagagatcatcccgtcgacaacatacttggtaacataagaaaaggggtaactactcactctcgtgtcgcaagtttttgtcaacacttctcatttgtctcttctttggaaccaaccagggtggaagatgcgcttggtgatccggattgggtgatggctatgcaagaggagttaaataacttcactcgcaaccaagtatggtctttggtggagagacccaagcaaaatgtcatcggtaccaagtggatcttccgaaacaagcaagatgaacatggagtggttgtaaggaacaaagcccggttagttgcgcaagggttcacccaaatcgagggtctcgattttggtgaaaccttcgcacccgttgctcgccttgagtcaatccaaatgcttttagcctatgccgctcaccatgatttcaggttatatcaaatggatgtcaagagtgcctttctcaatggacccatctcagaattggtctatgtggagcaaccaccggggttcgaggatccaaagttgccaaaccatgtgtacaagctccacaagacgctctacgggctcaaacaagcccctagagcttggtatgaatgtctccgagatttccttttgaaaaatggttttgaaattaggaaggcggacactactctcttcactaaaaagcttgaaaatgatttattcaattgccaaatttttatcgatgacataatatttggttctactaatgcctctttttgtgaagaatttagtagtatcatgactaaaagtttcaagatgtctatgatgggcgagttgaccttcttcctcgggctacaagtgaaacaagcacaagagggcaccttcatctctcaaaccaagtacgtgaaagacatactcaagaagtttgggatggaggatgccaaacctatcaagacacccatgcctaccaatggccacctagacctcgacgataatggtaaatgtgtggaccaaaaggtatatcgctccatgataggatccttgctttacttatgtgcatctcgtcccgatatcatgcttagtgtttgcatgtgtgctcgctttcaagcggagcctaaagagtgccatttgattgccgtcaagagaattctaagatatttagttcatactcctaaccttggcttgtgatatcctaagggttgtgactttgagcttttgggctattccgattcggattatgccgggtgtaaggttgatagaaaaagcacaactgggacttgccaatttcttgggcagttccttgtttcttggtcctccaagaagcaaaattccattgcattatccaccgccgaagccgaatatgtcgccgccggttcttgttgtgcccaactcctttggatgaaacaaactctaaaagactttggctacaacttcaccaagatcccactcctatgtgacaatgagagtgccatcaaaatagccaataatcccgttcaacagtcacgaaccaaacaaatagatattcgctaccactttttgagagatcatgagaccaaaggagacatatgccttacccatgtgagaaccgagaaccaattagacgacatattcaccaagcctttagatgagaaaagattttgcgagcttaggagtgagctcaatatcttagattctcgcaacattaggtgatgggtggttggctaatttatagccaaacatgtatcactaaaatgtaaataaaaaaattgagtttttgtgtcctgtgtcacgcccggaatttctatccaaaattccaaacgcttacatgtgtgtgaaccctcgtccaggaatcagccgaggcacacaataacaaattgataatagagtacaattattactctaattaataagcgaataaaatgtcattacagaggtagatagttcctctcaatcaataaagatctaagcagcggaaaataaataaacggcgcagacggctccactccacaggcatcttgaccaaggctacacctaatcctccacaccatcagcctcattgtagaactcttcctctgatgaatgattgcaaggtgagtatatgacatactcagcaagccacgcagcaaatatgcaagtgcacaggataacaaaggatggcataatagggtttcatttgcaaaagcagcatttagcaaacatttcagaatttaataaaacagttaggtattaattaagcaatattaatccaacgctatacaacataccctgttgtataggcccaaccattctgaacaaccaccccggctgcacagttctatctccaaaccaggaatataccattccaaaccaggagctaatcaaattattactagtttaagcatcttttattatgatgagaggtgtgagactaatcacgaaagacattgttcgacccgcccataaccgcgggcacggctattcgaatagttttactctgatcagaggtgtaccactgtacccacaagacacaaccccacatcatgtcaccatgtgcctcaataccaccacggtacctcggaaaggagttgtgacaatacccctcgcataacacaatccactgcagcgcaccttcctggatcataatcacccccttataaacaaggcatggactccccagcgacccccgtgggcttatctgtcacgcccagaaattcccgaatagaattccaagcagaatgtgtattaaaacccccgtccaggaccagccagggtacacaaacgacaatgttgacatacagatccacgtcttacaaacattataaaggtcttacagaaatgcagcggaaaacaaaagataactggagctaatccttgacttgaactgcagcgggaacaccactccacaggcatcctcgacggcacggacgaagcctactcctcggagaacccgccatcggacacatactcgagctctgaggttggggggaaaagtagagcaagactgagtactacccactgtactcagcaagtcataccggaatagaggtatgatgcagggatttaacaagggatagctaagcaggttcatttgcataaatactggcatttataaacaggaattgaatgcgaaaacagttgtaataattaagcagtattaaacatccgctgtccaacgctaacccacgttgcgacaggcccaaccatccacctaaactatccaaattcaacagattacactagggtgagactaatcacggtgaatctggttgaccgcccataaccgcgggcacggctattcgaatagttttactctgatcagaggtgtacaactgtacccacaagacacagccccacgacacgtttccgtgcgccgacatgccaccacgacataccggaaagaggccgtgacaggacccttcgcataaccccctctagccaagcacaccacacctcaggtttcacccccgtccccagcgggcgacgggcagtcccctctcgtgcctaggtgaatccggaagcgacagaggccgtcgcagggcccgccccgctccatcacgcccacccttgcctggatgcgtcgactagaggaaagctacactacaagcccagccgttgcccacgctggcttgtggtaagtacgataaattcttccagggcatcccgcgaaccggtccttaactgccatgggtgcgactagcaaaaccatgcacccacagcccaccatgtggttcattttatttaaccaacaccagagcggtggtattaaaccaacattatcatataaacctatagtctaggttttaaatgagatccccaatgtgtgctagttgaactaagcatggctaagcaattcctagtccaaagtctaatcatgttataacccaagctaacaaaggagcatgatatccaaaagcatggctgtaacaataggtatccatcccatagtgatattataaaacaatgcaatatttgaaagaaaacaatagagcatttgcaatataggatcaacatgttcaagtgacaagcatgacttgccttgctccgctgctggagggacctcggcgactatctcgaagtacaccggagcgtcggagggatcggaatctagcgacataccaagcaaacattgcaaacaggctataagactactgaaacagagaacaaaaccatttttaatggattctacacatttttcttgatttactgagacttgaatgggattaaacggagctcggatgaattagttatgaattttagaagattcactgtgtttattactataaaagaaatccttaaataatttattgcgcaatattaaccagggctgacgtcagcgagggggcgcggcgccgacaggcggggcccaccggtcagcgaccgggagagagagaaagggggtggcggcgcgcgggcccacgggtcagcggcacgggggaaaggaggggcggcggcgccacgtggcggccgaaccgacggccccgatctacccaagggtagatcggacggcggcgggacctcgcggccggggcgcgcgggcgcggcgcgagacggcggcaaccatggcgccggcggcgcggcgctcacacgggggcggcgcgcatgcggcagcggcgcaaggcggcgaccgaaggcgaccgaccggcggcggggagcggcggctagaggaggagcggcggctacgcggctaagcggcgcgcacgcggctacccggtacggggaaaaggagaaagaggagggggaagcctcaccggacaacggtcgacgacggcggccgacggaggacgacgacgacggcgggacgagctccggaacctcctaacgaacaaaaggagagggattagagagagaggaaagagcgtgggagggcgagagcgccggccgaaggcggcggccatggtgccacttgccggcacacgacggggatgggtctccggcggcgaacctcgacggggaaggggcggccgaggtagatctcgaccccgcgaagctaacggcggcgacggcgcgagacggcgacgagcctagcggcggctagcggcggacggagtagcaaaaacggcggcggcgggtggttgcacggcgcggaggcgatggggagctcgggagagatcggcgaaatggggaaaaagcgagagaggaggacggcgatgcttaaaaagggggagagggagccggacgtggccgggagcggcgggattcgacggccgacgtgggggagtggggaggagagagaggcgggattcggttttcgaatcccggccatctcgggcgcgggcgcgaacgggagggagaggggaaagggcgcgggagacgcggcgcacgcgcgggcgtggccgacgtggcccgggagagacggaggcgtgggcgcggcggcggttttggcgcggcggcgcggcgggatcggcgggaggtgggggaaggacccgacaggtgggccccacctgtcggcgaccccgagagaggaggcgggcggcggctgccaggctgggccctcggcctgcggccggcccagcaaggaggagggggaggaaggaggggaatgggccggcggcccatccgaaaagaaaaaggaggaaaaagggagggaaaagaaaaagaaaaaggaaaaggattttccctggaattaaaaattgcactttagtgatttttaattggttaaaattatttctagagctctgaaaattccactaaaaatcctgttaatgaatttcgacatgtagaattcaagaaaaattccacatgtcaaatccgattattatttgcattgttttcttagggttttatcctgatttcctctgcattttcttggggtcatttgtaatttacaatttggcttgggaggaaaacttcggggtgtgacattatctccgccacttctcagtctggtgccccgcaatgaaccatgctatacaaaagataaagccgttgcccatgctggcttgtggttggcacgattaatgtttcacaatcgaaactcgtgaaccggtccttaattgtcatgagcacgaccatcaaaaccatgtgctcacaacccaccattatcaggttttagttggcacattaattaattaactaatcacgattgaccatcgtgaactatcattaagccatcattaaataatagtgagtcataagttatcccaatagtgagctaatgtttctaagcagggctaagcaattatatctaatatctagttgaaccaatataaataaagctcaactagtcaaattataacccaaggtatcaaggaataaagtaatcaagaacaaaagggctataacaaacaataggttaattccacccaatgacattcgaaaataaatgcaatagttgaaaagaagcaatagctttaagtaggatcaacatgctcaaaggattgtttgggatctgtgtgacttgccttgctggccttggaactcttcaaactcttctccggcgaaaacggactctccggaaacgacggaatctaagcagaaaagagcaaaatcaccaaaacagcacataaacaagcatgaacagtacatgtggatatttttaatgtgtagatctcaattttagaaaaatttagagacttgaaccaactaaatcggagctaagatgaattagttatgaatttttaaagattaaaccggattaaaacacttaaatcggttaaaattgaattatgacgcaataatgaattatttttgaaaaggaaaagaggatttattgcgtcagcgggctagggtttcggtggaccggacgcacggcggcggttcacgcgaacggacggccgagatctaaccgatccaagatggacggccgagatcgatcgggtccacggcggctcacggcggacgaccccgatggcgtcagcgatgacgtcaccccggcggcggcggctcggcggcggtcttcccgagcgacggcggcgtctggaacggcggcgaagcacagctggagcggcggcggcgacagcgaagctagggcttgcggcgctagagcgattccgacgacgagaggcgaaggcgagggtggcggcgggtagaggagagctcggggaggcttttaaaggggctcggaggtgaaggcgaaggcccacggcggccggcgacgaggaaggaaggttcggcaaaaacgaatctgagacgaactcgaatccctcgatttccaaaccgatttagccgaagattccaaaggagaaaaggtagaggagatcacgaggatcatttcccctctatcaattcggccggagaaggaaaggaacggccggatttggaaaggaaacggcggcggcgcgaaactagggtttcaggcggcggcggccgaaggtagacgacgactgacaggtgggccccacctgtcagcgagcgagggcgcgcgcgcgggcggcggactgggccggcttgggccgaggagagagaagagaggttttgggccgactttcggcccaaagccaaaagaagactttttaaaacctttttcaattaaaattatttcttaaatgcaattccatttattaaaaatactttcttagctcaaataaatcccagaaaaatctaggaattatagaattaagcaaagtatttaatgaaattttatcttggcccattttatattggaatttattaattaaaattagatcttctcttcaagacttttaaaataaattctagaaattccaattaaacaacaatttatatattttaaattttcagggtgtgacatcctgagatcacttcttggtagaagatggtcttgataccaggaataaagctcaaacattcaccctatatccaaaaaccccttttgtgaaaatttttgcaaattccttgctgtgccttttattgcgaaaatttggcttttatccccttcttgtggtgtatattgaccatggttatgtaatgttgattgtaggctggtcatatacgtcataagtctctgcatgtccatagttccctatttccccgcgttgaattctcatctcttccttgtttttggtcctgactgccctttatctgtcaggccggaagttccgggcctccttgtccggaacctcggggtatcggggagtatatatactcagggggagttagaagccccattctctctcctcatttcttctctctccccgacgccaaccctagccgccgctatagtgctcctagtggcgattttcactttcgtccaatcaaattcgtttcttctccgtggattcatccacattggtggctgggaggttctttctgtgatcgattcgcagtttcttctctcaaggtagaacttttggattccctctctcggttcattgtgtttttatcccgatctctaaatctgtgaaccttgggagaaaaccacttggatagtcttgtttctgctaccttgttgatcactgatctataggatttgttcacatgcactggctatttttgaaacctctgttcttcatttttgccggccggaagttccggtgttcttgcacccggaacctccgggcgctgtccattcagcctgccattcttgtttctctcaaattttgcctaactactgcactccaatttgttgattcctgttgcagtaagtactatgactcgtgagaaaagacagaaagcctctcaggatgtgtccggtgatgagagtcctcctattcggtatcctcgtggtcgtttgggtaaagagaaagtggttgagggcggcagtggcagtggcactcgtacttctcccagatttacaaggcaatccagcaaccgtcctgttcagattagggatgttgatagtggtcaaggaagtgatgcccctaatacaagaggtcacgggagaggtggtggtcgcagttctggggctggaagggcatctcatgatttccctgtaggatctcgtgagaatcccgttcggctctacaagactcttggttttgacaccactcctatgcaccacattggaagacccaagtccaactaccttcatcaacttgccaagtgtagacgagatcgtttgattgatccagagtcacagcctgaggagtgtcacgccctaaaaatcgtctaaattaataatgcgtattttaaatcatttttagaaattattttaaaagcctacaagttaaactctaataatcaaggaaaattatcaacataaaattgagctagataaaatttcattaaatactttgcttgtttatctattttctagatttttctgggaattatttgagcaagggaagtatttttaataaatgaaacatcatttcacaaattatttttattgaaaaagtcttaaaaatcctcccctaagtcgttgggccgattcgggcccaactcttctctccccgcgcaaggccaagccggcccaagcggcccaagcagccgccggccccctctcctcctcacagccgccgacatgtggggcccacatgtcggggttgtcttcaacctccggccagccagcccaagcccgagccgccgccatcccccgccgattccgccgccctcggtcgcgatcgagtccgattgtttgaggggttttggtccccttgttgtcctctatctatcccccaaaaatcggggctaatcgcttcgtatcttacccgaatcaaactcgttttcgagtttatccccaaaacctaaacctagtttttctcggtccgattactcgcggttggagtctgatctctccaatataaggctataaatagcaccccctagtcgccctctttcgtttgccccatctcccgagctctctcgtgccccgtagcgccgccaccgcgccaaccaagccgccgccgccgccggccgacgtccagccgcgccgcgccgtcgttttagccgtcgccgccacctcctctcaccgccgtcgggtgcgcatggaagaggggaagctcggccgccccttagccatcgccgccggccgccgtagcgccgtcgccgccgctgtccgagccgagccgccgtcgagcctcgccgccggtcgccgttcgacgtcgtccgtcgtgttcgttggtaccggtgagttcgcaatgttgtcctctacgcgtagatgccctctaatagcccggccgagcctcctagcgccggtggttgtgccgcccgagccatggccggcgacgatgacgtgatgacgttataaacctttttttaagttttctttattagatgcaaatcgattaaaacttcggaaattcataactaattcgtcgtagctccgattcgagtggttcaagttgctaaattttttctaaaattgagatctacatgttaaaaatatccacatgtactgtttatgcttgtttttgtactgttttgttgattttatttttttgctctagtttcaaacgttcccgaggagagcgtttcagttgaggaaggttcggaggtgtttgtggaagctcaaggcaagtcacacagatcccaaataaccctttgagcatgttgaacccgtttaaagctaatgttttatttcaacttatgcattattttcgaatgtcattgggtggtgaaccttttcccaattaattaatggccgaagataactttattttcctatgggttataatttgattagcttggaccttatatattggattggttcaactagatgctatatgtatatttgattagccatgcttagaaatatcagctcattaagggatgaattatatatatcacattattaattatggatatatttaatggtagctcacgatggttaatcgtgttatgttaattaattaataactaaaacctgattaaaggtgggttgtgagcatatggttttgatggttgtgctcatgacaattaaggactggttcacgagctactgttgtgaaacatttaccgtgccaaccacaagccaacatgggcaacggctttatcttttgtatggcatgattcgttatggtgtgccagactgtgaagcggcgagaagtccgtgggggtcgctggggagtccattgcctctggtttagagggggagattatgatccaggagtggtgcactgtggtgagttgtgttgtgtgaggggtattgtcacagttcctttccgaggtaccgtggtggtgctgaggcgcatggtgacatgttgtgggattgtatcttgtgggtacagtggtacacctctaatcagagtaaaactattcgaatagccgtgcccgcggttatgggtgagttgagcaatgtttttcgtgattaatcccacactattcattaatggtacttgtgataattaatttgactcctggtttggaatggtatattcctggtatggagtttggatttgtacaaccggggttggttgttcagatgaggttgggcccatgcaacacggaagtgttgtatggtgtttatttaatactgcttaataattcaactggtttactattctcataaatatttattaaatgctgtttatgcaaatgagctttattatgccgtcctttgttatcctatgcacttgcatatttgctgtgtggcttgttgagtatgtcatatgctcattcttgcaatattcattcatcagaggaggagtacttcagtgaaggtgatctggaggactaggcttggtccgggttaagttgcctgtggagtggagtctccatagttgttccgtagtttgcttttattttttttccgctgcgtagaatgttattctttgagaggaactatccacctctgtaataatttattatttgcgaatattaaatagctgtttatttgtactctattatcgatttgttattgtgtgcctcggctgattcctggacgagggtttaacacacatgtaagcgtttgaaattttgggtagaaattccgggcgtgacaaggagtcacaggatcctcgcttcaggactttcactcaattggattggtataactcagtgattatggctagagagaatccagtggttgagatgaagtgtattgattgggcttacatgaggaagaaaaacaatgaagtgttcaaccaagtgatgcaagtgtgccacaatgtcacgtcctgataaattcatcccaaaataaaaatcattccctaaaaggaataatagaattaattaaaattcgaaaagaaattggcaaacactaaaatacgtacaagaaaaattcgaatgtggcccggagaatttttgttaaattctccttggtctaaaaagagccctcaaattttacttgaattttcagagcaccggaaataattattaagcaacaaaaataattattagagtttattaaaaagaaaaacctaaaaataaccctccccttccctttgggccaagtgtggcccaaggtttctcccctctccctctcggcccgcggccgaagtccctctctcctccctctctttctctccctctccttctctccctccttctcttgggcctcctccttccccggcccactccctcctcctccctctctcccccgggcccccctcccctcctctcctcctgggccggccgcccggcccacgccgcgcccctgcccgagccgccctcctcccgcgtgcgcacgcgcctgtcacgcacgcgcccacgcgcgttgaccgcgcctggcaggcgggtcccgcctgtcggacccgtcttcctcccccagccggcctcgtctctctctccccggaaacctagcgccgttcctcccctaaatccacgcgaatcaatgcccttctttccaaattgattggggggaattaatccccattccttcctcttcaattccccccaatttcccccttgaatggcgcccccaatcgtcgggaacggacgcgtctttcccggccgctttccatggccgccggccgccattcccgcctccgttccgaccttccccgtggccggctccctctcctctcctataaaatggaaccccctcactccgttctctcgttttagccccctcccgcgatctcccgtggcctcaccacccctccctgccgtcgcccttctctttcccccacgccgggcgcctccagccgcctctccctcctcgaccgtgcgccggccggccgtgccgtcgccttccccggcgtcgcagccgcctcctctcccccggcctgccctccgtttcgcgcggtgaccgccggaggcgcgttcccgccgtcgtccagtggcgttgccgccactgtaccacctccagccgcccctgccgcgccgctcaggtgcgggccggccgcgccgtctcctccctcggcgtcgccgcgtcgacctccaccccggcctgccctctgattcgtccggagaccaccgtcgtgccgcgccggcctctccatcctcctcgccggaatttccccggtcgaccgcgtcgccgtcttctccggcatcgcagcggcaaggtcgtcctcggcatcgcttcccctccatccaaacccctccgcggtccatcatcgtcgcctccgttcgttctcgtcgtcgacgtcccgtcggtcgcccggctcgtcgtctcgtggcgccacctccgtcgtcggcatcgctgcggcgtgttccacgccgtcctcgcatctgtgcagctgctgccggctgccctcgtcgcctcctcgccggccccggtcatcgtcgtcgtcgtcctcctcttgttgtcctcatcgtcgtggcgttcgtccttccgtcaagccgttcgcgttcaccgcccgcgtttcgtcaagtgtgcagcatccccgtcgtcgtcttcgtcctcggctccgcgtcgtcaagccttgtgccggccgcgtctcgccttcgtccaaggatcaccgccgaagtcgttccctcgccgttcgcctccatcgtccccgagctgtctccgccgcgcccgttcgtcgttgtcgttcccatgcctcgtcgcgtggtggtaaggatccctctccctcgctgccccgtcctcgtcctttcggtgccgcccatgcccgttgtgcggttgtcggccccggtacccgtgtatcggtgtcggcagtcgttcgcttgtgcgtgtggtgaccgtgttagtgtgtccgctcggtagccgcgtggtttccacgtgtgcagcccgtgtggtgtctagtggagttcgtttgtcggccactcgcctcggttgacacacgggatctgcttctgtcgacccgtggaccgtctctgtgtacccggtctaccacggtcctttaggttgacatgtggggtctgcatgtcaacagcgcagccttcctgtcttttccagactagcgcttacacatgttttatagttgcaaagcctaattacaataatccgtaaatctccatgtaacagcattaaacttcggatgatcatatcttggtcatacgaactctgaatcgacccgttcaagtctcctaatgtttgttataacctaaagaaccgtgtgctttctttttatgtattgttattgcttctttataggcttgtagctttgcttgtgtgcttcgcgtagcttctgtcgttccggaggttcttgaagcgtggttcgcggtcgtcaccgaaggttcagcaggccgttctctgtgagcaaggcaagtcacatcatccttgagcatattgaatcccagtctataaaattattttgatttaaattaatgcattatcgctttatttaaattcccgcgttatcactgttttatttagccatgcctatttacctttgttatgaccttattattgttattgatattattaccttgttcaccctagaataaacaaaaccccaactagtgggcactctattcatggttccactagtatgaatttaggtaggtgcttcgctgattaattaggcaacattaggtggtttttataactctagactttgggaatattcatatcacttggacatattggaatggtcggattattgtggaattggatgcacacctccccctctattcaaaaccctcaaaatggttttaggctgggctcggggtgcatggttttgttagtagcacctcggccacataaggaccagtcttcgggcctctgttgcaaagcactaccgtacttccacatgtctagtgggtaaggcttagtttgtggctcagtctggttataaacaaaagtacacggatggagatggacgaagtgggggcttgatggacatctctaggacaaatgaaggctacacgggctgcggcccggtagtcgagatgtcatggcacagggctggtgtcctgctgctaggggctcaattctgcctgcctgtccgggggttccggccgtaggtgggttgggtcggtactcttgtctatggctaggatgggttggaaactatgtcatgtcttctgtccatatgccgtggtggtatgtggcacgtggttgcacgtgaggaagacgtgtcttgtgggtaaagatgtacacctctgatcagagtaaaacctattcgaatagccgagccctcggttatgggcaagcctagcaatgtacccaagttagtgttttaaattcttaaaacctgcttaataactaaaatgtggaatggttggcctgggttggcttggaacgagctgggacccagggtcgggttgccagttcggtctgaatcatcgtaggccttgggttaaggcaggttcgtgtgggtccacggccttgcttaataatattgtatagctctaggatcgtgtttacaaaatagctttgggcaactaagtgacttttaaatgctgtttactgcaaaacttaacccctatatcattatccccttgtacccctttgcattaattatgcatctccggtgtggcttgctgagtactgtggttgtactcattcttgctctatctttccccccttcagtaagagaagctttggagaagaagtcttaggtggagtcctggcttataccccagttgagcgcctgtgaagatggagccgtaggcccgctagtccgctgctgtttatttttgtttctcaggcctaaagtgtctttgtaataatgtaaatattatcgatataataaatatgtgccttttgtatcatgtttgtatggtgtacctggcttttcctgggatggggattaatacactagcgttcgggaaaaggtaattttctcggtcgcgacagtagttttactataatataaatagaaatgcatggttttgcagagaaatcagatgtacttgacttctgcaagctgggatgtacttcttcagtgtgcagcaagataaacacttgtaagctggaaaaacatgaaactgaatcaccattagttttcaacgaaaaaggccaatgcgtacgatcattttccttttcatttcagttgctgccaatgaaggagtgaatgctgccgtggagcgttgcgagcatgcatgcgatcgcttctgcacaaatgaagctcagactgtcaccgttgtgtcctaatcaaacgcaacatgcaaccagaaagggtttcacacacatcgaagcccatacgaggctatgaacctggagtagtcataaataagttggatatcctgatatccaagccagtgtgctatcaacttctcttgttttgtgtctctttgtatttccaataagccatgataattgcaatatgttgtcttgtcctgaggacatgagcatacgataagcgatgatatcattggcaaataaataaactttctcatttgttttacgccaatgcctcatgagttaagacctgtttagttcccacgcaaaaacttttcaccctgtcacatcaaatgtttagacacatgcatacatggagtattaaatatagacaaaaaaaactaattacacagattgcgtgtaaattgcgagacgaatcttttgagcctaattgcgccatgatttgacaatgtggtgctaaagtaaacatttgaccatggttagatccatatattcttacacttgtgtttttttttttttgcttttcttttaccttaattgtgatggatctatgtattttaaattgtcagtgtagagattatggtaccatatacgtagatggatgggctatccgactgattataggggcctcgggtattacgtttgcttgtgtatcaaggaaacgacctgtagtcctggtttggtaaaattgtaaagtagatgaagaaaactgatgtcgtattcctaccgttctaaccctgcccccaacctgtagaagatgggaagggagccctccaaaggcatattcacaaccatatcatcagatcaatacaacatagcggatatactttcggtagtttacattctctgagtataggttctactttatatctatgttgttataattgtgggttagcttaccagagaggtgcagtggtgtgggtttaaggtctgaatattcgattactctatgtcatccatggggatatagagtagtatttaataatgtaggcatggtgcttagattattagatatcattatttgggtatatatgctacgggacagtagaggtgggccgctgatggtgacagctcagtacgggtattcctccacgttagcatgtattccaaatacaatttccttgggagtgtactcctccgcatttagtcccggttggacggccatgacaggttgtcgtaaaaaactcggcaacccagggtggtctgtcgaaacaccaagaaagcactattaggaggtattggccgcacagttgtactccctctgtttcaaattttagggcgccgcctttttaatgaaaatcaaactcggtagctcttgactaataatcatactaactatatcaatactaagtattatgcatgttatctcactagatttatatttcgaagtactttcatgtgatgctaatttcatatttgttgcaatcatagaatgaaataaaatactagttaaagtatgttattgaagaatgtgtaaaaaatataggtcttataatttgggacagagggagtatactagtagatgtaaactgcttcctccgtttcgaaatgtcagactttctagcattgcccacattcatatagatgttgatgaacctaaacatatatatgtgtctagattcattaacatctatatgaatattggttatgctagaaagtcttacaatatgaaacggagggagtagaattgagtgtatattggaggtatcggaattgtttgcttttctatttcttcttccacatagcttaggattaattattgtgagaatcagagttcttctgctgtgtcactctacccatatatttgaattaacccctacctagactttgattatacacgtgatgtatataaattgttcacatagttcttttataaatcttctcttgcgattaaataaatatgataccttgaaatacttccaggtgaaatgcaacaatggtatatccatgcgcttgcggattacttctgtaaccataaatataccaggattatttctttgccattacttggaatttatatttttagtaaagtcgttaagaaataccaacacctagacttttgcggcccgataagagctatttccgctgcattatataatacagcttaatttgggggggcatgtgttaacaacggaattttgcatcagactcaaagaggaagaatcaagatcgaagtggatttgatgtggaatcgagttggaacagaaatcggattgcgcatcggctagcgtcgtatcggcgggaaacatggcaggaagttcacctagccgataaggcgagcagccgatacaatatgacttgggctcggtattggcctagattagaataacttttattgccaaatagagatagagctcatttaaggcaattgtatctgttaattaagttagttatgtcgggttttgttagatttagcaagagaccactgtatatggtcttgtttgtatcttatctttaggaaggtttgagtcgtggctataatagactaactttgtactcggggtataaatatgaaccccatagctctgtaatacgggagacaatccaatataacttcggcgcatcgccacccttttcgttcttcttttcggctagttctctcgacaagaggtaacctgtctcgatggcttatcctatcggagcaattatgttgttttggatgttttagaccttttaccatgaccatatgctatcatatgtcttagttaatctagtattagtatctcgatttagccctatcggctggttccggctttagggttctcgctggtatcggctaaatcgccttactatattagattgattaaggaattcaccatcttgaaaagtgattaattgcttgattgtttagactttagacttctttacctactttgtgatgcatcatcccaagtcttgtttagaaccctaaaaactaacctggaattaatcataattagggatagtatcggagtttcagccgatcttaccagatatgcatatttctttatttgtttcatgtatattcgccatctatatagacagatcgcttcataggaatatatcaagtctaggtcatatcggctgaattggtctctacttgatcatatattgctatagattgatttggctatataggtttgtactagagtattagctggtacgctatctttatttatctttcttctactctaaatactgttccatcagctattttcataataatgtcttaaatttcattatcaaacttaataagcagtattatagccgatgaggcatgtttagggtcttttattctttgatctatccaatctatagctgatttggtctaactccatcggctgagaccaccgacgatacgctgtcggcctatcggccgattagctatcggctaactctgcttctgtaagcatttttagtattcttcacattcatatagatattatgaatctagacatatatatgtatagattcattaacatcgatatgaatgtgagcaatgctagaaagtcatataacacgaaacgcatggagtattaagtaacattaggtgctagtagcattttcactgccgattatgcacccggagattctaaagcgggcagcaaatagagtgttgtaacctgctctgcctattgtgtagtagcccattacgtggtagcagagtaattgaattattttttctgctaaatttttaacaaacatctatctaactatagcgggcaagtaatacatgctggtaaggcagaagatatggctttaatataccagtacgttcacctcatgggcagctcaaatatttcagaaatcggaacttgcagtctacagaagacagtgcacactcgatccacatgggcagctagtacgtaccacagctaatgcaaacaaagaatatatatggagcacaataaatatagttattaatgatccaattagttaaataatcactgaatcatgcagtgtagcttgctcgtgagatgcttggctgcgcctataaataggcgcctcactcccaacatctgcataaaagagagcaacaaattagcagtagcctttgaacccattttgatttagcttgttgatcctcgagtaaatctcaatgaaaaccagataggaaacatggaaggtgtgaagagtttgatcatgtgtgctctggtgctaggcttagtcctgcagcaggagaagatccatgtggaagctaagagctgctgcccatccacctcggtaagaaacgtctataactcatgccgtttcgcgggtggctcaagggaagcctgtgctaaactctctacctgcaaacactttgatgggagctgccagccaccttacgatcacctcacccttcactctgatacgggtaaaacggacttaactattaactccatttttctattcttctgtactgttaattaatgtcacaatatttctggctcaatcattcttgcctgcaagaagctagttttactataatataaatagaaatgcatggttttgcagagaaataagatgtacttgacttctgcaagctgggatgtacttcttcagtgtgcagcaagataaacacttgtaagctggaaaaacatgaaactgaatcaccattagttttcaacgaaaaaggccaatgcgtacgatcattttccttttcatttcagttgctgccaatgaaggagtgaatgctgccgtggagcgttgcgaggatgcatgcgatcgcttctgcacaaatgaagctcagactgtcaccgttgtgtcctaatcaagcgcaacatgcaaccagaaagggtttcacacacatcgaagcccatacgaggctatgaacctggagtagtcataaataagttggatatcctgatatccaagccagtgtgctatcaacttctgttgttttgtctctttgtatttccaataagccatgataattgcaatatgctgtcttgacctgaggacgtgagcatcgatgagcgatgatatcattggctaataaataaactttctcatttattttacgccaatgcctcatgagttactataattaatgttcacaatttagtttacaaactctaccaatttatctattatataaagcagggaaattattagacaatgcttaagacgtccacctacgaatacatattattatcgcaggttgccaccttaaggagtttgcataggaagttatgtgcgcctgcgataatttgaatgatattattatattggtaaaaactctaattaagatatgtatgtacatactgcatgatttaaaattaataaaaattgtaatcatcatatatacttagcgtaggaattatattaaatttaatactaaaaactctaattaacatatgtaaatgccacatgcatgatttaaaccttttaaaaattcgaatagtcatatataagtagcatatgaaagatagtaaattaaattgtgaaaaactctaatatatgaatgatagttttaaaaatatattaaatttaatacttttaaaaattctccagtcaattataattagcatatgaatgatagtaaattaaatgttaaaaactctaattaacatatgaaattgccacttgcgtgatttaaaacttttaaaaatcctctagtaaattataattagcatatgaatgctagtaaattaaatgttaaaaactctaattaacatacatatgaaattgccacctgtgtgatttaaaacttttaaaaattgtaagtatcacatataactagcatatagatgatttaaacttgttgaaacctctaataatcgtgcgtaattaacatatgccatacatcaattgatttatatggataatcaatacatccaaaatagtttacatcgtgtacacaataattacggcattacatcgacggtgacggttgaccgcacgtactttctcctcactattgttccctccttgtgatcgctgcgtgagtaaggggtgtcttcatttgataggaggatgctagggtcaatcgtcaccgtgaaagggggttgcccatccaactgatcgtaatcctcgtcagtcttgtcctcaactccgacgatttttcttttgcctgggagaaccacttgacgcttaggctcatcaggccctctacccttctttcctttactagacatgtccttcacgaaaaagacttgcgttacatcattggcaaggacaaaaggttcgtccgagtatccaaccttgttaaggtcaacagttgtcatcccactgtcatcaatcattacgcctccaccagtcaacctaacccattggcaccggaacagaggaaccttgagaggaccatagtcaagttcccatatgtcctcgatggcaccgtaatacgtggcagttgttccatcgtgtcccatggcatcgacacgaacagcgctgttttggttcgtgctcttcatgtcttgggctctcgtgtagaatgtatacccattgatctcatatccctggaatgtcgcgatcgacccagacagtcccctcgccaggaaggcaagttgttggttgattgactcgttacccatgagatgttgtcgtagccacgcggggaaagtatcaatgtgatgccgtgtaatccatgcatcggacttaccgatgttcctggcgcgaactagagccaagtgctcctcgatgtaaggagctaccaatgaagagtgttgcagaacagtgaaatgggctttacggaataaattgttgtctaccgtcgttattgctttccttccgagagttccctttccccgtagtctcccttcatggcgtgattcaggtaccccgattgggcgaaggtcttcgataaattctacgcaaaattcgatgacctcctctgttccataacccttggcgatgcttgcctctggacgagcacggttacgaacatacttcttcagaacgcccatgtacctctcgaaaggaaacatgttgtgtaggtacataggcccgagaatattgatctctttcacaaggtgacaaagcagatgcgtcattatattgaaaaatgaaggtggaaatatcaactcaaaactgacgagacattgcaccacttcattctgaagggcttctaatctatccggatcgatgaccttctgcgaaattgcgttcatgaatgcacatagctttgttattgttgcccggacattgtctggaaggataccccttattacaactggtagcagttgtgtcatcaacacgtgacagtcatgagactttaggtttgtgaacttcttctccttcgtgcttattattcgcttgatatttgtggagtatccagacggtacctttatgctctccaagcattcaaacatactttccttctctgccttgctaagagtgtagctggctggactcaagtaatggcttcctttctcctttggttccgggtgaaggtcgccgcgttgttccatatgcttcagatcattacgtgcttccagtgtatctttcgactttccgtatacacctaggaagccaagaagatttacgcaaaggttcttagtgaggtgcatcgcgtcgattgcgtggcgtacgtccaagaattcccaatatggtaactcccaaaatatagagttctttttccacatcgccgcgtgaccatcttcgctctctatatgctggcttccaggcccctttccgaacactactttaagatctttaaccatagcaaacactgttttcccgctgcgatgtttaggcttcgtacggtggtcggccttatgttcgaagtgcttgcctttcttccgtaccgggtggtttgctgcaaggaatcgacgatgacccatgtatacaaccttcctacagtgcttaagatacgtactttctgtttcatccatacagtgagtgcaagccttgtaccccttgttggactgtccggataggttgctaagtgcaggccaattgttgatggttacgaacagcagcgctcgtaggttaaactcctcctgtttgtcctcgtcccacacggggacaccttccttcttccacaactgtttaagatcttcgactagtggtcttaggtacacgtcgatgtcgttaccaggttgcttggggccttgaataataatcggcttcattatgtacttcctcttcatgcatagccagggggggaggttgtagatacacatcgtaacgggccaagtgctatggccgctgctcatctctccaaaaggattcatgccatccgtactcaaaccaaaccgtatgtttcgtgcgtcctttccaaattctttaaattttctgtcgatgtttcgccactgcgaaccatcggcggggtgtctcagcatcccgtcctattgacgctctttagcgtgccatcgcaacattctagcattccccttgttcctgaacaaacgccttagccgtggtattatagggaaataccacatcaccttagcatgaattctcttctttgttagctgcccgtcaacttctcctggatcgtcccgtctaatcttgtatcgtagtgctttgcaaacagggcatgcttctagggtctcatactcctcaccgtggtataggatacaatcggtcggacatgcgtgaatcttatgaactttcagtcctaacgggcagactatcttcttagcctcgtacgttgtctcgggcaatttgtttccccccggaagaatgttcttgacgagtttcaataaatcgccaaatgccttgtcactaaccccagtggtatccaactttttgtgcccctgctcgcaacctgggtacaacgaagttctgtggtcctccaacatcttgtccaatttatgggcctccttttcactttcgcaatcatccctggcatcctgcaacatctgactaagatcatccgcaacgtcgttaccatcagcagctatttcctcctcgcccgtttgatttccttcaaatccaacatactgagcaaagtccggaatattgtcgtcttccacttcatcttcttccatttcaacaccttgctctccgtgggatgtccaacaattatagcttggcatgaaccccgactcaaacaagtagaaatgaatagtcctggatgcagaatactccttctgattcttacacttattgcatggacaacaaataaaacccctttgcctgttagcttcggccactctcaaaaaatactgcacgccgtcgataaactctttggaccgccggtcagcgtacatccattgccgatccatctacatgagtcaaaaaaaaccgtacacaaataattattcttacaataatgacagtcatacaataattataagatatctttattcatacaaaaatcataaaatattacaccaaataattattaaaaactatttgtaaagttttaaactaattttaatgtgttttacttcttttaattttcattttagtttgttttctattatttaagattaactttcactagagttttccttctcaactattttataaaaccttgtttagcaaatgaactaaatttctatatattctttcttccccacacacattttctctctcatcaacttacaactaaattttggagacaaaaaaaagtgtgcaaaacataggtgcaaatgtagtatgacaaaaaaaaaaacattggaggatgaagttgcaaaccttttaggcacctccgatttctctgtaatcaccaaaataaatttaatagaaattttggcatgacctcccctcttttttgaagaaattttaaagcttgctcgggcagctggaggaggaagaagacatatatataggggtgggactttagtcccggttattagcaccaaccggggctaaagatcaccgggatctttagtcccggttggtataaagttacgactttagtcccggttggtaatgattccgggggggcctgacatgacctgacagcattcgaaccgggactaaagatcatctttagtcccggttggtaacacaaaccgggactaaagatcaaatatgcccgttacccttttgaaccgggactaaaaatcatctttagccccggtttttattgcatccgggactattgtggaaatcggccgaccgacgaaagatggtttctccaccagtgaggcttcatgcccttgcacggagcctatcattgcttttggacatcctcgacatggattaacgattgactctgtacttaaaatcagcaattcaatgtctctgaatccatgacacattgcggaggagcgcagactggaactaatcaagcaaaaaagatgtacttgaaaaatacacatatgatctagtctaatgaagcaacataccttctagtttccagttctcctccaacccctctcctttaaagtgattccaattttcactgtaaacaggttaatatggatttgcaatctctaatttaccccctatggaaaatatgaagagaaagattttgaagaagagaatcaccttgggttaatgcacatgttgagttcaaccagcccacgtgtggtgatacgttgtggtcaacagagattgcaggcgacatcaacaaccggattattaacatgactaaaaagctaagggtgtgtttgaggagaaggggattgaggagattgggaagattgggaagatacgcaaaacgaggtgagccattagcatatgattagttgagtattaattattttaaattttaaaaatggattaatatgattttttaaagcaactttcctatagaatttttttgcaaaaaacgcaccgtttagtagtttgggaagcgtgcgcgtggaaaacgaggtgttttctctcttaatctcccagatcaaccaggaacgaacgaagcctaagtagcctcctcgtgattgagagaacattgcagattttgcagctgatttgaaatcaaattcggcactgtaaattccacaagttagcagggctcctagatgatctaccactaatggtgtaaagagttatccatatgtgagaattgttcataatgcagtataatcattaaactgaaattgattcacaataaatctgaaagcaagttcttctccataatacttgtcatgattaccttgaccaacggttgaaattgattcataattaccttgacctctcatgagataacttccatcgccatcactgtatattatagccgcttgtcacattagcacattattacgggcctgcagcgacggccccggggcggtcttgtcaacggcgtccggcacgttcgacgtctagcagcgccggtttcctcaccgctcactgtgtccccagactggccggtcggcttgcgcggttgcaccgtgcccgccacctgtcgccgccgtgccagtttcgccatcgccccgccgccccagtcagttcctccacgcagtcacacgcgcgccgcccgcccggctcggcagccgccagcggcacgcgccttgcgcggccagccgaccacgccgcggcaccagcgatccctccaaaagcaggcaggctgccaggctccagtccaccggccggccacacgccagcgatgccgcccagtcgtcggagtccgacgaaagtaactcttccctagttcccttcatcccctgtcctgcgcccttgctgcccgtagatgtcatgtctgatgttgctcctgctaggtatgaggccatatgctctggttcttttttaccgtgctctcagtaagcgccgccgcctcttcttctccccccgttagatgaccacgctattagaggattgatgaagtattgggtttagcagtgaatttaggtttctttgaagtttcgtacatactgcaagatgggcagatttgggtgttttgatatccagatcttgctttacacatgtgtttgcagttaaattgtttcttttcttgatttcttgaaggggcagctttggatgttttgatgttcaaagatgtactcgcctttgtgtttgcttttctttgttcggtttagcagcgaagccagaagaagctgaagtgagggagcaaagagggccttaggggataaatcaagagacagtagaatgtatataatttagtaactgcaaatctttgtccagagtaaaaatattgatacacttgacatatagataaaatcagattttagatttagccatggacttggaaattattatctgaaccctagcacagatttaatttatcatgaagcataagaagtataacaactctgtcaattaggctagttcaattatagatcaattatagttcatataggagtccatgagtagcatatttttaataaagagatcaatttgaataattaaggagtctatgaacagaaacatagacctttataataaaccatctggagcaaatggttagggcatgacatgggggaccatgtagcagtatgggtaatagttaagataaggggcaactgtgttcttacccctactttcatatgcaattgtgattttacccctcttttctaaggtttgtgattttaccctcactttttcaaaacgaaactttgatttgcccctactctgttaaaaccacctaacggtgtcaatgaaactaaaaaagacaagtataaccctgtacacttgcccctacttttctaataggatttgtgtattttctaaaaaaatatgatcgcacttggacaaattttgaaagaacttcgatatcattgataggatttcacagaactttcaccaggtgcgaaaatttaccaaaaagatccatcgcattcaccagtaaaaaatcaccaaacaaacaagctcctcataaagtagcacaagatcggaaaaagaaaaagaaaaataagaggcggctgcagcacgaccggagtcgccgccttctcgtgcgatgccgctgctgcgggctcgcacgtgccgccgaagctgcctcctgcttgcggctgccgtcggagccgccgcctattcactcgctccgccgaagccgcggcttgctcactccgccaacaccccctactcgctttgctgatgtgggcatctgctgctgctcgctgggcatcacagccttgcccagccgccggcctatctcgcctgtgcacagccgccgacggtgccactagggttaggctaatcaagtaatcagaatggggatcgggtggtgggatgaaaaaggcaatgcagggtgttgttctttgcactggggtataatggtccattgtttttctcttagtaatttcatctatattttttacactcttattttgggtccaccaaacggtcatccaatataggggcaaacggcagcttcgttcgaaaaaaatgagggcaaaattacaaacaacagaaaagaggggtaaaattacaattagatatgaaagtaggggtaagaacacaattgccccttaagaggaatgaataggacgcatagaccttgttaccgattatttagaaatcagtttcatctttttatatttaaggtcaggcttcataggtgataattaaattagttatagtacagatcttctcatgatattcaaagtgtaggatcatgtaattttcagcatcattcaataaaacttatcctaggttctaattatgttactgtgccagaaatttttcagaatttatcctaggatctaattagcagttattcccagaacttttacattttagaatataatgaactgatttcagtatctgattcataaagttagtgtggtctgagttggccctcccaagtttcttttaagctgtttgtctcacaggtgtgcctttgtatttgtctagtgtgtactagaataatataagttggaccgggagcaacaaaatctctgcttttgacagtgtagcaatacttatgcctctaatagtatttctcaaaaacattgcaatcaaaagctggcattgtcttgtttcacaaaaaaatgttcatcttttggaagtgttataatttttcaattcaaatatgtttgttaagttgagacaactgagctggtatcattgagtagactggtagattatgcaaccatgccaaacttggcatatcttcttttttttatcatggtacagtcggcatatcatttaacattttctcttgtggtgatctagcagaacatagggttttatcttgagaaattctagatttctatctataagttcaataatctttaccacaagtatggattgaactagatgcaaattaattaagctgtggttgcaaattgaattatgtgagtgcatactatcatttagcaatgtcaacagattaaattttgagatatttggatgtagtattgaagtatcaattagtaatatagacaggttggattttcagatgattatgtggcatatcatgcattaacgaaaaaactattactcagcagtcgtattatgcttaaaattttcactattcaagattatcagtttacactcattactgctttcagcatgtttgcagagctgatacttcgaggctatctatcttctgttgtacagtgaagtttagtagtaattaagaaagtgtaagtcataattttttgaagttctctatttccattagctaaagctagcttcctctgtcgaagtatattgtagctgcacatatatgttaaactgattcatactagtcagctaaggatgcatatcttcctgccatgcatgtctgtttcatggcaaaagatatgcaagaagtaaatgagaagaagcagggcacgaccttgtcctcccactagtagacgaatttggctggatttggaatgtggttggatttggctgttaactgggttgtaagttttgtgttgtattggatgtttgtcgggttgtgttggatgctaattgtgctttgacctttgtgctatatgggttgttattgtgtttcattgttggccctctatgggcttagccgatactaatgtaaatgaatacaacatgacgggcagaaaatggtgtggtataatatttgggcctatatgggcttttgcaatggacatggcccatttattatttgatattaaagcaaatggatataatagaattgtgttgacaatatgctacaacatggatggactaggctaaaatctagtcgggtttgccattgggctaaacccataaacaaggtgctaaatacatgaattttaatgggtcatcagctattttatgacgttttttaggctagataatgaaaaatatgagcgtcacaaagctatgacgacggaaggattgtcactagattaatagaaaaaaatctttcgtcatagaacgctattagagatgcatgatatgtcatagcctgaattttcgtttcaggatttataaattatttaataaattattaatagaatttatattaaatgttcattaatttacaagtgaagttaaatgtgggaaataaaatttcctaaatataaagcatggttggatttaatttttgttaaattctccatgattaattatactctctggaattttctcggatttttcagagctcaattcctaattttaataatataaagaatatttcagtaattattcatattaaattaatcatttaatgagctggtttcaattttgttaaatacttagagtgtccaagtatgttcaagatttttcttggaattatttgagtattgaaagtatttttaacaattgaaagatcatctcattggttaatttatttggaaaagcaataaaatcttccttcctagtcttgggccgaattcagcccattctctcccttcctctcagcccggccgaaagtctgtttgtggtccctgccgctacagtactccatcttcaagctccagccgtctcctgcctgtgcacgctgtagcagagcccgatgccgccgatccccttccaaaattcggcctactcgttgctcctttttccaaattagtttcgggaatggaatcctctcaatctcctcttccttttccccaggaaatcccaaaagtttctatggaaatcctttccaatttcgcggttcaatttttcctttttccggcgagaaccctagactttcccgagtttttcccgtcgatgtgggcttgatcccgagctcccgtgcctcgtcgtcctcaagtcccgtcctccgccgtcgccggaaacgctctccccgcgctcgccttctctctccacctccggccgccgctccagccgcagtgcgccgtcgcctcggccgtcgccagtcagcgccgccacctccctcggctccgcaaagtcgagctctatcccggccgctggttgtttttcgccgaatcccaccggagattggccgtcatcatgaaccggagcgccgccgtcgccgccgtgcctccagccgagccgttcgtcgacgtccgtcgtcgccttcggtcgccgtcgtctccattggattcgcagctgcgaggagaagcccgtccgccatctgtcatccgccgaagatcgccggaaagccatcgccgccgtggacccgaacctcgccgccgtcccaatctcgtcgccggccatctccttcgccgttcatcgctgtttaagtgttggtaagcatcgccattgcctcctctttctcccggtgccctccatttgcattattgtgccgtggttcgccggcaaccgccgctcctatgccgttcccagtgtagtttatccctagggtcttaatcccatctaatctaatcttgtatggccctagcgtcgtcatcgtctccgtgtgttgccgccggttcaccgccgtcatctatctctctccgatcgctttggttcggtgggacgtctatccgtgtctccttggtttagatttcaacccatcgccgcgcttgccaagccgctttgtcgcagccgtagccgtgcccgttgcgttgttgttcgccgcactgctgccctagcctgtgcaccgtcgctactggttgtgccgctgttgcttgccgtcaccgctgcgctagtcgcctagctgccattgtgccgctccctgccacagtcgtgttgctgctgctgtgcgttaccgcttgccgctagctgctgtttggccgctgctcgtgtgtgccaagttgttgccgttctgctactgcaaccaccgagccactggccgctgtgctatgccgtgccgttgctgctgtaccgtgtcgcagccgtgcgtcgcttaaacctagccgccgctatcccgtgttgtcgttgttgtggtttgttcgctgtcgttgcccggtagccgagttgcaaagcctaaggtgcatcccttaattcctaccggcctatcgtttgtcgtaccgggactttatcgtgaaccgtgtctagctcaccggtttagtcgcagccgttattgagtcgttcgctcgttcgttcaaacgaggtgttccccttgcttcgttcgttcgtccgtgttgagtcgtcctttagtttagagccgttcagagctgccggttccgttcgccggtttcggttgatcatttgggtgatcccgtgtcacgtagaattgactcgttaagtcggtatctcgtgaggctcgcttgccagatcaatctaatccgttgaatcttggtcaactctatgtcaagattaatcttagccatccaaaatcaatataaatccgttctctcttttcaatggcatattagttcttttttatcatatggcatctaccaaatataatctaatctttttccggaggttgttttaatcttttatctcagttataaattatttgtaaattgtttaattaatttggaatagtcttttctttaataggtttaattggaattaatcttgtaaaattcataactaattcatatgaagtcggaatgaggccgttcaagtctcataattcatctaaaatcatgatctacatgtttgtttactttatgtgtactatttatttggtttttattagtctttttcctcgttttgcgtgttagcttgtcgtttccgtcgtttcgaaggatcgcgtgtgcgtcggaagtgttcaagaagattaattgaagacccactattgcaaggcaagtcacacagatcccaaacacaattcttttgagcatgttgatcctttatttaaattctctatttttttcaactgtgcatttattttcgaatgtcatcgggtggtgtgaaactgtttctttgttatggccaatttgcattgattatcctatttcttgattacctcggattataatttgactagttggatttatatcttggttcaactagatatattagatataattgcttagtcatgcttagaaatattagcacactattgggataactaatgtttcactattacttaatgatgtacatggtaaaggtagctcacgatggtcaatcgtgattggttaattaattaatgtaccaactaaaacttgataatggtgggttgtgagcatatggttttgatggtcgtgctcatgacaattaaggaccggttcacgagtttcgattgtgaaacattaaccgtgccaaccacaagctagcgtgggtaacagctttatcttttgtatagcatggttcattgcggggcaccagactgagaagtggcggagataagcccacggggtcgctgggaagtccatgccttgtttataagggggtgattatgatccaggaatggtgcgctgtggtggattgtattgtgcgaggggtactgtcacagctcctttccaaggaaccgtggtggtattgaggcgcatggtgacatgttgtggggctgtgtcttgtgggtacagtggtacacctctggccagagtaaaactattcgaatagccgtgtccgcggttatgggcgggtctaacaatgcctttcgtgattagtctcacacttctcaccataataaaagatgctataactggtaataatttgattagctcctggtttggaatggtatattcctggtttggagatagatctgtacagccaggtatggttgttcaggatggttgggcctgtgcagcagggtatgctgttcagtgttgattaatattgatgattaattactctactattttacaattctcaaatgtttgctaaatgctgcttttgcaaatgagccctatattatgccatcctttggtatccttgtgcacttgcatatttgctgtgtggcttgcggattattccatgtactcaccttgcaataatcaatcaaacctcagttgaagagaagtcgcaaaggagaagacgtttggcttctaccccagttgagctgcctgtgggagtggaaccggagcttcgctagaccgtaactccgctgttgttttctcttttcttttgtaagtatgtaacgttattattatgatgaatctgtaaattaaattgtcagtttgtgtacctcggctgattcctggatgaggattttgcacaaattagttcggaaattactagtgaatttctgggcgtgacatgataggtgacgaatgaatttttgtcacgcaagcgtcacatattatgaaacgtgacgaaattttatgtgtttgtgacgtaaatgaagcgtcatctatcataagatttcctgtagtgatcgccgctgctgcctggctggccggcctcccatcccgctgcctcccctccggccggatctggcggagggttcggcgaggccgccgccccacgcccggccgcgccggccggcttcccatcctgctggatctggcggaggggaggccgaggccaccgctgcggccaccgagacaagagagaacgagagagagatacagagagcagaggacagggagatcgacagagatcgggagagatagagagagcgcgagacagaggatcgaggagatcgagagaaaggcatgggacattataaataggtgggagagatttcttgtcacgcccagaaattcgctaacccaattttcaagcagaatgtgtattaaatctctgtccaggaccagtcagagtaaacaaacgacaatttgataggcagatccacgtcttacaaaataacaaaataaaactcacatacgcagcggaaaaacaaaataaactagacttaatcttcactaccaaagtgaagcttcctccgtaaaccacaggcaatcctcgacgtccgaaacaagctcaatcctcgaaaaactcaccatctgaaccaacctttacttctggggggcggggataaagcaagactgagtaccaatcaccgtattcaacaagtcataccaacgggaaggtacgatgcaaggatattcacaaagaaatggctcataggataatttgcagtaaagcaacatttataaatcatattttgaaatagtaaaaacaatatatatggttaaacagtattaaatcatcactgtccaacgctaaatccacgttgcaacaggcccaaccaaaaccacctgaactacaccaattctataagtcaaattattatagtgggactaatcacgttgagctggttcaccacccaataaccgcgggcacaactatttgaatagttttaactctgattagaggtgtacaactttacccacaagacacgattctacacatgttaccatgcctcgaagtatcgccacgataccgcaaagggggaaatcgtgacaaaacccgtcatataactctccctaaccaaacatacccacctcagatttcaccccctccttctcccaagttgggaagtcccctctcgtgcctaggtaaatccagctacagcagagaccaatgtccacgtccgaactgcaccattgcctctacccttgccatggtatgtcagctaggttaagttatactctagattcagcctagagcccacgctggtatgtggtaagtaggagtatatcttccaaggattcccgagaactggtacttaattgtcatgggcacgactttcaaaatcatgcatgtacccacgacccactattaaagtatattttagtttaattaaaccataaccatggtggtacaccaataataaaattcaggattaaattatgatgaatcccattgtaagctaattgatctaagcatggctaagcattcctaaaccaatcatctagtcaattataacccaagttatgatcaatgattttatgaaataggctcaatatgatcaatgatgtacgtatgacttgccttgctcttgagctgactgaaccttggcgaccacttcgaaataaactggatcaccagaactaacagaatctaaatgacaaacaaagcaaacaagaaatacaagcaataaggctactgaaacagcaaaggaaactaattttaatggattctaaacatttcaacaagttcactgcaatttgaatgggctaaaacggagcttggattttttagttatgaattttacaatatgagctacgttattactaataaccaaaaaaacttaatcaattattacatattaatgcccatagataaatagatcaatgtaaataaatctccggtaagcaagcctcacaaattaaccactcaacgagccaatcctttgtgtcacgggaccatccaaacagtcaacggaaccagcggcttagaacgactacggaaaactagacatggtttacggcagaggctcggtacggcaaacaataggccggaagggggttagggatgcacctacaggtttgcgactcggctaccgagctacagcacagtggcaaaccacgatgacgacgcggtagaatggcggcgatggcatctaaagcagcggctagggcacgtctcggctagggtggcaacagggcggcggaggcgcggcacagggcacggcggcggcggctagggcacggccggctagggcagctagggttttaccggggctaaacaactagggtttcaatgatgacactaaaaagaattaacaccctaatcaggagattatggataggttcctcaccaaaccgagacgatcggcaaggaggtgacggtgacgacggtccgatggcaacacgcggagacaacggtgatgttagatcgaaacctaggacggaaaaaaattagatccggatagataatggcgatagccatgacacagagagggaaaacggattaccggcgacgctagggtgatggcggcgacggcgggaggtggtggcactgaccggcggcggcggaacagcagcgggcagcagcgcggcacttgggctaggcggcggcagcggctagctaggactagggacaaaacaaaaacaaaaacgaaaatagggaggggctctaacttatatatgagaggggaaaaactaaaggagatggggccggaggggaggaggccgactcggactcgaacagggggagggcggcgcgcgcgcggggagaggaggaggtggcggccgagtgggaggaggagagggggaggaaaaataggaattgggaaaataggataaggactttcccaatggaaatgacgtgcggtaccgttttaggaaaagaatggaaatggatcccgcgaacgaaaacggacacggctcgtcatgcaaaacgaaaccgcgaacaaagggggcagtgaatagtgaatcgggcacgattcacgaccataggtgagagagaaaaaatattattactttaaaacttgataatttagattaacatcattaactccgatgctctgaatattctgctttaagtcctgttaatgattttagagcaaagagaattaaaaaaaaattctccttgacaattccgattattaaacatatcgttaatttatgttttctcttggttaaccaaagtaatttctataggcaattcattagtgaattagaaattaatgaaaaggggaaactccgggtgtgacatttctaagaaaatttggttgggctttttaatcgggacaaaaaaagatgttcagtcccggttcctattcaaaccgagactaatgtggtttttggccaacccagcaaagatggtttgttccagtagtgtctacctattgtgcaatagtgattagtaaggcataagatgccacgtggttaagctttaatgtctcatcacgttcaccacatgggcagccaaagttttccatgaaatgggagttacagtctacagaaggcagttctcactctgctggaatataattaagttagctagctaaatttgtattatctatgggtacaaccatctctaacttttgcgctgctaattttgtaatttctatgggtacaaccattcatggatgcactaaattagttttacatgaatctaacacacgtatgcttggttttgtagaggaatcggatgtacttgatttctgcaagctgggatgtacttcctccgtgtgcagcaccattaacatttgtaaggctagagaaaacatcaaacaaaattactcctgattttcaaagaaaatgtaaaatgtatttgttttatatacctagctaatgtatagaatcattttttttcagttgctgtcaatgaagaagggaatggtgccgtggatagttgcaacaatgcacgctaccgcttctgctccaaggaagctgaggtcgtcactgttgcttcctaagcaagtgcaagatgcaagcataaggtgcttcacacatcgaagcctatatatgcaaggctatgctatcctcgagagtagccataaataagttggatattatgatgcccaagccagtgtgccgtcaacctcttttgtcttgtgctcttttgtattccaataagccataataatcgcaatctgccatcttgtcttgaggatgtgaccatatcaagagtgacgatatcattggctaataaatatagcatctttgaaattggcccatcaaaaaaccagaaacatacattatttttaacgagccttttatgtatgggactgtttatatatctgttgactgaaaatctcacctccaatctttaaaaattttgactgttggatatgctttgagattcgtgcacagccttaaccctaactttttcctcccgttcctctccttcacgcgcattccggcggcgtcggcgacaccgccactggcccaacgcgccgctacctgccttgccggcgggccgaagggagtcaacggtgccggcgaggtccccccggctgggcccctccccttcccttcccttttccctccctgtgctcttcttccctcaagccgatggaggccatctttcccgtcttcgacggtgcggggccaccattgggcgacttcttctaacacatgttatgctttgtccccggcttctacacacagcccaccacca

SEQ ID NO: 4648 - DNA, 13334 bp, Oryza sativa
gcaggagaagctctacgccgagatcaacgccacctgcggcggcgacgacgagctcctggagcggaacgtgagggacaaggacaacaagatgccgtacctcaacgccgtggtcaaggaaggcctgcgcaagcacccgccgggccacttcgtgctgccgcacaaggcggcggaggacatggacgtcggcgggtacctcatccccaagggcgccacggtgaacttcatggtggccgagatcgggagggacgagagagaatgggagaacccaatgcagttcatgccggagaggttcttggacggcggccatggcgccggcgtcgacatgcacgggaccaagggcatcaagatgatgccgttcggcgtcgggcggaggatctgcgccgggctcaacatcgccatgctccacctcgagtacttcgtgggatccatggtgatggagttcgagtggaaggaggtggaggggcacgaggtggagttcgccgagaagcgggagttcaccaccgtcatggcgaagccgctgcgcccgcgcctcgtgcccaggaggagttagacagtgagacagagtccagaattggtttagttttgtgttcattagttagtgttagcgtatatttactcgtgattaagttatgatccaaatgtccatagtgactagaagtatataattaggtttgaattaagtgccaaaagtgtgttttgttttagcaaattttgagcagtgcgtactcgtttttatcgtgctaatttacacgttttatatatgaactcctatcgaatcccaatcaaaataagcagagaggtttggactagagacaagacagcatgacttacgcacaagaaaggaagggtgaaaggttcatcttttatctcctatatactatcagcaattcaaaggaaagagtgtttttttatctcttaccagcaaattcatatcaccaattcgaatatccaaaacaacataggtgcctatgaatttcttttaacaacaatggaagaacaactttgagcctgtgaaaaactttaacttgtttacctcctagaaattgatgcacctaaaaaacttgtttagaaacatcttacaaaactaatgtggcacaatgtgattgaatattccttttctcatacccgctataacatatcagatcactaagagagtaatagatttacactagttggagagtgttagagtatatggtagttaaagtcatattaggataggattggtttgtttggattccttctatatctgtaattcttccttatctcttccctatgtactcctatatatatcgcccccctgaggctcaatacaatgtgtccaatattcacagtatcccctcttcctgtactatccaacatggtatcagagcgggcgatctagtgccgctctcacgcttccgccaccgctgcccccgggagtagcgatctcccgagggcggccacatttttttttctttctctgaggtcgttgtcgccagagggatcgccctcgatctccttcggtggcccccgtcctgttcgtcgtcagatcgatctaaagccatcttcagatcgttcgtgcgtcttcgcgtcatcagcatgcagcagtagcagatcgcatccgcggatcccgtcgacggcgcggctctccacgtcgctgcgccgttggctcccggtcctgcctcctctgttgccgtcctctccgtcgacctctctcctctaccgaggctgctgatgccgggggacaggagccacgtcctcgccgatcatccatgccgtggatctggcggccactccaggccaccgtttcgtccgtcgccccctggtcttctccaacctccgcgccagccgtcgtcgacctcgccgcccttctcaaccccggcgcacagggggagggagtgctcatcactgtcgcttccacacggcaattttctgccggcccctgcagctctgctgctggtctccaccacacaaacctgttgacaggttgttcttctccactgtctctcggtgtctctatatgctatgatcctgtgcgtggcagccatgtgaggagagagagactagatggatggtgtgaagatatacagcctattgccttggttgacttggtggtgacttgcgtcagattcaaagggttgtgatgtgaacggctggtatggactgctgctattgtgttgctgcttgtattttttcccctttcccaatcagtgattgggtttgcgtcgcccaccgcctcgttgacatctgcgcgtctccgacatcggcatcgattctgcttcaacttcatcgttctgcctcgcgcatcttcggcttgatcacccattccagcgcccagctacaacgacttgtacaaccgatcatcatcgagcacgcgtctacgccatcaagcttcgggttgccgctgcgtcgcccccctcgggccacagtgccgctgcctgtggtccacacctccactggttgttacagtgttgagacctgagaggcaccctcctcagtgtggcctcaccaccggtggacttctcgccgctgcatcgacatcgagctgcgttggtcccactacttcgccttcgtcttcgtccagcatgattcatcgccagtgtcgccgtatcttcctcgactatacttcgctcttctccggcaactgcgtgctgctccggcaattctccctctacgccgttctcgcgccgcgaccatcctagaggccttctctgctagtctcctccgacattggcgtataatttctggtggtcccctacctagcccgcacggtattggtaacaccgttgtgcgcgtttgtcccgagtcgtccccgggtctggcaaacctggtgtgacgtcttgtccttcatggttcgactatatcggctcttcgacgtcatcttcctcaacgaccgtcgcgatcgtgtccccgtcatcatctcccgcgcgtcctcgcgcacctcggttcacaacgctctcccatgcgtccacgaccactctacggcgtcctatgtgcgctccgcggctcggctacctcgacatcatcggctccccgacttcggctacatcgaccacggctactctacgcacggcttcagcgaccacggctctcccggctccttcgctttggctacatcgactatggcacaaagggctattatccgtgttgagcactcttgccggtttattctccagtccaagtgtccgcgctgctcacgcttggactgaggggggatgttagagtatatggtagttagagtcatattaggataggattggtttgtttggatttcttccatatctgtaatatttccttatctcttccccatgtactcctatatatatcggccccctgaggctcaatacaatgtgtccaatattcgcagtatcctctctttctatactatccaacagagagtacgtaatagattgaccttaggagagtgacagattaacgatttgcgatgaacaaacttaatctctgaccctctgtatcaaaattcaagcacaagcaaccaacacatattgcaattcagtagtagagatttgattggtttatttgttaacctgtacggaattcgaataaaaaactggtgccaaatttgtcagattttgatgaacacggtctagatttaatcgctctgatttatatttaaacaaggaaaaagtacaccgaaggtccctcagcttgtcatcgagttacaaaatcatcctccaaccgtaaaatcagatatttcacatctcctaactaatcaaaaccggtcacaatcggtccctcggcggttttgatcccggttttattctacgtgactgctgagtcagcacaggacccacgtgggccccacatgtcagcgtggccacgtcagcctatctctctccccgtcttccccttcctcctctctctatctcactcattcttgtctctgtggctctaggcaggggagcaaggcggcagcggcggcgggagcaggggagcaaggcgtcggcggcggcagcggcggcgggagcaagggagcaaggcgtcggcggcctccggtctccccccaccctcttcactctgtccaaggcggcggcgacctccacgccccacttcctcaccgacgcgacgagcacctgcacgatcctcgttagcgggctgcccccggaccgctggtgcctgtacagcggcgtgccgatgaagaagctgacggcgacggccatgacgacggccgggatgccgaacccccacccccacccgacgtgcgtctgcacgtacaccagcaccgacgacgccaccagcgcgccgatgttgatcaaatgttctccatacagtaattattcagtaacctgtatagaaattgatgactactatgtgattacttaactaatagtacctgacagaagaagctcatattattagagtctgaatagatggaagtttggaggcattgcttgtcgctgttattcaaatgtctggttgctgataaataacaggaaaggaagcttagaactgctgtataaatgaagtcagtgtgtggacatcttcagtgtagaattttaaccagagaatcttataaggcttgttctgaaaaaggtgatggatgctgtcctcgacatgtattagaaccagttgaagaagctgctcttgctccgcttctccccctcgtcgttctcgtcgaactggtcgacgccgaacgacgacacacacggcttgatccctcccgttcccagcgcgatcaggtacagcgccaagaacaccacccccgtctgcgcttggtgcggactgcggagcatctcatagcgcgcggcgaggaggcgctccaatgagccgaagcgctctgtgagtcgctggtacaggtgtgtgcaggtcgcgagcagctgctgctactgctccagctctgcgaaaccttccggcgtgtgcaggtcgcgagctactgctgctgctgctgctccaggccagcgagctcgcaccgactccacccccaccgccgccgcgtcgccaagctaccccgccgcccgtcgccggccgccgtttctgcctcgccctgccagccggcccgcacgaggggggcggggaggccggcgagctcgcgccccccgagcccgcgcgccgccacctgggagtagctaagagcccccgggagccgccgtccccggccgcaccaccctccggccccgcgcgccgccatgggtgctagccctagcatcggcatccccatgccgcccgtgcgagagcagagagcgagacggaggaagaaaggagagaaacagagaaagagaaagagcggaaagaaagcaggcgctgacatggacaccctgacatgtgggacccacgtgggtcccacgctaactcagccgccacgtcggataaagccagagtcaaaaccacttaaggaactcaagtgaacggttttgtaagtttagggatgtcatatacctggttttgcggttaggggatgattttgtaactctatgacaagttgagggaccttaggtgtactttttcctttaaacaaaatgaatagagagtaagcccaacagcaaaaaacatgttagcccaaaaccaacgaactgcatcttaggcccatttaaccagtcgaacatgttatctcaggcccgtttagcccacaaaattgcaatatgaatactagcagtctagcacaactagctttggctgcgttcgtttctccaataacaatagttggatgaaattttggatactgatggtacacttttcaaactactaaacggtgcgttttgtgtgaaaacaattgctctaaaatatcagattaatccattgtcaagtttataataattacacgttattaccacctcgttttacgtgaaacacttaatatttatcctcatcttcattttcaggatatccagagaggaacacacgcttgaaaaatctgtcacgtgctagttaattagcaaaaccgaataaggtacttataaaaactaaagtgtcattccttcttactaacatatatctttagggagagctcccaccttttcgcctcaaaagggaaaataaatatgtgcgcctaagttgatcctgatgcccttaaatccaaagttcaaacatgtggggtggcttcttaagaaagaaaagaaacctaaatacttggatgtaatcataaagattcccaccgaatcttcaccgatcaattgagattaattagaaatgacgatagccgtttaagcggagaaggacggcttacattattgctggttaccattcaaaacagaaagaaaacagtggcaccagattctgcggttttctacagagcttttttcttaaaaaaaactagacacaatatatacacaaactattctaacacacgcacactcacccttataaatgtacacacgcacaccttatccttatcagcatctccagaagattaggctgtcatattttaatattgacgaagccactgcgggcgtctcgttgtcgagggatacgtcttacacatgcacacattattcttatgaacatctctggaagactaggttgtcatatcttgatgtcgatgaagtcactacgggtgcctcgttgttgagggatacgtcgtgtaccattaaaaaaaacaattagccgtaaatatgagcacatgtgtcaagcctagaatttaaacccagatggactggtttcaccataagaaacttaaccaattaagttacgctcacttcacggagccctttgtcactctcctagttgacaaataagttttcaatgactggtccatacaggaatatgttcttccattatttaattttagttgctaaacatgttttcacatactataagttgttcgtccattatccatttttctaataggcaccttgttttgcatctttgaaagcattttgaatggctgataggagataaaaaaatgacccctttttttcttcgattgtgtttttgcccttctttctgtccaagactactataggataccaattcactacgtgcagctgtcatatgtttttgataaatctaggttacctattaatttagagtaatttagaaattatacactaagttttataagtatgtgatatatttttgttggttttttttaattttgggaaggtaatatgctttgataaatatgggtctcctattaatatgagagtaatataaattttcgacatgacctgcaccaaacagtaatgtaattagagattatacatggttcttttgaaagtaagtgacatatgtatatgaatttaatttattatttggtggtggtgatatgacgataaattcttggcacctattaattttgatttaatcttgtagttatggcatatgtttaagttaatcattttgtatgcagcgagaattgcaatggatcgacgataaatgtaccatgcgtcttgttcaggcctcctttgaattggaggaaaaatataggaaaaagaaaggaattgaaatcctacactatttatgcctttgattcataggaatgagaaaaggaaaaacgtaggaaactttcgtattcctacgattctagaggaaaaacatagaaaatttaagacaaaattggttatatagcatcgaaagttcacccctttccatttttaacactttcgtcaattctcgatcgttttctatccgccttgatcgttattgactcagccactcacacgatatgacctttttacccctcattgccatgcattatacatgtacttgtgaggggtagaaacgtcatattgcgtgtgtggttatgtcaatagcgatcaaagcggatagaaaacgatcgagaattgacggaagtgttaaaaatgggaacgatgcgaactttgggtgctattatagtgagctggtatctttcggtgttataaaaccaaaaacgtgaacttttgatgctatatatctaattttgtcaaaatttaacatccactctaacctcttggaaaactttccttgagtctatctctttcatctgattcctgcagtccaatcaaacggtcatttctgtgtttacaattctctgttttacacttgcgttgaatacatttttgtttgtcaaagtttcagaaaaacaactgtaccatatattaaaaacagagatatcagaaatttgcacaaacaaatcacacttcaatgttccctattgatttactgattcatcaaaccaaatgccatttgatatcagcattcacctcatgacacgtaaaaaacctgacactgatactccaaattactccctccgtttcaagatgtttgacaccgttgactttttaatacgtgtttggccattcatcttatttaaaaaatttaagtaattatttattcttttcatattatttgattcattgttaaatatactttcatgtacacatataattttacatatttcacaaacttttttaaataagacgaacggtcaaacaagtaagtcaacggtgtcaaatattttgaaacggagggagcaaatgagcagtgagactctgattagtgcctgactcctcctgggcacaaggcgcggacgcagcggcttcgccatggcggtggtgaactcgagcttctcggcgaactccacctcgtcgccggccacctccttccactcgaactccatcaccatggatcccacgaagtactcgaggtgcatcacgccgacgttgagcccggcgcagatcctccgcccggcgccgaacggcatcatccggatctccctgctgcccgtcacgtcgaccccgtcgccgtcgccgccggcgaggaagcgctccgggatgaactccattggcttctcccattctctctcgtctcttccgatctctgccaccatgaagttcaccgtggcgcccttggggatgaggtacccgccgacgtctatgtcctccgccgccttgtgcggcagcagggtgtggctcggtgggtgcttgcgcaggccttccatgaccacggggttgaggtacggcatcttgttgtccttgtccctcacgctccgctccaggagctcgccgtcgtcgccgcaggtggcattgatctcggcgtggagcttctcctgcacggccgggttcttgactagctcggccatgatccattgtagcccggtggaggtggtgtcggtgccggcgttgaggaactcggagcagagcgtgacgatctcgccgtcggtgagcgagcggttgccctcctcggggatcttgacgtcgaggagcgtgtcgacgtacgagtgctggaacgtcgtctccctcgccggcgggaggccctggctggcgagcttcttgtactcccggcgagcctcgatcagcggcacgaagagctccttctgccgccgcagaagggcgtgcccggcctcgaggcggccgcggaagaggtgcttggtgatccacgggaggaagaagaagacgctcgtcttcttcgagatgtagagcagccacgcgcgctcggcgtcctcgatgtcgcgcacggcgtgctcgtggagccgctcgccgaagcacatgagcaggaggaggcagaacacggcgtgctggaacgcctccgttacgttgggcggcgcgtcgccgccgccgccgctgacgccggacgtcgtctcacgcagcttctccatgaggacgcggcgcgcccagacgcgcgccggcgtgaactggtcgacgcgcgactgctgcagcgtctgcgacacgaggttgcggcggagcagccgccacatggcgccgtagttggagcgcgtgatgattctcgctgacgccgaggagcatgctggtggccgtccgcggccggtcggccagcgtggcgccggcgccgacgagcgccgcgtgcgccaggtgccgatccgccacgaagatggagaggcgccacccgatccggagcgtcacgacggggccgtacttgtcgaacagcttcagcagcaaaggctccaattcggccaccaagttccgcagccacagcaggttgccgaacagcggcacggccggcgggccaggcgggaggcggcggcgccgcctcgaggtgacatcgcgcaggaagacgaggagcgggaggagaaggacgccggtgaggatggccaaattatccatcagcgttggcagctgttttcgcttgcgttggttgtcggacgaggctaaactgttgtgtacccatacattttataggtcttcggctcaagtcagtagcagtagactcagtactatgggatgtaatatgttaatcttattcttttaataaaactagctgggtggcccgcgcaattgcgcggctagcatccaaataaaatcatatattttttaatatgattttacttaaaatttattaaatagctatctcattgtcttaagactttgaaagaccaaaccttatcatcctcgtgtttctaattatatagtttttaaaagtcacatcagttgctaccccttatgtcatcttcttctttatttgtttgctcgatctaccactatttctattcattcttcttggaacctttaaaaattgaattttatagtttttagagtttattgtcacattgggtttcgtttttataatttgtagatgtctcgtcaaacgttgtcattatactcctctaccgcccgtccactgtttcttctttttattgtcattgaaattttaaaaatcaaagataattatcatttgggtttatttttactttctagaagtcccgccaaaccgtcagcggctttgccattgtactcctctacagctcacccgcagcctccgttctttattgtcattgagattttaaaatagaacatgattatcattgtttcttttttactttttggaagttccgaaccttaaaaaattagacttgtagttttattatttttataatttttagaagtcccatcaaacgatgccactatgcccctttacagcccgtccgccgcctactctttattgtcgttgtgattctaaaaatcaaacataactatcgttggaattcattttttattttctagaagtcccgtcaatcgtcggcggctcagcaactatactcttatacaccccgcccgctgcttctcctttttattgtcattaacattttaaaaatcgaatatgattatcaatggggtttattttttatactttctagaagtcccggcaaccgccttacttgtttgcttcacggcctgtctgatgtccctccttttaatcgtcattaggattatatttggtgttttattaataatttttatatgtcgtatcaaccgccaccactctactcctttctaggctgttacttaatttatctcgtcatgtgttgtagatggtcttttctttcaatagtctttatttttatcacaaattttagttatttataaattgtatttctaattgaaatcttatttttctttttctaatttcagaatttatttttttttaaaaaaatagttaataccgtattgtgttcctttaatgtttttatttttattttcaatttcagttgtttgaaaattgtattcctacttaaattctcttttaatttttctaattttggatattattttatttttttaattcgaaattttaattattcttgtattgggttcttatatggattcttctttcaatattgcttattttttattccgaattttatctaattttcaattgtattcctactttaactcttcttttattttcttttgctaactttggatttattttattttaattcgaattttaattaatctcatattgggttcttatatggactcttctctttaatattccttatttttaattccgaatttcaggtatttttaaattatattcctacgtggactctcctttccttttctaattttggattttattttatttttattccgaattttaattaatttcgtattgggttcttatatggactcttctctttaatattccttatttttaatttcgaatttcagctatttttaaattgtattcctacttggactctcctttccttttctaattttggattttattttaattgtattcctacttgaactctcttttattttttctaattttggttattattttattttttattctaaattttaattaatctcgtattgggttcttatatggattcttcttttaatattgcttatttttaattcctaattccagctaattttaaattatattcctacttgaactcttcttttattttcttttgctaattttggatttatttttatttttattccgaattttaattaatctcgttctggattattatatggactcttcttttaatattccttatttttaatttcgaatttcagctatttttaaattgtattcctacttggactctcctttccttttctaattttggattttattttatttttatttcgaattttgattaatctcgtattgggttcttatatgaaaatttctttcaatattgcttatttttaatttcgaatttcagcttttttttagattgtattcctacttggactcatctttcctttttctaattttggattttattttatttttatttcgaattttaattaatctcgtgttgggttcttatatagaaacttatttcaatattacttatttttaattccgaatttcagctctttttagattgtattcctacttggactctccttttctttttttttctttttctccgattaatgtgggaatttctagcctccacagcgaacgtggtgtcttcttttcgagctgtcttaataatataatagattttagaacatgttctgtacatacggttttgctaactagcatatgatgcatgttttaagcagccttcctgtttagtttttctttttgactgtcagaacttaggtttacattcgtgctgtggctggaattttatttagaattgatctcaacaccttgggctcgttcttttccacaactaaagactgcaacttagttctttttcattagcatgcttctcgaaccgttaaacgatgtgtattgtaaaaatattaccgtttgaggctaatccatttttctctgtgtcaggttgtgttagctatccaagcgaattggtgtttcaagcgcatagcaatgggagatagaagattgagcttatatggaatagcaattgtgttcgcacatctgaaaaaggggggatgtagcctagtggttgcagtgacctgagtaacaccctaaggttctgagttaaaatcttcatatgagcgaatttcaaattgagttatttgcagtgctaagttctcaatttaaattgttgcatatatccatttggatgtagatgctggataaaaaaaactattctctaacaaaagttgtgttcgccgaatccactttctgctgaacactcatggatgtaaatgtgttatcacacgtgggattaagaccttgtccagcaccacatggcgggcagccctaatgggctatcgatcgcccgccaatgggggtag

SEQ ID NO: 4649 - DNA, 13616 bp, Oryza sativa
catagtagtatagtagtagtataaaatagtatagtagtaataaagagggaggatagtatacttgtagtagtacatatgagagactaaggggttggcctggtggtggcgcgtggtggtcagttgctaatcagtcgtccactggttgtataggtcattgcatttgcttcggctcctggcttcggcttgcttcgctaaccggcgaccctctttcggcaatcaccggcgtccagccttcgcctctttgtgcttcgccgccaggtgatcttctttgatggcattttggcaggcttggtcaaaggcccttaaggcatgcctctaacattaaccaatgtctgacttgtcttctttcaacctaactgaaacatctaggttaggaagacagccagaaaatttgttttgtattcgtcatatatgaatctagtatatttttctcattttagagaaatgagcttagccttattaacgagtgcgataaccagccaaacatctagtacttaaaagaaagcgagcaatcaaagagagcatgtgattttttctttccattctcattcattggggatcatttggtaatcccatctctggcgtccatcatcgatgttcatagcaaggcttccgtatgtcctgctgcagttttagttcgatgttatcaccactggagctacttgaagaactactggcatcaccggtaagctagatcatctgttgtttatcattattattgccagctttattcttatagccataggatttggttaagcatgttttagccattgttccttcaatagtggtagctaaagatgactacatcggcctctctatgattttttttctttcgagtttgcgtatttggtctcattatatttgttaagaatcttacatcattttatcctgccctgtaggttagtaccataatccaattgactaacaaaagcagaatgaacaatttattaatgtcgaactaccatcgagaattactgttaaaatgcacactgtcagctgcaagtctacaacatcatctatttcatgatggattgcattgggtaagctattttttttcttaaagttgagtaacatatctatataatgaattataaaaaatattgagggcacacattttgttttattttgcgcagttaatatgatcattctgagatttctcaagtgatgtctctattttacaaacttcactctatacatggccaatcttagttttactattttcctcttcttagtactccctccattactagggggttgttcgcttgaactaaattgcagccagttgtgactgtagctgcctgcagtacagtacaagccaatataaattttactgcatttgttgtaggtgttgtggttgtacagccgcaactatgtccaccgaacacaccctaggttggattttttaggacagagggagtatgcatgagtaggatcaatagaaccgaaatttcgtttcagaattttgaacccaacatgagtacaaattcccttgacattaagatattgcgcaataacgcgtggagtatcatctacttctacaataagttgcatctcgatcctgctttcgctggtttcagtttgatgctctactgtttctatcatgaagtgaaggtacaatcactacttgttgaggttgcaaacttgtgatatccttttctggttaatctatttggatttggacaaagggaatgcatgcccatctcgacttccagttccaccggagcagctttgcctacctttatgactttactatctaatgaactgcagaaatgataaatatcacaggaacaactccgatccctcagcttaccagttgctgcacgacctccattttttttttacgttaatggacacccaaggccaagggcacatgccactaatttctacaaccacaagatgccaacttattctttctcgatttaatgctgagtatgtttcttttttcgaataagaatgttgaatatgtttcgatcatccagaatttggcctgattagtatcacacgacacaaaatcaagtgtacccacatatgagtttatctgagaggagagaagttggtgaagctcagttttccttttttctgtaaatactgttgaagcaatagaattatttaaaaaatagtcttcatcactgctaactactccttgaggaagggaggaagggcctcttgagacacaaccaagaatagggccagcagctgctaattccttccccctcatgatattgcggaggacatggaattctctgcaggacatcagactgtacaaaatatcgttccttgcatagtagacacagtttcctctgatcaaagggaagtcttgtgcatgaacggcgaacccttctccccgccccaagaagaccgagtagccgccgaggtccgtcaccttctccccaaactccagctgccaccgctccgccggcgccgtccactcggcggccggcggcttgtaaacctcggcgaaggacgggagccattgcacctgaacgccggcggcgccggtggcgtcgtcccggcggcgatggagttgaggtcgtagacgacgaggagctgctgccagtcgacgaagatcagcttcccgtcgtggaaggcgacgctctctatcctggaggtggagtagttcggcctcggtggcgtcatgaggctccacgacgcgtcccctggacgccagaagtacgtcttctgcgagtcggcgcgtggcacgttctgctggctcgcgagcgccatccactgctgcggcggcggcgaggagagcgggtcaccggagaggaagacctggaggacggagcgcagcggcgggagctcgacctccgcgccggaggtgggatcccagagcaccagccgcgcgcgtcggcagctcgtcgtcgtccgtcagcgcgagccagccacggggcatgccgcagcagcgcgggacgccggcgggcggcgaggcgccacgcaggtccacgtgcccgacgccgtcgaggtgccacacggagtaggcgcccaccggcgacatccgccgccacgggcggatggcggcgacgagccacggccggcgggtggcggacgggagagcggtggaggcgcgccagtgcgcgcacacctggtgcacgtggacatggtcggcctccgtcaccagccggccggcgatctcctcgagcagctccggcaggagccactgccatccgctctccgccatctctgatcaacttcggattacgtacgtgaatgcaggtacaatcttgtagtgatcgaatcgcaatccttttgattaagaactatgcacggagaaaaatctatgagtttcttggcgaatccgctgtttccttccatacataaagacacgtcttgcaattgcaggcccgcgggctctatgtttgggtaactatgatacgtgtttgggctttagaatcgatttctagaaggaataagtccattttacgtttctcatctttttatcgttcaatcgtatccctaaattccattgctgagaaatcttagcccccaacttataaaaccagattaaataaagtccatggtatatggatgtatgttttggctgacaaaacatcctagtcggcaaaaaaaaatagaaaaacatatgagacccacatgtaagtaaacttccacctctcccccacctatccctctcttttgcaagagtttgccgaccaggagaggggtggtgtctggtgggagaggagcaagacgacagcgacggtgacttagatcctcaccggcgagatccacgtgggaggtcgaaggaggagacgcgcgtggtggagaggggatggagcgatgcaacccttcagttgccaaggaatggtggacatagtgcagcatcgacagcggtgcttgggcaaaacgcaacacgatggctcccaatctctctagcacggtggctgatggcatggaggccaagctccatggcagcaatgctgcctcgtcaagctcatgtgtcctcctgcgtcaccatagccttcccgagctcctgttgttgcattgtcgaggttctccgtccctaagccgctttcagcgtcgacgcgcaaaggggctccccagttgacggcgtcaaggagggctcgatttggctattgtcgctctaattcgccctccgccatcgctgcctcctggcccacctcgctcctccttggcgagcttcgccgccggttctccatctcataacatatacccatcccccccccctctcgtcggccaactaccacggctcccggcgtcgctgaccattgacgaggcaacaaagctcgagctcgcgggagaaagtggtgcctcatgctccccctaccttctcccgagccttccttggcctccacttaggggtgtaagtggctaatccgcaaaacccacttatatgctaaattaaaccgcgaacctgcttatttgacctataagtgggttcgcggctgacccacttacacccctacctccacttgctccttccccgctggccaccgctaggaggaagagaagggacaggtggaaagaccagagatgtggtcatgtggagaagagaggagagagggagattagaggaagaatatagaagcctgacatgtgggcccacgtggatcccttgttgtcttagtcgggttgattgtaatcaattcgtcacgtcaaccaaaccgaccactcataccgccatgggacctaatttaatctggtgttgctagttttggatggttaagatatccaatatattgcagtgcagggaacgatttgaacttgtcgaaaacatgagggatgtagaatggactttattcattcgtacaatgcagtaacacacgcacggcctggtccaacggcataagagaatcgttgtcaaataaaatcatgagatgccattttcattatcttaatttaccatttattacttgtaaatcatgagatcgttcagatccgatgccgcgagagccccgaagtcatagatatgtccatcagatacctccgtcgtgtagccatcgacttcaaaaggcagaaaaaactttgaatgagctttcaccaatatgcagtcagattatgggcacctgataatgacgtaaagcaatgacacgctctattatttacgcatgcagaccagtcgctgtaggcggtacattacaattgtaaatataaaaacaaactaataacaccccccccccctccgttttttaagtagataccatggatacattacactattttataaaataaaactaatgattaaatattattttaaaacaaacggcatcatctattaaaatatggagataattaatacaacaaagttatagggctaactctatgcatgattccatttctggatcttctggtccgtagctatctgaaagttgaaatattacatgtgtttttatataggcgtattaatcaagataatacaattaattagtaccacctagctaagctatatggagaccgacattatttgcaagttggaagaggaagaacccaaaatttcaaaagctttcgattggatctgctttttcaacgaaagacggcacaagatcttccaacaatattctattggcaccaatttgcgtgtcaagaatgccaatgaaacagctcgcggcggagacgacgacgttgatatcagctctgtgattgattctgtctacaaaatttctcaccgatatcatgcctggatcgatggatcagtacaaatgcgtatcaatcaagtctcgcacgatgcgtgcgaaagacaacacatttcgactctcgttagattttctccctagtgatgaatgcttctctgaacgttgaatgagcaatcgaaatgcatgcgcatgtctgcttgctttttttccactgccgttattatacgtcgtagaactacgtacctggctagtcccatttgttcttttatccttatgagctttgtaattaaaagttgctgttgcgatgaaatcaatgtaattagtactccctcggtagtgctcactccctccgtttccatctgtttcatgttataaaacgacttgactttgattaaaattaaactactttaaagtttgatcaagtttataaaaaaatagtaatattttcaacccaagataaatttattatgaaaatatatttaattattgatttgatgacactaattgaaattagtattataaatattactatatttgcctataaacttagtcaaacttgaaatagtttgactttagttaaaatatcttataacctgaaacggagggagtattaaatatatgacgttgttggttttattcatcattttttaaaagaataccattaataattttaaaatatttagtttgaaaacataaaatcatattccttcatttttttaatatatgatgtcattgacttatgttataatatttgaccattcgtcttatttaaaaaattataaataatgcttaaagtttctttagtggtaaatcaagaaaaaaggaaaataatatttacttatattttttaaataaaatgaatggttaaacatgatataaaaagttgatgacatcatatattaaaagacggaggcagtaccagtatattgttggaaatatagtcattaatcggcatattttaatccaagaaaatgaaacaatgatcatggcataagcagtgtaggatgatcttaacataaccagtagcatactatgcgcatcatgaatgtcaggaacaggaacataccagtaacgcgataacatgctagaggcatcatgtagaacaggaacaaaaacatagcgcacatagtatagcgctaacaatgggaacaggaatagcgctaacagcagtagcaggaggagaagattataccccgagaatggccctccgctggatggtgaggcagaattgcctccgttgttgtagtcgttcacggcatctcctcctggcgcaccagctccggatccagatccagctcctgtcggcggcggcgtaccacctccgccagcagtggcggcagcaactccagacatggcgatgagcagtcgtgcgggaggcactccccaaaaacctgatcacccgcctacccggtgcagatctcaggcgaaggtgtggtttcggaggcactactccttccaatctctcgtgcgcgcaagagatcagaagcggggaagcgagagcaactcaggcgcgaagaaggagaaactaacaccggggaaagaagcgaagaagtcggatcggactcgcggcctccttatctatcaggagaaagaacgtggacgcgctgttgcggagggaattgtggctgcaagaggatagcgacgtgacgcacgcacgccgcgcctcgccctcgccctcgccctcgcccatggcccggcccggcgcgcgcgcgcgcgcgtgtggcattccgacccccacctcaactggtcaacaaggagcctctaataactccctatttaggttgagatatttctcgcttaaatcctgaggtggtattattatcctcaacatttattatgggcctttgagatttaatattataaattgggcctagcccaattattctaacaatccccaccaaatttcaaggctcataagaaatgttcccaatgttgtgcctgtttgatataccagggttttggtggagactgttaagttgaacttccacctaggaaatgagctacatcaaaccacaactgaacaatggactatgccttgaattgtaagttttgtgtgatcaggtttcactcagaaccttgactggtactgggctgccgttcgcatcccctctgtttggagcatataagtcaaactccaggcctttcatgagtatctagagattgcccaaacctcatagactgtgactagcagtcgaactcatataggtgtgttccttctgagatgttctgcaggtcaatatctctgcttggaaaagccactcggatcacattaagacataagccatcctaccatgcaggaaagaagagaagcacatcatgaaaatgagcccttttcaagggtctcttctctcagtcacacaatagtttgtttcaccatccaaattcacgggatctccgatcacaatggacaggtttccactattatgcaaccttaggtgggtatcaagcccatttccctcgatgcactgtctatcacattacgtggtagccccttggtaaactgatctgccagatttctagccgtttggacatagtccaatgctatcactccggagtttttctgctttctgacagatttcagtcttctcttgatgtgtctagatgacttcatgttgtcctttgaactgttcactttaataatcactgtttgattatcgcagttcattaggatagctggcactggtttttcaaccaccggcaaatccatcaggagttcacgaagccactcggcctcaactgtcgcagtatctagtgctgtaagttctgcttccattgttgacctcgttaagatggtctgcttgcaagacttccaggaaacagcgccacctccaagtgtgaacgcatatccacttatggcttttatctcattagcatcagatatccagtttgagtcactatacccttctagtacttttggatacccggtatagtgaattccatagctcatagtgccctttagatagcgcattactctttccagagcctgccaatgatcatctcccggatttgagacaaaccggctcagcttgcttacagcaaatgagatgtcaggcctcgttgcgctagccaagtacatcaatgaaccaatgatttgagagtatctcagttgatcccttgctattcttcggtttttccttaatagcacgttaggatcataaggagtaggagctggcttgcagtcactatatccaaagcgactcaaaaccttgtccacatagtgggattgcacaagtgtaatcccaccctcatctcctctttgtagtttgatgttaagaataacatcagcctctcccaaatccttcatttcaaaactcttggacagatagtctttgacctcctcaatcacattaaggctagtcccaaagatcagtatgtcatcgacatataagcacaagatcaccccttctcccccaccatagcgatagtatacacatttgtcagcttcgttcacaacaaagcctgcagatgtaagcgtggtgtcaaacttctcatgccattgcttaggtgcttgcttgaggccatataaggatttcaatagtttacacaccattccctcctgaccttctagtacatacccgtctggttgatccatatagatctcctcctccagctctccgtttaggaaagctgtcttaacgtccatctgatggacgagaagaccatgagaggctgccagagcaagtagtactcgaatcgtggtcaagcgagcaactggtgagtatgtgtcgaagaagtcctcgccttccttttgggtataacccttggctacaagccttgccttgtacttttcgattgtaccatcaggcctaagctttttcttgaaaacccatttgcatcctacgggcttacacccatatggatgctcaacgacttcccaagtaccattagacataatcgagtccatttcactgcgtactgcttccttccagtagtcagcgtcaggagatgaatatgcctcttctatggttcttggggtgtcatccacgaggtatacaatgtagtcatctccaaaggattttgcaaccctttgtctcttactcttgcgagtatctacaatgttgtcctcctcaggattttcctcaggcgtttgatcatcgtgttctatcggtgcaaagtgctcatggggcatgacagtttctttactagaagtgctaggtgtatatttcataggaaattcattctcaaagaatgtagcatctctggactcaagaattgtaccagcatgcatgtcgggtactccagagtttactattaagaatctataacccacactgtggatagcataaccaagaaacacacaatcaacagtttttggtccaagtttccgctttttggctataggtacatttaccttggccaaacagccccatgttcgtaggtatgagagatttaatttcttcctttcccattcctcgaatggtgttacttccttatgcttcattggaattttattcaggacatgacacgcagtcaaaactgcctcaccccaccattccttggaaagccccgcagtatctaacatggcattcaccatctcagttagagtacggttctttctttcggccaccccatttgattggggtgaatagggaggcgacatctcatgaataattccaaactcttcgcaaaaggatgcaaactcattggaaaaatactccccacctctatcagatctcaaccgtttgattttcctttcaagttggttttctacctcagctttatagattttaaagtaatgcaatgcctcatcctttgttttcaatagatacacatagcaaaatctagtgcaatcatctatcagtgtcatgaaatatttctttccccctttagtcaacacgccgttcatttcgcacaaatcggaatgaacaagttctagaggtgccaaattcctcgcctcagatgccttgtgaggcttgcgaggttgtttcgattgaacacaagtatggcacttggaacctttgaccaaagtgaattttgaaattaaactcatgttagctaagcgcgtcatacaaccgaaattcacatgacagagtcgcgaatgccacacattagactcatcattctcgctaatatggttcacagcattatgattattacacatgtcattcaaagaaaagcggaacaagcctccgctgtcataaccttttccaacaaaagtcccatatttagatacgacacatttattggactcaaacacaagtctaaaaccttctctacacaatagagagccgctaactagattcttctttattgaagggacatgttgcacgttcttcagctgcacggtctttcccgaagtaaacttcagatcgaccgtaccaacaccatgaacagccgcaagcgacccgtttcccatcaacaaggaggaacctctcccgacctgataagaagaaaacagagaaatgtcagcacatacatgaatattagcaccagtatccacccaccaatcaggtgaatgaaaaacagagagaactgtaggtaatattttaccataccccgatgttcctccgccctcgctaatgatcatgttggcagacttcctgtctttgcgctcaggacagtccttggcccaatgcccagacttgccacacacaaagcagtctccctttgcctttcccttgcctttcttcttaaaattggttgcagccttgggtttgacatcaggcttgactttcttgttgttgtgggatgcatgagggttcttcttctgtaccatattggcactagaacctccctcaacctttttgccccggacgtactttgccctcgccttctcctcaacacccaaagagccaatgagatcaggaacactgaactcttgtctcttgtgctttagagaagtggcaaggtccgaccaagaaggtggtagtttggcaataatgccacccgccacaaacttgtccggcaactcacagttgttgttctcaagttccttagccagcatctgaatctcataagcttgttctactacagaacggtcatcgaccatcttgtagtcatagaactgctccatgacatacagctcactgccggcgtcagaaactccgaacttggcctcaagtgcatcccacatgtccttcccagaaggcatgtgcatgtacacgtccactatgttgtcagcgagtacactgatcaatgctccacggaacaggcaatccgaagcctcgaacttagcctcttcgtcaggagaaagaggtggttcacttcgtttgccccgtgaaacatagaagcactgcatcgctgtcaaccacaatagtgcacgtgctttccatctcttatagtttgaaccatcaaaagcatgtggtttcagtgcagcagcaaagccaactaccgaaaatgacctatcaggtttttggattgttggaaatatagtcattaatcggcatattttaatccaagaaaatgaaacaatgatcatggcataagcagtgtagggtgatcttaacataaccagtagcatactatgcgcatcatgaatgtcaggaacaggaacataccagtaacgcgataacatgctcgataacatgctagaggcatcatgtagaacaggaacaagaacatagcgaacatagcgcacatagtatagcgctaacaatgggaacaggaatagcgctaacagcagtagcaggaggagaagattataccccgagaatggccctccgctggatggtgaggcagaattgcctccgttgttgtagtcgttcacggcacctcctcctggcgcaccagctccggatccagatccagctcctgtcggcggcggcgtaccacctccgccagcagtggcggcagcaactccagacatggcgatgagcagtcgtgcgggaggcactccccaaaaacctgatcacccgcctacccggtgcagatctcaggcgaaggtgtggtttcggaggcactactccttccgcactccccaaaacctgatcacccgcctacccggtgcagatctcaggcgaaggtgtggtttcggaggcactactccttccaatctctcgtgcgcgcaagatcggactcgcggcctccttatctatcaggagaaagaacgtggacgcgctgttgcggagggaatcgtgggaacgtaggttagtggctgcaaaaggatagcgacgtgacgcacgccgccagccacgcctcgcccacggcccggcgcgcgcgcgcgcgtgtggcattccgacccccacctcaactagtcaacagggagcctctaataactccctatttaggttgagatatttctcgcttaaatcctgaggtggtattattatcctcaacatttattatgggcctttgagatttaatattataaattgggcctagcccaattattctaacatatgagctaatcttttataaatatttctcatagtattataattttattagatattaaccacgagagagcgatgtggtatctcaaatcggtcaaggggctgcttttgatgccacggatcgattagacagagaagaaaaagtatgatctccaattcactttggagatactgccaattgctaacacgtcagttcatgcgtttgcatttgccaccgtatatagacttcaaagtgacgggatcaaagaagtctttgtttgtagggaaacactttgtttcgtatgtgcgacactgttttttccccctgtcttttgcatgagctcgtgcgtggaattaacgtacgaacgaaattcatggactcctggatttcatacgaaaggaagaaaaatcctgatcaaaagacatagtaccaataatgatcaatatattcaggaaaacgactagacatatccactttttcggaagcagtcatagaagactggggcatgctgaaatttctgctacgtatacgtactaagttttctcataggaaaaatatgccgtcatatatagtactagcatatatgcattgcatgttctattttctctgttagttatatatggtcaatatccgctggtcacgttaataatgcgaaaactgctgacatctgcgttcattgaccagctaatctcctttgtgcgtagaaacggaaaa

SEQ ID NO: 4650 - DNA, 12759 bp, Oryza sativa
ccgcccattagcatttccgccacatggcatctcagtgtcgccaccgtcgatgagggagatgggcatacatgcatggtatatcggtttgcactttttatttcagcgaaaatttctgtagcaccaaaatacgaaatttcatgatttttggcattttagaccaaaattatttgaaatttcgactgaatttgaatagactttgatcaaacttaacaaaaaaaatttgacatattttaaaattccggtcgatataatgacttgtcggtggggttcgaaatttcagaattttccgaaattttgaaccaaaatcgctatcactagtcatgcgagcacgaagaattagggaacaattcaatatgaattcgggttaaacccatttatgcccaaaaataccagtccaatccaaacccttttttcttttttttttttgcctcagtccaaaccgctccggtccgttagctcactcaacccatctccacccaaataaagcccacccgtagtgaaaagggtaaaatccagaagaacaccacgcacaagcacaaccttgaaaatctgaagagcacacgaagccctaattaaccaaaacctccgccgccgccgccatggccgccgcggtcgccgcctccccggcgcaatcccgcaagacggagacctacaccgacaccaagcgccgcgacgacgtccgcggcctcaacattgccgcggggcgcgccgtcgccgtcgacgcgcgcaccttcctcggcccacgcggcatggacaagatgatctcctccagctcctccggcggcgaccaggccgtcatcatcaccaacgacggcgccaccatcctctcccgcatgcccctcctccagccggccgcccgcatgctcgccgacctctcccgctcccaggacgccgccgccggggacggcaccaccaccgtcgtcgtcctcgccgggtccctcctccgccgcgcccagtccctcctctccgccggcgcccaccccaccgcggccgccgacgccctccacctcctcgccgcgcgcgccgtggaggtcctccacggcatggccatccccgtcgagctctccgaccgcgacgccctcgtcaagtcggcatccaccgccctcaactccaaggtcgtctcccagtactccaccctcctctccccgctcgccgtcgacgccgccctcgccgtcgtcgacccggcccacccgtatctcctcgacctccgcgacatccgcgtggtgaagaagctcggctgcacggtcgacgacaccgagctcatccgcggcctcgtcctcaacaagaaggccagccatgtcgccggagggccaactcggatcggggacgccaagatcgccgtgatccagttccaggtctcgcctcccaagacggacatcgagcacagcgtcgtcgtgtcggattacgcgcagatggatcgaatcctccgcgaggagcggaattacatccttggcatggtgaagaagatcaaggcatccggatgcaacgtcctgctcatccagaaaagcatcctgcgtgattcagtcaccgatctgtcgctccattatctcgcaaaggccaagatcatggtcgtgaaggatgtcgagagggacgagatcgagttcatcaccaagaccctcaactgcatgccaattgctagcatcgaacatctccgcgaggacaagcttggtcatgcacatctggttgaggaaatctcggttggtgatggtaacaataacaagattgtcaagatcactggcatcaagaacatgggaagaacagcaactgttcttgtccggggatccaaccagatggtgatcgacgaagctcagcgcagcctccacgacgcattctgtgtgatcaggtgcttggtgaacaagaggtttctgatcgctggtggtggtgctcctgagatcgagatgtcgatgcagctggctgcttgggcgaaggagctgagagggatggagagttactgcgtcagggagttcgccgaggcgctcgaggtcatcccttacacgttggcagagaatgcagggctcgatcccatctccactgtcaccgagctccggaatcgccatgccaagggcgagaagaacgccgggatcaacgtgaggaagggtcggatcacgaacatcctggaggagaatgtcgtgcagccactgctggtgagcacgagcgccgtcacgctggcctgcgagtgtgttaggatgatactgaagattgatgatattgtcaccgtgaggtaaggttaattaattatgtggtggctgaccgtgctggcctctgctctattttgtctgtcatgttatttaggagatttgatattttgacaccttctaaagtggcacgctttcgttgattcagatggttcgaaatatcatgcattctcacaactgtcaataaaatcaaattggtacaaataaagtgtcaaaccatcaaatttgggttttacaattttatttgtttgcgtgccttttctgtctagatgttctgagcgtatgtatttgacgtctgtggaagagaattatatgttgtatttgcctctacctggatgaaactgaagtgtagactgccggaaacgccagttagcgagcaacccaattcggcgagacgcagtccaaattctcaccgcgcgagccggtttggatgggccgaggtcggcttggattaggcccatttaggcatttagtgaacatattagatacagtctattttgcctccctcaaagtgtagccctagcttgatttatttcactcgaccgcagaaccggatatagagcctctctcaagtctcaagtctcaactctcaactctaaaaacctgttcaatttaactccttaatatggcatctatgtaaactacagataaaagtaaaaataaaaattcaattggaccacatgctagtgtcataagtaaccccctctctcacaactatttcttccttttcactctactgtggtgtgtgtgagagggccagcgagccgaaggcggatcgaacgtggaaggcatcggcggcccaaggccttacgtggctggcgagctgaagacggattgagagaaggaggcatcggcagcccaaggccttacggggccggtgagctggggctaatagagctaggaaggtggcgacccttcgaactagggaggcatcgacgacccaaggttttatggggctggtgagctggaggcagataaagcaagggaggtggtgacgcttcagagcttcgtgacctaacgtagtgtgacatggttagtgttgtcgatgaaaaggcctcacggagtatgacggggacgagtcgacggtggtgctccgtccagctagcaacgacgctcttgtggactcacagatcgagttgttagcatgagttgactaggtcaacatgccacataaaacaaaagcaatatccaaaccaccaaacctctaaataagacaaattgaacaggttatgagagttgagagattctctatatctgattttacgattgagagatatggatcaatagttgagggaggtaaaacatatttttttttccaacacataatcgaattaagctaaccagcccacatagggctcattattacatagaaaactaaatttcgttaaacccgtttaattcatcctcctgcgcacgagctgagcgcgaagtggctttgccatgacggtggtgaactccaacttctcggcaaagtccacctcttcgccggcgatctccctccactcgaactccctgaccatattggccacgaagtactccaggtgcagcatggcggtgttgagccccgcgcaaatcctccgcccgacgccgaacggcatcatgcggatccccttgctgcccgtcacgtccaccccctcgccgtcgccgccggggaggaacctctccggcatgaactccattggattctcccattctttctcgtctcttcccatctcggccaccatgaagttcaccgtggcgcccttggggatgaggtacccgccgacctccatgtcctccgccgccttgtgtggcagcgcgaagtggcccggcggatgcttccggagaccctcgaggatgacggccttcaggtatggcatcttctgggtgtcctcctcggtgatctcgtcgtggtcgtcgctggtcttggacttgatctcgtcgtggagcttggattggatggatgggttcttgaccagctcggccatgatccattgcagcgtggttgacatcgtgtccgtgcctgcgtcgaggaactcggagcagagcctgaccatctcgtcgtcggtgagagcgcggtcgccgccgtcctcagggagcttgatgtcgagcagcgtgtcgacgtacgagtgctcgaacgtcgtcgtctccttctccggcaccgcgcgttccgcgagttggttcttgcgctctcgccgcgcgctgatgagcggcatgaagagctccttctgccgccgccgcagagcgaggctcgtctggatgcgcccacggaagatgtgcttggtgaccgccgggcagaacgcgaagaccttcatcttcgtcgcgtagtgcaggagccagccgtgctgcgcgtcgccgatggcgcgcaccgcggcctcgtcgagccactcgccgaagcacatgagcacgaggaggcagaacatggcgtgccggaacgcgtccgccagcacggcgccgccgcccaccaacccgtcgacgagcgcgcggcgagcccaggagcgcgcgggggcgaaggccgcgcgggcgcgcgacgggtgcagcgtctcggcgacgaggttgcgccgcaggaggcgccacgtcggcccgtagttgccgcgcgagatggtgttgccgttctcgccgaggagcgcgcgcgtgacctccggccggtccgcgagcgcggcgccgcgctccaccagcgcggcgtgcgcgacgcggcggtcggcgacgaagatggacaggtgggatcccacgcgcagcgacacgacggggccgtacaccgcgatgaggcgccggagcaggggctccaggtcggcggaggagtggctcagccagagcaggttgccgaggacaggcacggcgagcgggcccgggggcacgcggctgcggccgccgcattttcgcagcgagaggaggatgaagagtgcgactaggaaggcgaggaggagcatgagccactgtgatgcgtcgacgttggccatggcgatgacgtctcgctccttgcgttgtcaagatgctcatgctccgcttcacttgtgggtggagttgattggttcgatgtccatggcacacgggcctcaaatccattctagtgggggaaaaaacaaaaaatagtatgtatactttaatagtattaacctcaaatccattctacatagtgaggaaaaaaccaaaatattgacaaaattataaatatttttttctacagctaaaatgtaataaatttgaggttaagattttatacgtaggtacaatactattgaaaatacatgtacatatttttctcgatttttttgtgatatttgtttgttgatgtgcatggtgtgtatatgtgatatgtttcctttatggttaggtctatcttctaaaatttaatcagcaaatatcattgaaactgcatctggagaagcttctataaataaatattattaaaatgcgccagcagattttgaaaatttaacggcacgtgtttaagatctctaatttttttctcggctaacctagctaaggacctgttagttccaaaaacaaaaactttcacgctgtcacatccaatgtttggacatatatatgtatggattattaaatatagaaaaaaataaactaattacacagattacgtgtaaattgcaagaccaatcttttaagtctaattgtgccatgatttaacaatgtggtgctacagtcaacatttgctaatgacggattaattaggcttaataaattcgtctcgcagtttcctagcggaatctgtaatttgttttgttattagactacgtttaatacttcaaatgtgtagccgtatatccgatgtgataaccaaactcaacaattttcaccaactaaacaaggcctaaaccatactacagcccaccaaaacaagcttgatcggtcattagcttgccgatgaaggagacattctaactctccttaggggtagggattttctagtcaggttagtttgctaagcactaagcagagctaatttttgtagtaatttgctaagccgtttggtttaaaaaaacactcaattagtttattagtattaattaagagtgaactattaaaagcttcgtaaatggattttctttggattcttagaaaactattctaatgatttttttttaaaaaaaaaacctgcatggtttagcggcatgaaaagtatgaccgttataaggagcggccaataagacttccttagaattaacactggtaaggctgcgttcgggaggtgatgttaggcccgcgcacacaaaacaaagccatgcattttatcatgattaattaagtatttatattttttaaaaaatagattaatatgatttttttaaagcaactttcgtatagaaactttttttaaaacaccgtttagtaatttaaaaagcgtgcgagagaaaaatgagggaggtgagttgggaaagttgtggaaagaacacaacttaaatcatggtaggtagatgtataacactttaaattgattaatatgtatataacttaaagtacaattgtatcatggcaatcctaatcttccatctcagctagttttcatagcattaaatatattgctatataagaaaaaactaaggtggcaaagagagttaatgaggagaaataaaaaaaaaaagatgaacaaaccagctccatataggatccgagaataaaaaataagaggattagtggatgaaaggagagagaactgaggtgattggatgatgatttattttaaagaaaccacccattagatactccctctattgagcattgtcaattgattatcatataacctttttagttattcccaaattatcatcatattaatatcaattctctaatctattcgttatctatgcatgaaaggcaatggatattggtgcatgcatctatgcacataactcttcacaataacatgcaatgtctttatttatcattggctagaaaatggtgcatgcatcgaatttgttatcggaataaatatagtataagagggtcattgtcttttgttagtcttggtgtgaataaagtctgtcatatttgttaaaaaaatgtaatatgatgatcaattggaaacaaatggagtttacagtttcaatacctaatacataacgtttgtatgatatggtatgtatggaaattagtcgataatatttttccagtataaaaaaaaacaatgagctgccgaaaatggcatcgctataaaaggataagtcatttcattgtccacttgcgattttgtgatagtgtaccgtatagtatcgtgcggatcacagtatccttaaaacgtcaaattgctacggacagaaatagtactatattactatcatgaccgcagagaaagtagtactgtagaaagtagggagtggattctaatccttcaaggggatatcccctcgtatacctttttcttttaaattcgatgtaaatagttgtgaaaaattctgaaaaaatttgacaatatagagcataatgatacctactagtccactgaaattcatgttcaaattcgatctacacatcgagaaacaaaaaaacaaatttagatataaacagtacactactattcatacgctgaatttgtcttttttatatctcaatgtgtgagttgagtttggacttaagattttgtggatttgtatatatgtgttgtatgaatgttgtcaaatttttttagaatttttcataaccgtttagatggtttttaagcaaacgatggaacatcccctcgaaggattagaatagtttcccgtacaaagtaccgcagtaagccagtaacgttctcctccgtcgttgactcatatatactccctcctccctccttctcaaaaaaaaaaaaaaactctagccatgtataataaggcctatatagcacaggatcctttgatcgtcgtaggaaatttagggctacttttgaaaacgagactgaaaaaacgttcgaatagtaaaaatataagatttttgatatgaataaaagtgtaaaatagaatattacaaaacataaaaataatcgtttaattggatcgcatcaaaaacgcaaaaattagatgagagagaaaaactcaaaaggaaaattctctgagttctacctcgttaaattttctccaaaacttgtatgataaaagatattcctaggaatttcataagattcatttgtattcatttcttttgattcaaaaggactgtaaaaaaaattctatagaaatgaaattctccaaaattcatacaacttcctttgaattaaaggggagcattttttttcctctactttaagaacgatgcagatatgcaattaaccaaagaaggagtgagataatcagagattaaccaaaatgattgtttgactagataagaaataatggatgtcgtgtaatcatcactactgattttgctatgttccaacaaccagccccagtgtttcacttattaatatgcttattcgaatcatttattagcaaataaaaagcacatgccgtaaaaaaactacgatgaaaaaaaaatcaaattcaaaatgaatttttggcttataagcataagcataagccaaaatagagacccatttctatccataattcctaagttatatatgtatatattctccgtttgttttgtacatgaattcatgcgttttgtagtattcctatattttcctttgaatgttttaggtttcttacgttctaaacaggccgactatcattcacaacaagggtggcgtccgcatgttctaaggctgagcgcaggaggataaaagaaagttggtgaagtgctgtctctctagcagttggtgtggatcgttgtctgcagatgcagggtcccatagtgtgggaatttactctgttttttagctttttgctgttgcatcgtgtaggattgggtgttgtaggaaccccagaaaatgcaagttgtaagacctgttggtgtcattttcttaatgaaatgggagaggttattctctctttctaaaaatctatatccatctcgtacaataaaaggcacgagagatttgtgaaagaaagtccagcagaaaatcaatcggcatggcgggacgaatacaggttggccatatcaatgcagttgcaggctcatttatgtagtaatccgtagtactattacaaatggtctgatcaggcacgtaaacgcattcgcctttgacatgcaatttcgcacaacacgcacgcctagtgtcagtgcttttgcaaacacgcaaaagaattacacgtcaatataattgcaaaaggattatacgtcaatatattagaagaaaaagagtttttatttcacaacgcaatcacctcgtgccactgctaatgcctctgtctcaaaatatacaaaaattggggttaaaaatgggtactaacaaagttcatagaattaaataggagaatatagtaattagttgataagagacatatatatatatatatatatatatatatatatatatatatatatatatatatatatatatatatatatatatatatatatatataaaattaaatggtgaaaaatatgattagttgggaaagaatatgacgaagaagttattgtatttttaaacaaattttaaagggaaattgttatattttgggagcgagtgacgcaatccggattctcacgggggcccttagtaaaaatgttacacgtatgagagtttattttgattcccttaacatagtaccctcatagacatcgtccccaacctcgactcctacaacacctttattctcatagacactgaaaatgtattttaatgttttaagaggatatcccatcgttaaaaattataaaaaaataaaaaaattaacatgtgatatatcaccctataaatatgtaagtttaaattcattctctacgagttataaccaaaataacatatttaagtagaacaatcacaatcatatttttttcaacttatagaggtgaaatttaaacctagatatttgtgaagtggtatattacattttaatctatcttcataaaaaagttgaggaatgtgttataccggttttgtggctaagggatacgattcgacaaagggcaagagcatagggacgcatgatagacttattcctttagtaaacacatactttaattaactaattaaagtgtccacattaggcccattatttgtaccgagtactaaaaacttgattaaaagcccatttaatcgacgctcctgagcaccagctgcgcgcggagtggcttcgccatgacggtggtgaactcaacttctcggcgaagtccaccttgtcgccgaccaccgccttccactcgaactctctcaccatgttggccacgaagtactccaggtgcaacatggcggtgttgagccctgcgcacatcctccgcccgacgccgaacggcatcatgcggatcctcttgctgcccgtcatgtccactccctcgccgtcgccgccggggaggaacctctccggcatgaactgcatcgggttctcccattctctctcgtctcttcccatctcggccaccatgaagttcaccgtggcgcccttggggatgaggtacccgccgacgtccatgtcctccgccgccttgtgcggcagcgcgaagtggcccagcggatgcttccggagaccctcgaggatgacggcctttaggtatggcatcttctgggtgtcctcctcggtgatctcgtcgtggtcgtcgcttaccgtggccttgatctcctcgtagagctttgcttggatggatgggttcttgaccagctcggccatgatccatggcagtgtggttgacatcgtgtctgcgccggagtcgagggagctcagagcataggcataccatcgctttgtcggtgagagcgcggtcgccgtcctcaggtagcctcaggtcgagcagtgtgtcgacgtacgagtgctcgaatgtcgtgtcattctccggcaccgttgctggtcgtttgcgctaaaactaatctgcagttagaaaacaatccgactactaaacggcaaagccaataatattgaaaattaaatcgatgaaatcgccgagattaatcccttcggctggattgaatccgagacgaaaaaaaaacatgcttgacgaaatcggtaacgtcggagattggttccatcgcactcatcgacaggaaactcgacagccccctacctggcgcgccaactgtcgaaacaagatttcggcaatataaacgaggtagcgcacgagacctaaaagtagaaggacgcgaagacaagaattttagagggactgactatccatttgtcgggtgatttttaacaagaaatcacctaatttttttctacccttagatttacatctaacaaactacaaaaagaaaataaaaaatacatatttacttacacatcattgttatcaaaattacaatgcacttgcatgccatatcaactgaatttacaaatgtaattttagttatataggactgtaattttacaatttaaagaaaataacaaatacatatttacttatatatcattgttatcaaaattacagtgcacttaaatgtcatatcaactaaatttacaaatgtaattttagttatatataactgtaattttacattttaaagaaaatacaaatacatatttacttacatatcattgttatcaaaattacagtgcatttacatgtcatatcaactaaatttataaatgtaattttagttatatatgactgtaattttacattttagagaaaatacaaatacatttttacttacatatgattgttataaaaattacagtgcatttacatgtcatatcaactaaattacaaatgtaattttagttatataggattataattttgtattttggtttcaaacgagagagaaggagagagaacaacacgcatgtcaatttttcagagcgtaaaaaaagcgagactgaccgatcgacgctggtacacgcggcccaacagaatcctatgcgggttcgcgcttcccagcccaatatatgcgcacgaattttggcacacattgaatggcctaaaaaatgacaaatctgagagaaaaaatcacacgacaaatctatagcaaaatcgcgggactgactatccatttgtcgggtgatttttaacaagaaatcacctaatttttttctacccttagatttacatccaacgaactacaaaaagaaaataaaaaatgcatatttacttacacatcattgttatcaaaattacaatgcacttacatgccatatcaactgaatttacaaatgtaattttatttatatatgactctaattttacaatttgaagaaaataacaaatacatatttacttatataccattgttatcaaaattacagtgcacttaaacgtcatatcaactaaatttacaaatgtaattttagttatatataactgtaatattacattttaaagaaaatacaaatacatatttacttacatatcattgttatcaaaattacagtgcatttacatgtcatatcaactaaatttacaaatgtaattttagttatatatgactgtaattttatattttagagaaaatacaaatacatttttacttacatatgattgttataaaaattacagtgcatttacatgtcatattaacttaattacaaatggtattttagctttataggat

SEQ ID NO: 4651 - DNA, 7814 bp, Oryza sativa
tgcgcccgcccccatcgccgccgtcgccgtccctcgccgccgctgccgccgccgcgcccgtccaccaccgtcgccgccgccgtcgtcgtcgccgtctacaagggacgactgcaggtggccggccgcgcgtcgggatgctcctctccccaacgggatgtccagttatatctagcaggaatcacctgatacctggtaggtatcatccgatacctagtaagtatcacgtgatacatagcagaaatcgtcggtacctgacatgatacctcgcgagtatcacgcgatacgtggtagaaatcgtctgataccttacaggtatcacatgatacctcacgagtatcacacgatacgtggtaaaaatcgtctgatacctgataagtatcacatgatacctcacgagtatcatacgatacgtggtagaaatcgtatgatactgtaacaccctaaaaaaaaaaggcaggcaagctagcagcagcagctgggccaggctcggtagcaggccggcccaagcggcagtagtagcaggtcgctacagtaccgtcgtggtactgtagcagccgattagtaccacctcgcctaactagcttgaggagcaccaagatataaggacgagagcctagaggctgttaactctgattctggaatttttgctttaaagcgaatttttgctttaaagcgaggatgaaaaacgtagtgagttgcagtattaggtgtggtccaactaaatgagccgttttcgggccctgcacaaatggtatcagagcagactctcgcggttgcgcgtgcgggcatatagcgcatgtgggctccgtgtgaggcacatggcatatggcgccggcattggacggtacggtcgtgcgccaaaagagggcggcgtgttcgacagttcgacggggtcgtcgaacccctgagggtgggtggaatgtaacaccctaaaaaaaaaaaagaaaggcaggcaagctagcagcagcagttgggccaggctcggtagcaggccggcccaagcggcagtagtagcaggtcgctacagtaccgtcgtggtactgtagcagccgattagtaccacctcgcctagctagcttgaggagcaccaagatataaggatgggagcctggaggctgttaactctgatttcggaatttttcgttaaagcgaggaccgaccacaaatagcgctatctggtcccaaaactaatgattcggaaaccgacatgtttatactgtatcaagcttcggaaaccgaccacaaatagcgctatctggtcccaaaactaatgattcgattcggaaggagtttatattacaaaataataggggaatttacaaaattgtggctaactaatacaacagaagctataaaatgactcaatcctaatgttttaaaattgtggttttactatagacttaaaccatctaacaaatctagacttgaaaactaggttaaaatattgtggttttactatagacttaaaccatctaacaaatctagacttgaaaactaggttgaaatgaaactaacttatatgattgaactttcggcttcggcaagaactccaaattaactctgaaagaagaggggttgaagcaagggtgagtataacgtactcagcaagttgtggttttactatagacttaaaccatctaacaaatctagacttgaaaactaggttgaaatgaaactaacttatatgattgaactttcggcttcggcaagaactccaaattaactctgaaagaagaggggttgaagcaagggtgagtataacgtactcagcaagctattatatttaagtatgaatgtatgaaataatagtatttgagtagagctagatctatttgcagaaagctgagaaattagaaggagaaagtctataatgtgttgaaatgcaacagtatttaataaatctggagttatatttctaaccaagatgccatagtgagtcccgatgctcaatatccgtgagcacggctattcgaatagtttcagagatactcatactgcagtagatgtacgctttacccgcaatccatgacatgctaatattcatcagcttagtcatggcaaagcttttcggttactaacatcagtggcacctgttccatgaactctcatcctcatgcgctctgaacgtaacgttatcagcagcgagaggagttctggcgttcccgaggtctttagagagaactggttgagagacccccgtcgtcccaaccaggttttcacaatacacacacagcgcgcaataatcaatatatttacccgcgcctcggtaaatattataatcgccctgctcggcgtaaatttgcctcctgcgcgaggacttaaagaagaaccactatacagaggtaccacctttgttagataacctactttgctaagtctgtccccattctagaattgcggtcgtactcgttcgttcttcacatgtacttggcaatcttatgtcggttggaacagtactagccacccggaaatcaaccatttctaccgtactgttccaatctaagttcattatattttatgcaatctaactaggcatggctaagcaaaatctagcatatatctggtttgctatatgttcaagttatgcatttaaaatcatgaatggctaatgcatggaataatagagatatagaatataggataataatgctcaaaggggtggaataataacttgccttgctccaacgcaaacaaatccgagataggcaacctgattatccgatcctcgaaacatcacaggttgccatccaaaagataatagactactaagaaatacgaagaactaaattcaataaaagccataaaataacaagaaaacgataaatggttaggacggctagggtttggttgtgtggtagtcgatgctagagcataacgactaggtttggtatcttctctagccggtgtcaacagacagcataacggttagagggataggaggtttgtgtgggtttagtggggcggaagtgttactccgacaaccgtgagtggtggcggagcggctaggatcacacagagcccgagagctaactgtgcggcgtgctgtggaggtcgagggaatagtgaagctccgaccgctgtacgcatcaaggcgtggggtgccaggagcaacacttcgaccttgggtttgggctttgccgggctttataaccaacggttcgacgtcgaggatagaaaaccacgaatgtccccatggaaggcataaagttccaaccgacggctttttagtggctaaaggggtaatttgggacaaaagaaaatatttgaaaaggcaaatataaattcaaacgatatttgaatagattcaaataaaattataaaatagcaaatttggtgtcaaaagatagggtttgaatttagataaatttaggtccaagttttattggaatcggatctacggtttaggagatatgggcttctaaagattgggttttgaattaaatctagaaaatgagaaaagtcactgtgcaggggacccacctgtcaggcttttctttttcttcttctttttctttctctccttcttcctctcgttttcctttcttcttcttccaggctcccagccgagtaacagaggagggagaggattgggcgccggtgctccggtagccggggatcggcaacgtcggtggcggattgcgttcccgaacaacgcgcatccggggaaggcagtttcaagcgaagggagttagagaggaagccggaacggcgagtggaagagcttgcctccggcggcaaaagaggtggctatggtggcttgatgaagtggttagggaagaggggaaataggtaaaatggattctccttgtcgaggcgaacccgatggtgcaagtatttggttggcaatgctccagtgagggagatcggccgatgactggtgagggcttgccatggcaggagagagagagaagcagagcttcaagctctgttgatgtgaggaaaaggagggtacctcgccggctatttataggcggcgaaggtcggttgcttatggcggttttggaggagtaggtgaaggcaaacacgatgatgcatcggcctgtaggaagggaagtcggcgccggctctgtcttcgattggccgatagtgtcggttcggctcggcggctgacggcggcagcgtgaggtggcggctgacgtcggctgcggttgcttagcagcgacggaaagacggcggcggcagttgatgaacacgacatggcgacggtggcggcgcgacttggcggcgacggaagaggagcttgcggcggcgtgcgccgtgcgcgtgtacgacacgcactgggaggagggggcggttcggctggggttggctgggccgaattgggccggctcggcttagctgggccggcagcccgagagggaggaggaaaatagaagataaaagaattgggccaaaaggaagaaagaacggagtttcggcccgatgacaaaaaggaaaaagtctaatttgaatacttaatatgcaaaactaggttttgcaaagaatttgaattcagaaagaattcacaaaagagatttcctaatatatttgagtgcaatatttagaggtggagtttgagggaatttatttggaagcactcaaataggaagggtgagcgatatatgaataaaatttaatatgtaaataggaaggtgggaacaagatagttggagaaggataaatagggttttagcctcaaaacatatggcatgggtttcaaagaattgtttgaggctaataggaaatttgaatgacaaagatataatctattttcttagcacaagagcaattattcacaatattcgtaataatattattcttgtgccgaggaggaaatcaagccacaggaattaaattgacggctagattggaagaaggaatttggatacaaatttggaaaggggactaaggataggtttggaatcaaaggatagattgacaattaattccaataaatttggaattgcttcggttttggttcaaggatagtgttggaggatttcttggaccatgattcataaaaataaaaaggggttttcaaactaaatttgaataaaagaattttagtcaaaagaaggtttttaaattaaaacccaaaatcaagaaactccttaatttaactaaatatatttttaaaggaaagacacaaaagaaattaaataccagaaagagatttaatgcaggttaattttaggaggtctctttaattataatatcctaggtttaggaggttaataaaaacgtaagaaccggtatgatgcataattagaaaatagctaattttcagtatgttacagatacttgataagtatcatatgatactttgcaaggatcacctaaaacgtgtgtaaaatcatctgatacctgataggtatcacacctgatacctactcgggatcttcccgttagaaaatgggattccgttatatagcagccccccaaagaaaagatggatagtacgcagcgcagcgattcggaagtatgtgtacgacgaggagggcgattctcaatttcaccacatcgagaagagaaaggcggaggctggcggcggcggtggcgacgacgaccttggcagtggccgtccaaggcgatgacggcgacttggactacgccacgatggtcgcgcgcacggctcatttcctagcggtggtccgtggtcgagcgctacgcccggatggtgcacaagctagttctgggactaagttgacgagtatcatgtgtggaatgcgatcgtctcgacatggagcacccgtcggccgcggctgtcgacgatgacggtgacgaccggcctgcccccatcgccacatcgacgacgtgcggtggactgacgcggtggagcggacacggtcagagatcgaggaggcgagcgagcgcgagtgcgtcgcagtctacgagctgtggaggaaaaggtggtggcagtgtggagccgtaggtgggatttgggagaaaacaacacccaatagctgggaataccgcgttagacacttagaaaacgcggtagcaggcagccgtcgtagccgtcgaggaagacctagctcaacaaggcgtcggagacctcgtcgccgcttctgccagctacttgattccgctctagtcctggaggcgcgcgaagtcatcgcggaggcgtggctgcgtcccaacgacgggcaccgatgacacgccattcccggcgcgcgtgggagagggagaggagggagagggagaagatttagctagagacatgtggggcccaccgcccacatgggtcacactcatcgcgtcagtcgggctactatattgtcgaggaccaaagttaacacggtatggtgaatttgaggatgagttataccttttgtttcggtatagggaagaattttagactctacaacaacttaaaggacttaagtgattctttccagcaatctagcccaactggcaagctggcgggctggtcgccgtcgatgaaggcctgttcagttcccactattagggctttttcggattagaggatcttcacgtgattttcggaggaatactgtgcataggaattttttttcctttcttgtcattcagatcatgaaaactgtggttgtaggaaatccaaagaaaagtttcctttgatgctgatttcacatgaaaagtatatgaaaaatccgtccaccttaagctctttttttttattcctgcatgcaaatcccaggcaattaatttcatgttatccgaatgtcctcatttttttttattcctttgtttttcattcttatgtttcacacttagattcctttcctgtttctatactttcccaatcctatatttttcctatcctataatctgaatgaacccttaatcatgatttggaaattccgaaccctggttattttacatttcacaactaatcatgcatatctattcataatttcagaaaagattacagtaaaaagtaccaagtaataagctagtaactagttgatacccccgcgctttgcagcaaaatatgtggataaatgcatgttataccatttctataatgtataacatgcataaatccacatatctctagcaaagcacgaggtatcaactagtgggaacaatattttagctcaaataaatatggaaaaagtactacacccctgaactatcgaggtcgaccgaattacacccccgaactcaaaaaccagacattctacaccctcaactattgaaaccgggcaaattaccccccctagcactgttttaggtggttttgggatagacttgctgacgtggcagtccagtcagcattttatttttttaaaatggtgggacccacatgtcatacactctttctctcttcctccatctctctttctctctcttcgtcggccagcagcaggcagcgccgcgcacaccggcacgccatggtggagaggcgagcgccggcgaggggatgcgatgggcagcggcgcgcgggggcaggccggcggtcggcgcgaacggcggcgcgcggcgaggtggaggggatgggggagaggtgggcgccggcgtccatcgcggagaggcgggccgtcgtggcgccggccggcagcatcttgaggacaacagcgtgaggccgcggcggcggtggtccaggcggagcacgagcggggcgggcagagaggaaggaggtgaggaggccagggagcgggctgaggagggaggagaccggcgagggagcgggaggccgggagagtcgtcggagtcatcccccagccgccaccgtcgtcgtcgttcgagccgctcccgccagagtacgatgagcccagccatactcgttgctgcgacgaccacctctggcccgacgacgaccgccgtgccccgctacccttccccgacacctg

SEQ ID NO: 4652 - DNA, 23868 bp, Oryza sativa
ccgaccgccggcctgcccccgcgcgccgctgcccatcgcatcccctcgccggcgctcgcctctccaccatggcgtgccggtgtgcgcggcgctgcctgctgctggccgacgaagagagagaaagagagatggaggaagagagaaagagtgtatgacatgtgggtcccaccattttaaaaaaataaaatgctgactggactgccacgtcagcaagtctatcccaaaaccacctaaaacagtgcttaggggggtaatttgcccggtttcaatagttgagggtgtagaatgtctggtttttgagttcgggggtgtaattcggtcgacctcgatagtccaggggtgtaattcgtactttttccaacaaatattaaacgaagataatatcctaatgaataggacacatacagaaccaaaagatactatgccatatcgttcgtattctccattgatagctttgttatcaacatatcgtattgactgggcataaaaaatgatcatgttaaaaaaaattgctactatcagcatggagcaagatatacttagttgttgccacttaccagtatagcaggccaaacgggcggcccggcccagcacgacacggcacgccgacggcacagcccactagggcacggcccgttaggcacggctcctgtagcgggccgtgccgtgccggcccacgtgccaaggccacggcccaagcacggcccaagaaggtgctgggccgtgccgggccggcacggctactgtagtggcacgtgggctggtagccggcccactagtacatgtggcccataaaaattgaaatttgaggggaaaaaaagaaaaaaggcagaaaaaacataatataaaggaaaaaatgataaatataggataaatgtgaggaaaatttaggaaatatatcataaaatatatggtacaaataggataaaatgtggaaaaaaataaaaaatatgagaaatatatgggaaaaattagaaaatcgtaggaaaaataaatgggccggtgggccgtgccatgcctgggccgtgccgtgccggcacgctacagtaaacgtgccgtgccgtgccgtgccagcccacgggctgaggcatcggcccaaacacggcacgggataacgggccgtgccggcacggcccacaggctggcgtgccgtgccgggcctgggccggctacagtactgccgtgctcgggccggcccggcttggcacggcccatttggccaggtatacttaccagtgcatgcctcctgaagtgaaactattcctaccgcttcacctctgttttaaaataaaactattttttcatctatctttttatctcaatcaattataactattcttcgttcgtttcttcacctacttctacttttcagccaattatgttttttcttcattattttcacatatgttataactatcggtatccaacttcagaaatacttatttgaatctgttcgcacatttttttaagctcgatctactgatctacactcttgtataagtaagatttaccttccttaactctgttaccagacgttttatacttatgaactctttaaaccagatgtgctaagcacgtattaccattctataccaattttcatttcatcatatcagtatttgattgatcctttcaagcttcctcgccaagtcaatcgagatcatgactgtgatacgatcaagtaaataaagtagtataaaacgattcatacgacgatttttcaagcgtaaactaacagttaaacacccctataaaacaggcgccccgaagtagccagcacagtacgaggtggccgtcgtcgagcacctcgatcgctcgcgccatggacgcctggcagctgttcgtccccgcgatcgccatcctcatccccttgctccggctcatcctcttccgccgcggcgacgacgggagacgcggccgcctcccgccgggtcctccggccgtgccgttgctcgggagcacggtgtggctgaccaactcgttgtacgacgccgagcccgtcgtcaagcgcctgatgtcgcggcacggccccgtcgtctcccttcgcttcggctcccagctgctcgtcttcgtcgccgaccgccgcctcgcgcacgcggcgctcgtcgagagcggggcctccctggccgatcgccccagccaggccgcctcggccaggctcgtcggcgagggcgataccatgatctcgcgcgcgagctacgggcccgtgtggcgcctcctgcggcgcaacctcgtcgccgatacgctgcacccgtcgcgcgcccacctgttcgcgccggtgcgcgcgcgggtgcgccgcctgctcgtcgacaggctgcgggaggagcacggcgacgcggcggcgccacgcgccgtcgtggagacgttccagtacgccatgttctgcctcctggtgctcatgtgcttcggcgaacagctcgacgaggacgcggtgcgcgcgatcgccgtcgcgcagcgggacgcgctcctctacctgtcgagcaagatgcccgtcttcgccttcttcccggcggtcaccaagcacctcttccgcgggcgcctccagaaggctcacgccctccgccggcggcagacggagctgttcgtgccgttgatcaacgcgcggcgggagtacaagaaacggcagggcggcgccaacggcgagccgaagaaggagaccacgttcacgcactcgtacgtcgacaacctgctcgacatcaagctccccgacgacggcaaccgcgcgctcaccgacgacgagctggttatgctctgctccgagttcctcgtagccggcacggacagcacgtccgccgcgctgcaatggatcatggccgagctggtcaggaacccatccatccaatcaaagctctacgaggagatcaagtccaagaccggcggcggcggccagcacgaggtctccgaggaggacgtccacgacatgccgtacctgaaggcggtggtgctcgaaggcctccggaagcacccaccggcgcacatgctgctacctcacaaggcggcggaggacatggacgtcggcgggtacctcatccccaagggcaccatagtgaacttcatggtggctgagatgggcagggacgagaaagaatgggagaagccaatggagttcatgccggagcggttcctccccggcggcgacggcgagggggtggacgtgacgagcagcaaggggatccgcatgatgccgttcggcgtcgggcggcggatttgtcccgggctcggcatcgccatgcttcacctggagtacttcgtggccaacatggtgagggagttcgagtggaaggaggtggccggcgacgaggtggacttcgccgagaagcgggagttcaacaccgtcatggccaagccgctgcgcgtgcgcctcgtgccccggagtacactcgaataattaatccattcctcgattcctagagaaaataattgtgcagtatattatatagagtaaattccttgtttgctcctgaaaagttacccaatctcttacatgcccctaccgtttggaacttacttgattccttctataccccaaattttcgattgaatcctctacatacccctaccgtttgggttccgtcagatgtttgtgttcatgtgtgtgttagcttgtcagtattttcataaaatgcgaaaatgcctctgtcaaccctaggtaacacagggccacatccgatccccaaatcctccaaaatagtatagttcccacacgcacggtgccgcacatcgccagctttcagccatcgttgcacgcgcatcgccgcccttctcccacatcccggcggtggcagcggctctgcatcccgccgcggtctcggctctgcttgcggtcagcggtggcggctgggtccgcatcccatcggtggcgcggcggggtccgcatctggtgggcggcgacggctttgcatcctgccgcggcgacgagtccgcatcccgccgcggcctcgactctgcttgcggtcatggcgacgccgtctcctccctgcctcctccgcgccctccctcttgtcacctcaccctcttctcgggggctccgacgccggcctattacctccttgctccactgctcctcgccgtcggtaatgatacgcccttgcgttgattagcaaaatgcgaatagctgctgctgctgctagtgtttcttgattgatttgtttgactttatgcaggcggatgccttgaactgttatgggcttgtgccattatgctcatgatgtaaaaagtaatatatttgtgtactgctgatggtgtatgaatgcttttagatgtattttcattttcttcctattaaatggtgctaccgatcctcttgatatgctgatgaattgcaatggtgtttgagtaaacggctaggggtactgtcttttacccccaggctgtgtcggttagtggtcatgaaagatccaatgtcatgttatatttttttataaaatactgaatgctataacaaaagaaaatgaaattaattttatgcactaattttttagtctcacggaatacatactgtgcagtcatgaatgtttcaaacccagctgccaaacatgttcttagttttcagctcctccaacctcaagggtattatagacattttcaaccaaactaaccagggaatgctgctcaatctaacggtaggggtatgtaggggatccaatcaaaaattcaagggtggaatcgagtaagtttcaggggcatgtaagggattgaataacttttcaggggcacacaaggaatttactctattatatacggtacatatacgaatgtaagggaacaaacggccaaaatcatcgcacgtagcactggcagcttcctttctttaatgaatattctgtgagaaattttacgattctcgagagataccaagagaatatcctatgtgtgtactccctccgtttcgaaatgtttgacgccgttgactttttatcacatgtttgaccattcgtcttattcaaaaaatttaaataattattaattattttcctatcatttgattcattgttaaatatatttttatgtaggcatataattttacatatgcacaaaattttttgaataagacgaacggtcaaatatatgctaaaaagtcagcggtgtcaaacatttcgaaacggagggagtacgttgtgagtttttcgctcagtcagattaccttgatgatcctggcatcgtctactctgcagcgttggtgtgtaaaataatgaatggtggaaactggaaagtaactcctctggcattgccggccatctgcacggcgcccccgtgtctcctgctacgcatacgatcggcccgtgcgagccttagccgtaactaattgggccgtttctcgcgaatcgcgggaagtttgcccagcccaagccttaggcgagacaatccagcccagcgtgaggtctcggcctgctgctttaattggaaaaagtatacctgagaccccttatcttgtcgacgatttatttataaaatcatccatgaaccaaaaaccatatatatgacatcagtcaacttataaaactaaatcactctaagtccataggcggttttgtttgacatgacaactgaatcagtgtggaacccacatgggcccacaggtcagtggctacttccccttctctctcccccagtcatccccttctttggcgatagttgatgggcagaagggctgacgcggcgggcgcgaccgatggccggcggggaagagcacagctggcgaagggtagggagaaccggggacagatcgatctgtgccgccgttgccctcatgtccgatcacaaccaaacggagattgctgtgcaggtgtcactaatggttgtgtttagggaggatgatgtggggaggacatggcgggcatggctcggctattccgaagggaggcgatgctggtacggtgctgtggctagcgttattagtagatgttgagaggtgaggggcaacggtgatatgacgagacgatgaaggtccacgaaggtcgccgggagaaatttttcccgagcttgggatgacgcgagtggtggaacatgtttcatgccgagccgccgggaaagaggaatgggagggtttcctatggggttgatgcgagctcatgctgaaggagacacaaagatatggacgacttgccttcttaccggggagatgatgagaggggcgagaggattcgagagagcgtgagatgggaggaggaagaagagcacagggaagaaaggggaaggtactgacaggagcaggacgtcgtcgcgcgtctccggttcttcccacccgtcgtcggccgtgctcctgcctcaccggccgccgaccatgcccctcatgcctgcccttctccacgtggcccgtgcccaagaaggagagtactagaggagagagagaagagaaagtagttactgacatatggttcccactttgacacagctgttgcgtcggacaaaactatttaaggatttagagtgactcggtttcgtgagttgaacgatgtcatatttctattttttttttcggggacgattttgtaactcggcgataagatgaagggtctcagatatacttttttcgcttaaattttcttcacatatacgactgtaaagtttgttgatccacggcattttctatgtttacacattacgccgtgtcctacaccatggtacggtactacggtgtgaactactgttgctttctccggtccgtctctcttgcctgccactggagtctacacaactagccatggagtagcattgatgccatgaaaggctagctgaaagcaacacgatgcacttgctaagatacgtcgtcttcctcacggttcggacgtctgatggtcgatctccgacccgcggacatcatgctcatgctttctgaactgcttgcgcatccgtatcaaacagcttcttttcatcacaacgaagatatgtctcatcatccgggttaagcaaccgatcgatcgccttacaacgtactacgtgcccaaacatgaatgagttagatatattgtttcatctcaattttcgcaagattcggtcaataggaacaccttaattacaccggctatttttacatttcaccactaatcatgcatctctattcagaatttcagagcatggaagtaaaaagtactgaactaagtagagaaactaattaattaagaagcatcatatccatatcactatatcgccactgatcattcagaacaaaggttattgtattgtactaggtagtgtttaattaagaactccactagagtagtaagaagcatgcatttggattgagctaagctactgaaacggtgaccctaacgcatacatacatggtgatctaggcccttctgggcacgagacgagcgcgcagcggcttcgccatgacggttgtgaactcgatcttctcggcgaagtccacctcgtcgccggcgacctccttccactcgaactcgctcaccatgttcgccacgaagtactcgacatgtagcatggcgacgccgagcccggcgcaaatcctccgcccaacgccgaacggcatcatccggatctccctgctgcctgtgacgtcgaccccctcgccgtcgccgccggcgaggaaccgctccggcatgaactccattggcttctcccattctttctcgtcccttcccatctccgccaccatgaagttcaccgtggtgcccttggggatgaggtacccgccgatctccatgtcctccgccgccctgtgagggagcaccatgtgccccggtgggtgcttccggaggccctcgagcaccaccgccttcaggtacggcatgtcgtggatgtcctcctcggagacctcgcgctggccgccgccgccgccgccgccggtcttggccatgatctcgtcgtggagctttgactggatggatgggttcttgaccagctcggccatgatccactgcagcgcggtggacgtcgtgtcggtgccggcgttgaggaactcggagcagaggttgaccatctcgtcgtcggtgagcgggcggttgccgtcgtcggggagcttgatgtcgaggagggtgtcgacgtacgagtgctcgaacgtggtctccttcttcggctcgccgttggcgccgccctgccgtttcttgtactcccgccgcgcgttgatcagcggcacgaacagctccgtctgccgccggcggagggcgtgcgccttctgaaggcgcccgcgcaagaggtgcttggtgaccgccgggaagaaggcgaagacgggcatcttgctcgacaggtagaggagcgcgtcccgctgcgcgacggcgatcgcgcgcaccgcgtcctcgtcgagccgctcgccgaagcacatgagcaccaggaggcagaacatggcgtactggaacgtctccacgacggcgtgtggcgccgccgcgtcgccgttctcgtcccgcagcttctcgacgagcacgcgccgcacccacgcgcgcgccggcgcgaacagccgcacgcgcgacgggtgcagcgtctcggcgacgaggttgcgccgcaggaggcgccacacgggcccgtagctggcccgcgagatgaggttgtcgctctcgccgagcagcctcgtcgacgccatggcggggcgatcggccagggacgcccccttctcgacgagcgccgcgtgcgcgaggcggcggtcggcgacgaagacgagcagccgggacgcgacgcggagggagacgacggggccgtgccgcgcgatcaggcgccggaggaggggctcggcgtcggccagcgaattggtcagccacaccgtgctcccgagcaacggcacggccggaggacccggcgggaggcggccgcgcttcccgccgccgcggccgccgcggcgggagaggatgagccggaggaaggggatgaggacgaggattgcggcgacggcgacgtgccacgtgtccatcttcgagtgagcgcgagcaccgcgtaccgtgtggctacttcagtgggactcattttatatggttaacacgtgtcgtaattagcacgttattaggaggtttttaactgcttgtgtttaagtaaattcggttgtatttatcggtttattatgctttatgccaccgtcgcgatctcgattcgacttgcggacgaagtgaacggaagggtccacctccgctgacgtcagggatgatgatgaacaggaataaatacgaagaaaaaaaattctagaatattttcttatgcgacaccttgtttccacatgactcgtatgatccaaggtctaacgacatgttcaagaaaagagcagataaaagaaaaccaattctgaatacgatttctctctcgagaaaattgcatccaatccaacaagtcatagtttgttcagacttcaggactctaacacataataattttgaattaagatttgaaaattacatccgaacaacccgtagtttgttcagactcttaaactcataaaattatccaaactcaatcgtattcagcgttgacttgatgcgtctccctataaatgtaaagccgttttgtctcacccgacgtacaacaacgacaccaatcgacgacgacgcagatggataacctggtcatcctcgccggcgtcctcctcctcccgctcctcttcctgctccgcaatgcggcgtcgtcgaggcggcgccgcctcccgcccggcccgccggcggtgccgctgttcggcaacctgctctggctgcggcactcggccgccgacgtcgagcccctcctgctgacgctgttcaagaagtacggccccgtcgtgacgctccggatcgggtcgaggctgtccatcttcgtggcggatcggcacctggcgcacgcggcgctcatcgccgccggcgcgaagctggccgaccggccgcaggccgccaccagcacgctcctcggcgtcagcgacaacatcatcacccgcgccaactacggcgccatgtggcggctgctccgccgcaacctcgtgtcgcagacgctgcagcagtcgcgcgtcgaccagttcgcgccggcgcgcgtctgggtgcgccgcgtgctgatggagaagctgcggggctccggcgaggaggcgcccaacgtcatggaggcgttccagtacaccatgttctgcctcctcgtgctcatgtgcttcggcgagcgcctcgacgagcccgccgtgcgcgacgtcgaggaggccgagcgcgcgtggctgctctacatctcgaggaggatgagcgtcttcttcttcttcccgtggatcaccaagcacctcttccgcggccgcctcgaggccgcgcacgcgctgcgccggcgccagaaggagctcttcgtgccgctgatcgaggcctcgccgggagtacaagaggctcgccagccagggcctcccgccggcgagggagacgacgttccagcactcgtacgtggacacgctcctcgacgtcaagattcccgaggagggcaaccgcgccctcaccgacgacgagatcgtcacgctctgctccgagttcctcaacgccggcaccgacaccacctccaccgggctacaatggatcatggccgagctggtcaagaacccggccgtgcaggagaagctctacgccgagatcaacgccacctgcggcggcgacgacgagctcctggagcggaacgtgagggacaaggacaacaagatgccgtacctcaacgccgtggtcaaggaaggcctgcgcaagcacccgccgggccacttcgtgctgccgcacaaggcggcggaggacatggacgtcggcgggtacctcatccccaagggcgccacggtgaacttcatggtggccgagatcgggagggacgagagagaatgggagaacccaatgcagttcatgccggagaggttcttggacggcggccatggcgccggcgtcgacatgcacgggaccaagggcatcaagatgatgccgttcggcgtcgggcggaggatctgcgccgggctcaacatcgccatgctccacctcgagtacttcgtgggatccatggtgatggagttcgagtggaaggaggtggaggggcacgaggtggagttcgccgagaagcgggagttcaccaccgtcatggcgaagccgctgcgcccgcgcctcgtgcccaggaggagttagacagtgagacagagtccagaattggtttagttttgtgttcattagttagtgttagcgtatatttactcgtgattaagttatgatccaaatgtccatagtgactagaagtatataattaggtttgaattaagtgccaaaagtgtgttttgttttagcaaattttgagcagtgcgtactcgtttttatcgtgctaatttacacgttttatatatgaactcctatcgaatcccaatcaaaataagcagagaggtttggactagagacaagacagcatgacttacgcacaagaaaggaagggtgaaaggttcatcttttatctcctatatactatcagcaattcaaaggaaagagtgtttttttatctcttaccagcaaattcatatcaccaattcgaatatccaaaacaacataggtgcctatgaatttcttttaacaacaatggaagaacaactttgagcctgtgaaaaactttaacttgtttacctcctagaaattgatgcacctaaaaaacttgtttagaaacatcttacaaaactaatgtggcacaatgtgattgaatattccttttctcatacccgctataacatatcagatcactaagagagtaatagatttacactagttggagagtgttagagtatatggtagttaaagtcatattaggataggattggtttgtttggattccttctatatctgtaattcttccttatctcttccctatgtactcctatatatatcgcccccctgaggctcaatacaatgtgtccaatattcacagtatcccctcttcctgtactatccaacatggtatcagagcgggcgatctagtgccgctctcacgcttccgccaccgctgcccccgggagtagcgatctcccgagggcggccacatttttttttctttctctgaggtcgttgtcgccagagggatcgccctcgatctccttcggtggcccccgtcctgttcgtcgtcagatcgatctaaagccatcttcagatcgttcgtgcgtcttcgcgtcatcagcatgcagcagtagcagatcgcatccgcggatcccgtcgacggcgcggctctccacgtcgctgcgccgttggctcccggtcctgcctcctctgttgccgtcctctccgtcgacctctctcctctaccgaggctgctgatgccgggggacaggagccacgtcctcgccgatcatccatgccgtggatctggcggccactccaggccaccgtttcgtccgtcgccccctggtcttctccaacctccgcgccagccgtcgtcgacctcgccgcccttctcaaccccggcgcacagggggagggagtgctcatcactgtcgcttccacacggcaattttctgccggcccctgcagctctgctgctggtctccaccacacaaacctgttgacaggttgttcttctccactgtctctcggtgtctctctctgctatgatcctgtgcgtggcagccatgtgaggagagagagactagatggatggtgtgaagatatacagcctattgccttggttgacttggtggtgacttgcgtcagattcaaagggttgtgatgtgaacggctggtatggactgctgctattgtgttgctgcttgtattttttcccctttcccaatcagtgattgggtttgcgtcgcccaccgcctcgttgacatctgcgcgtctccgacatcggcatcgattctgcttcaacttcatcgttctgcctcgcgcatcttcggcttgatcacccattccagcgcccagctacaacgacttgtacaaccgatcatcatcgagcacgcgtctacgccatcaagcttcgggttgccgctgcgtcgcccccctcgggccacagtgccgctgcctgtggtccacacctccactggttgttacagtgttgagacctgagaggcaccctcctcagtgtggcctcaccaccggtggacttctcgccgctgcatcgacatcgagctgcgttggtcccactacttcgccttcgtcttcgtccagcatgattcatcgccagtgtcgccgtatcttcctcgactatacttcgctcttctccggcaactgcgtgctgctccggcaattctccctctacgccgttctcgcgccgcgaccatcctagaggccttctctgctagtctcctccgacattggcgtataatttctggtggtcccctacctagcccgcacggtattggtaacaccgttgtgcgcgtttgtcccgagtcgtccccgggtctggcaaacctggtgtgacgtcttgtccttcatggttcgactatatcggctcttcgacgtcatcttcctcaacgaccgtcgcgatcgtgtccccgtcatcatctcccgcgcgtcctcgcgcacctcggttcacaacgctctcccatgcgtccacgaccactctacggcgtcctatgtgcgctccgcggctcggctacctcgacatcatcggctccccgacttcggctacatcgaccacggctactctacgcacggcttcagcgaccacggctctcccggctccttcgctttggctacatcgactatggcacaaagggctattatccgtgttgagcactcttgccggtttattctccagtccaagtgtccgcgctgctcacgcttggactgaggggggatgttagagtatatggtagttagagtcatattaggataggattggtttgtttggatttcttccatatctgtaatatttccttatctcttccccatgtactcctatatatatcggccccctgaggctcaatacaatgtgtccaatattcgcagtatcctctctttctatactatccaacagagagtacgtaatagattgaccttaggagagtgacagattaacgatttgcgatgaacaaacttaatctctgaccctctgtatcaaaattcaagcacaagcaaccaacacatattgcaattcagtagtagagatttgattggtttatttgttaacctgtacggaattcgaataaaaaactggtgccaaatttgtcagattttgatgaacacggtctagatttaatcgctctgatttatatttaaacaaggaaaaagtacaccgaaggtccctcagcttgtcatcgagttacaaaatcatcctccaaccgtaaaatcagatatttcacatctcctaactaatcaaaaccggtcacaatcggtccctcggcggttttgatcccggttttattctacgtgactgctgagtcagcacaggacccacgtgggccccacatgtcagcgtggccacgtcagcctatctctctccccgtcttccccttcctcctctctctatctcactcattcttgtctctgtggctctaggcaggggagcaaggcggcagcggcggcgggagcaggggagcaaggcgtcggcggcggcagcggcggcgggagcaagggagcaaggcgtcggcggcctccggtctccccccaccctcttcactctgtccaaggcggcggcgacctccacgccccacttcctcaccgacgcgacgagcacctgcacgatcctcgttagcgggctgcccccggaccgctggtgcctgtacagcggcgtgccgatgaagaagctgacggcgacggccatgacgacggccgggatgccgaacccccacccccacccgacgtgcgtctgcacgtacaccagcaccgacgacgccaccagcgcgccgatgttgatcaaatgttctccatacagtaattattcagtaacctgtatagaaattgatgactactatgtgattacttaactaatagtacctgacagaagaagctcatattattagagtctgaatagatggaagtttggaggcattgcttgtcgctgttattcaaatgtctggttgctgataaataacaggaaaggaagcttagaactgctgtataaatgaagtcagtgtgtggacatcttcagtgtagaattttaaccagagaatcttataaggcttgttctgaaaaaggtgatggatgctgtcctcgacatgtattagaaccagttgaagaagctgctcttgctccgcttctccccctcgtcgttctcgtcgaactggtcgacgccgaacgacgacacacacggcttgatccctcccgttcccagcgcgatcaggtacagcgccaagaacaccacccccgtctgcgcttggtgcggactgcggagcatctcatagcgcgcggcgaggaggcgctccaatgagccgaagcgctctgtgagtcgctggtacaggtgtgtgcaggtcgcgagcagctgctgctactgctccagctctgcgaaaccttccggcgtgtgcaggtcgcgagctactgctgctgctgctgctccaggccagcgagctcgcaccgactccacccccaccgccgccgcgtcgccaagctaccccgccgcccgtcgccggccgccgtttctgcctcgccctgccagccggcccgcacgaggggggcggggaggccggcgagctcgcgccccccgagcccgcgcgccgccacctgggagtagctaagagcccccgggagccgccgtccccggccgcaccaccctccggccccgcgcgccgccatgggtgctagccctagcatcggcatccccatgccgcccgtgcgagagcagagagcgagacggaggaagaaaggagagaaacagagaaagagaaagagcggaaagaaagcaggcgctgacatggacaccctgacatgtgggacccacgtgggtcccacgctaactcagccgccacgtcggataaagccagagtcaaaaccacttaaggaactcaagtgaacggttttgtaagtttagggatgtcatatacctggttttgcggttaggggatgattttgtaactctatgacaagttgagggaccttaggtgtactttttcctttaaacaaaatgaatagagagtaagcccaacagcaaaaaacatgttagcccaaaaccaacgaactgcatcttaggcccatttaaccagtcgaacatgttatctcaggcccgtttagcccacaaaattgcaatatgaatactagcagtctagcacaactagctttggctgcgttcgtttctccaataacaatagttggatgaaattttggatactgatggtacacttttcaaactactaaacggtgcgttttgtgtgaaaacaattgctctaaaatatcagattaatccattgtcaagtttataataattacacgttattaccacctcgttttacgtgaaacacttaatatttatcctcatcttcattttcaggatatccagagaggaacacacgcttgaaaaatctgtcacgtgctagttaattagcaaaaccgaataaggtacttataaaaactaaagtgtcattccttcttactaacatatatctttagggagagctcccaccttttcgcctcaaaagggaaaataaatatgtgcgcctaagttgatcctgatgcccttaaatccaaagttcaaacatgtggggtggcttcttaagaaagaaaagaaacctaaatacttggatgtaatcataaagattcccaccgaatcttcaccgatcaattgagattaattagaaatgacgatagccgtttaagcggagaaggacggcttacattattgctggttaccattcaaaacagaaagaaaacagtggcaccagattctgcggttttctacagagcttttttcttaaaaaaaactagacacaatatatacacaaactattctaacacacgcacactcacccttataaatgtacacacgcacaccttatccttatcagcatctccagaagattaggctgtcatattttaatattgacgaagccactgcgggcgtctcgttgtcgagggatacgtcttacacatgcacacattattcttatgaacatctctggaagactaggttgtcatatcttgatgtcgatgaagtcactacgggtgcctcgttgttgagggatacgtcgtgtaccattaaaaaaaacaattagccgtaaatatgagcacatgtgtcaagcctagaatttaaacccagatggactggtttcaccataagaaacttaaccaattaagttacgctcacttcacggagccctttgtcactctcctagttgacaaataagttttcaatgactggtccatacaggaatatgttcttccattatttaattttagttgctaaacatgttttcacatactataagttgttcgtccattatccatttttctaataggcaccttgttttgcatctttgaaagcattttgaatggctgataggagataaaaaaatgacccctttttttcttcgattgtgtttttgcccttctttctgtccaagactactataggataccaattcactacgtgcagctgtcatatgtttttgataaatctaggttacctattaatttagagtaatttagaaattatacactaagttttataagtatgtgatatatttttgttggttttttttaattttgggaaggtaatatgctttgataaatatgggtctcctattaatatgagagtaatataaattttcgacatgacctgcaccaaacagtaatgtaattagagattatacatggttcttttgaaagtaagtgacatatgtatatgaatttaatttattatttggtggtggtgatatgacgataaattcttggcacctattaattttgatttaatcttgtagttatggcatatgtttaagttaatcattttgtatgcagcgagaattgcaatggatcgacgataaatgtaccatgcgtcttgttcaggcctcctttgaattggaggaaaaatataggaaaaagaaaggaattgaaatcctacactatttatgcctttgattcataggaatgagaaaaggaaaaacgtaggaaactttcgtattcctacgattctagaggaaaaacatagaaaatttaagacaaaattggttatatagcatcgaaagttcacctttttttagctccaacagataacggttcactttaatagcatctaaagttcacccctttccatttttaacactttcgtcaattctcgatcgttttctatccgccttgatcgttattgactcagccactcacacgatatgacctttttacccctcattgccatgcattatacatgtacttgtgaggggtagaaacgtcatattgcgtgtgtggttatgtcaatagcgatcaaagcggatagaaaacgatcgagaattgacggaagtgttaaaaatgggaacgatgcgaactttgggtgctattatagtgagctggtatctttcggtgttataaaaccaaaaacgtgaacttttgatgctatatatctaattttgtcaaaatttaacatccactctaacctcttggaaaactttccttgagtctatctctttcatctgattcctgcagtccaatcaaacggtcatttctgtgtttacaattctctgttttacacttgcgttgaatacatttttgtttgtcaaagtttcagaaaaacaactgtaccatatattaaaaacagagatatcagaaatttgcacaaacaaatcacacttcaatgttccctattgatttactgattcatcaaaccaaatgccatttgatatcagcattcacctcatgacacgtaaaaaacctgacactgatactccaaattactccctccgtttcaagatgtttgacaccgttgactttttaatacgtgtttggccattcatcttatttaaaaaatttaagtaattatttattcttttcatattatttgattcattgttaaatatactttcatgtacacatataattttacatatttcacaaacttttttaaataagacgaacggtcaaacaagtaagtcaacggtgtcaaatattttgaaacggagggagcaaatgagcagtgagactctgattagtgcctgactcctcctgggcacaaggcgcggacgcagcggcttcgccatggcggtggtgaactcgagcttctcggcgaactccacctcgtcgccggccacctccttccactcgaactccatcaccatggatcccacgaagtactcgaggtgcatcacgccgacgttgagcccggcgcagatcctccgcccggcgccgaacggcatcatccggatctccctgctgcccgtcacgtcgaccccgtcgccgtcgccgccggcgaggaagcgctccgggatgaactccattggcttctcccattctctctcgtctcttccgatctctgccaccatgaagttcaccgtggcgcccttggggatgaggtacccgccgacgtctatgtcctccgccgccttgtgcggcagcagggtgtggctcggtgggtgcttgcgcaggccttccatgaccacggggttgaggtacggcatcttgttgtccttgtccctcacgctccgctccaggagctcgccgtcgtcgccgcaggtggcattgatctcggcgtggagcttctcctgcacggccgggttcttgactagctcggccatgatccattgtagcccggtggaggtggtgtcggtgccggcgttgaggaactcggagcagagcgtgacgatctcgccgtcggtgagcgagcggttgccctcctcggggatcttgacgtcgaggagcgtgtccacgtacgagtgctggaacgtcgtctccctcgccggcgggaggccctggctggcgagcttcttgtactcccggcgagcctcgatcagcggcacgaagagctccttctgccgccgcagaagggcgtgcccggcctcgaggcggccgcggaagaggtgcttggtgatccacgggaggaagaagaagacgctcatcctcctcgagatgtagagcagccacgcgcgctcggcctcctcgatgtcgcgcacggcgtgctcgtggagccgctcgccgaagcacatgagcaggaggaggcagaacacggcgtgctggaacgcctccgttacgttgggcggcgcgtcgccgccgccgccgctgacgccggacgtcgtctcacgcagcttctccatgaggacgcggcgcgcccagacgcgcgccggcgtgaactggtcgacgcgcgactgctgcagcgtctgcgacacgaggttgcggcggagcagccgccacatggcgccgtagttggagcgcgtgatgattctcgctgacgccgaggagcatgctggtggccgtccgcggccggtcggccagcgtggcgccggcgccgacgagcgccgcgtgcgccaggtgccgatccgccacgaagatggagaggcgccacccgatccggagcgtcacgacggggccgtacttgtcgaacagcttcagcagcagaggctccaattcggccgccgagtgccgcagccacagcaggttgccgaacagcggcacggccggcgggccaggcgggaggcggcggcgccgcctcgaggtgacatcgcgcaggaagacgaggagcgggaggagaaggacgccggtgaggatggccaaattatccatcagcgttggcagctgttttcgcttgcgttggttgtcggacgaggctaaactgttgtgtacccatacattttataggtcttcggctcaagtcagtagcagtagactcagtactatgggatgtaatatgttaatcttattcttttaataaaactagctgggtggcccgcgcaattgcgcggctagcatccaaataaaatcatatattttttaatatgattttacttaaaatttattaaatagctatctcattgtcttaagactttgaaagaccaaaccttatcatcctcgtgtttctaattatatagtttttaaaagtcacatcagttgctaccccttatgtcatcttcttctttatttgtttgctcgatctaccactatttctatttattcttcttggaacctttaaaaattgaattttatagtttttagagtttattgtcacattgggtttcgtttttataatttgtagatgtctcgtcaaacgttgtcattatactcctctaccgcccgtccactgtttcttctttttattgtcattgaaattttaaaaatcaaagataattatcatttgggtttatttttactttctagaagtcccgccaaaccgtcagcggctttgccattgtactcctctacagctcacccgcagcctccgttctttattgtcattgagattttaaaatagaacatgattatcattgtttcttttttactttttggaagttccgaaccttaaaaaattagacttgtagttttattatttttataatttttagaagtcccatcaaacgatgccactatgcccctttacagcccgtccgccgcctactctttattgtcgttgtgattctaaaaatcaaacataactatcgttggaattcattttttattttctagaagtcccgtcaatcgtcggcggctcagcaactatactcttatacaccccgcccgctgcttctcctttttattgtcattaacattttaaaaatcgaatatgattatcaatggggtttattttttatactttctagaagtcccggcaaccgccttacttgtttgcttcacggcctgtctgatgtccctccttttaatcgtcattaggattatatttggtgttttattaataatttttatatgtcgtatcaaccgccaccactctactcctttctaggctgttacttaatttatctcgtcatgtgttgtagatggtcttttctttcaatagtctttatttttatcacaaattttagttatttataaattgtatttctaattgaaatcttatttttctttttctaatttcagaatttattttttttaaaaaaaatagttaataccgtattgtgttcctttaatgtttttatttttattttcaatttcagttgtttgaaaattgtattcctacttaaattctcttttaatttttctaattttggatattattttatttttttaattcgaaattttaattattcttgtattgggttcttatatggattcttctttcaatattgcttattttttattccgaattttatctaattttcaattgtattcctactttaactcttcttttattttcttttgctaactttggatttattttattttaattcgaattttaattaatctcatattgggttcttatatggactcttctctttaatattccttatttttaattccgaatttcaggtatttttaaattatattcctacgtggactctcctttccttttctaattttggattttattttatttttattccgaattttaattaatttcgtattgggttcttatatggactcttctctttaatattccttatttttaatttcgaatttcagctatttttaaattgtattcctacttggactctcctttccttttctaattttggattttattttaattgtattcctacttgaactctcttttattttttctaattttggttattattttattttttattctaaattttaattaatctcgtattgggttcttatatggattcttcttttaatattgcttatttttaattcctaattccagctaattttaaattatattcctacttgaactcttcttttattttcttttgctaattttggatttatttttatttttattccgaattttaattaatctcgttctggattattatatggactcttcttttaatattccttatttttaatttcgaatttcagctatttttaaattgtattcctacttggactctcctttccttttctaattttggattttattttatttttatttcgaattttgattaatctcgtattgggttcttatatgaaaatttctttcaatattgcttatttttaatttcgaatttcagcttttttttagattgtattcctacttggactcatctttcctttttctaattttggattttattttatttttatttcgaattttaattaatctcgtgttgggttcttatatagaaacttatttcaatattacttatttttaattccgaatttcagctctttttagattgtattcctacttggactctccttttctttttttttctttttctccgattaatgtgggaatttctagcctccacagcgaacgtggtgtcttcttttcgagctgtcttaataatataatagattttagaacatgttctgtacatacggttttgctaactagcatatgatgcatgttttaagcagccttcctgtttagtttttctttttgactgtcagaacttaggtttacattcgtgctgtggctggaattttatttagaattgatctcaacaccttgggctcgttcttttccacaactaaagactgcaacttagttctttttcattagcatgcttctcgaaccgttaaacgatgtgtattgtaaaaatattaccgtttgaggctaatccatttttctctgtgtcaggttgtgttagctatccaagcgaattggtgtttcaagcgcatagcaatgggagatagaagattgagcttatatggaatagcaattgtgttcgcacatctgaaaaaggggggatgtagcctagtggttgcagtgacctgagtaacaccctaaggttctgagttaaaatcttcatatgagcgaatttcaaattgagttatttgcagtgctaagttctcaatttaaattgttgcatatatccatttggatgtagatgctggataaaaaaaactattctctaacaaaagttgtgttcgccgaatccactttctgctgaacactcatggatgtaaatgtgttatcacacgtgggattaagaccttgtccagcaccacatggcgggcagccctaatgggctatcgatcgcccgccaatgggggt

SEQ ID NO: 4653 - DNA, 15376 bp, Oryza sativa
  unsure (1)..(15376): unsure at all n locations
acaccaccttagcaacctgcattattgtgaaaatgtcgccgtcgatcgacggccggccggccggcgacaagcagcgccatgtgagatgatggctgatgtaggagaacaccctcgtgacaataaaaccacagaagtctggctccatgcatgttaatttgctactgctgcagtagtggtttcatgaatgcgacttggatggatggatggatagatccataccctgttctgagcagagaccggacgtgccaagtcataacatgtttgaacaacgtatattctttgactccacaggtccactagtacagtgttgtaccgtatcatttcatctgcagggatattgctgtagaaccttttttctttaaccaaaatacaatgttaacatatttaattacatctgcaatcgtacataatttaggccctatttgagattgctttaagtgaagatgaagtgtacgcacgtaaaaaaaactttagcatgttattaattaagttttaattaatttaaacttaaaaatgaatttatatgatattttaaatcaatctatgtatataaatttttcgcatgaaatatagtgtttgacagtttaaaaaacgtgctaacaaagaccgatgtaaaatctgtatcttaattgaaacagtaccttaaacgccaatcaattcgcaaatgcgtcggtgagccaagcttgattcggcagaaccgcaaaaacagatgaaattcgagcaaaagctatactactagtacgaatcttggcaaaaatgcagtatgaatcgtccttctccagttcctccagtccgtgtcatcgtgctcctggagtccttgctagctactgtagtagtatagctgtcatggcaggtggggccctccacccagcacgccgcaaggttggaccgccagcctggcgccccatcccaccatccctccccgatccgatcgccgatctcagccgcccgcaccaaattcaaatcccccgcgccccgccacgtcaccccccccccacacgccacgtcggacagaatccggtacacgcgggcccgtcacgtgactgctcgccgccgccgccgccaacgacgcaagcaacgcgaccggtgggtggcgcgagtcgctggtgataataccacgggatgggggagaacgcgtcgcgagtgtgtacaagaaatcccagcacgaattgtcttttgtacgcatctaacaactaccagtactactactacctgtatgtatatatacacatcaatacgcataatgcacagtgcattagtgcacgatcgatgattgattgcattgtgggggaggtatgaataagtgtaccggtagtaggccgtatagcacgacgcagagcaacatacggcaacaccaggagtacgtacgatgccgtgggttattacgtactcccccgtcccaaaaagaaaacaacctgtgacgaatctagacaactcttatccagattcgttgtattaagaggggataaatttagattggtttttttatggagagagtagaaaacgaaaagaaattagtatcactacagagccaacggcctagatatatgctctctacattccaaattgatctgcatataattttttttatgttattcctaaattatctacatatttgtgttcatttattaagtctattcgttatttgtgcattggagtaaatggacattgatgcatgcatccatgcacacaagtatttataacccacatgcaatatcttgatttgctattggctaagaaatagtagggatggtgtatacattgagtttgttgctagagtaaatatagtatgagagagttactccgtattagtttttcttggtctcgatgtacctataaaatatatagatcaatttgaaatgtagggagtactgtctccgtccattttgggatgggggaagtatctagctcgccgtcgttctttcgttcgttcgtctcgatggccgtcgggccctcccccgcgtgccaatgatgccacgccatgtgatcgttcgccgcgctcgcgcgcacgcctttacacggtttacaccagcaaagccagcagccacgcacgctggcgcgagccgctcgtccacggcgtcgcgcgacgcagaccgggcgcgggctagcgaagacatcagacatggcacatgcatcccgtggatagctagctaagataggggggctgttgctgctggcatggatcgcaaaaggttgggcgcctttgcgagtttgcttcgctttggtctcacctttgatctgcctttggagcagcctactactagtacgctttatacccagttgtagtactcctccgatcgatctgattcgatgctcctgagagtgcttttctttgctggtttatgatgactgatgagaggggaggggttgatgtgtgtcgaggtgccatttcaccagcaggttaatctcggagcaaacgagcccatgagcgatgcaaatccttattaatcctacattacctctatgtactaccagtactcagtactgatgatcacacgctgcactgttttattttactcctgcgcagacgtcggcacatgttttataacagtttttccttaaccaaaaggctcgcaactggcgtagcttttcagaatttttttagaaaaacgatccataccatacgagcactggtacgccagcagctagctactcctagctctgacatgttctgcaggctttctgagccatacgcgagatgacgcaaggcaagggcatgtgtcgtcaggacaaggacgcccccctctccaataatctatcgctgcacccagctgcaatcattggccgcccggcgcagggtatcgatgcagacatgtacagtggagtatcatcatggccctgcacctgcaccactactactcctactgccagtctaccactgaccgactactgtacaactctcctcggaaagacaagcctcacaactcacaagtcacaagcttgtttttttttttgagacaaaggcggcatgccattcattgattaagcaacatcatcacaaagtatgtcccggatataatccggtattacagaacggtacacagtacaggtagacagctcggcattccgagctagagaatgagccgccaaattggacaaccggttaacatgcataaaagagcataaaacaaaggtggacgccaacttcttgatatcttcaatcacgcatcccacccctgagcgatcccttcctgaagtttggatgcgtctgattacagtgagacaatcagatgccatgacaatgtgttccaggccctcttcctttgctagacccagtgcccgcctaattgccagcgcttctgcaagctcaggtagcaccacatcgctgatcatctccgagcaagcaaccaggcatttccctgtattatcacgaatcaaagccccgacccccatggtcctggacgagctgaaaatcgcagcatcagaattgatcatccatacgctggccggcggtggctgccatctaggtatggcttgagtgtttccaccccgctggccatccaccgtcttcgtattgtgctttagaatcatgtcgacataagacaaaattttgatgacaacacgttgggggtgcactgtgccattgttgttctttgtattgttccttgcttcccagatgtgccaaaaggtgacagccaaaagggtgtttgcatggctggatccccgtttcaggaaatcaaagatccattgcctcatggttgagaacccatttcttcctagtttgacagcgcacttacccttgatttcctcccagatttgagcagcaaaggggcagaacaggaagacatgttccactgtgtcatctctgttgcaaaaaacacagccatcagtagaggggatatgccgtcgtcgaagttgaaacccagtcgctaagcattcatgagcagcacgccagagagtaattttcatctttcccggcgcattgattttccacaagcccttccaatccttttggctttcaagcagtctcgacgccattcctcgcccactgttgctctgatcagcaaagaaagcttctgatcgcgccagattgtaagccgaacgcacagagtataaacccagtttgtcatgtggccaagaagcgaagtcagcatcaccatgtctactaataggaatctgtagaatctccttagcaatgtccacagggaagagggatcttatcaaatctccatcccaacatctggcatcctcgttcatcaggcagctaacagtggcatctgttgggaagggagaaagcgttgtcaccaattgaggtcgaaacccaggtatccaattatctgaaaagattttgatggttttcccatcaccgactccccacctcactccttttgccagcagttctctcccaaacagcaagcttcgccaagtgaaagacggcgatttcggttgagcagcctcccagaaggacgagttagggaagtatcttcccttcaaaaccctcgagcacaaggaatcaggatcagtaagcagcctccagcactgtcttcctaacattgcttggttgaaagtagtgaactccctaaagcccattcccccaagaaatttaggagtagaaagccagctccaagatttccagtgcatttttttcttaccatcctcaaagccccaccaatgatcggcaatacaagtcttcatcttttcacagattgagacagggatgcggaaacaactcataacataatttggaattgcttgggccactgctttcagcattgtctccataccggcccttgacagcggccggtcagtccatccattaacccttttccaaattctttctggcagaaacttgaagaaatttgtggtagcaagcccaatttcagtaggcatcccaaggtaagagtcttgcaagacttcattatcgacttgtaagcagcttttcaccgatatcttgaccgcatcaggacatcgtttgccaaaaaagattgaagatttgtgcaggttaattttctgtcccgacgcactgcaatatgatcgcagcgtgtttttgagtgcttggacattcctgctgtcagccttagcaaagaaaatgctatcatccgcaaacaacaagtgggagatagggggtccatgcctgccatttttaattccttgtagctcacccgctacctccttcttgtgtagcaaacatgacagtccttctgtgcacaaaaggaacaggtaggggctgattgggtccccctgtcgaatgccccttgaagggaccaccggcttagtcagctctccattaattttgacggcgtatctcactgaggagacacaacgcatcacagtgttgatccaatcctgggaaaaaccaagtttcgataagcaacccgaaagataagcccactcaactctatcatatgccttcatcatatcaatcttgagtgcaaaaaaaggatttttgttgtgttgtttacggatggtatgcaaacattcatatgccactagggcactgtcagtgatgaggcgacccggcacgaaggcactttggaactcagacacaatatctgggagaaaaggcttcagccggttcgcaagaacttttgaagcaatcttgtacaggacattgcataaactgattgggcgaaattttgagaggtgactcgcattgtttaccttgggaatgaggacaacaaccgagtcacaaagaccttccgggatctcctctcctaacaagaaacctctcaccgcattacagatgtgttcctctaggataccccaatgtgtttggtagaacaaagctgggaatccatccggccccggagcctttgttgatcccatttggaacagtgctgtcttgatctcctcattagtgtactgtttgcccaattccccattgataaagtcgcctactttatttgggatagcatccaagacttcctccattgaatcacagggctccgaggaaaacagattctcatagaaaacttcagccatgcgcttgatcccttcttgggaaatacatctagagccatcatcacgaaccagctccttgattctattagtccgccttctcgccgatgccctggcatggaagaaagcagtgttgcggtccccttcacggagccaatccactcgggacctctgacgcgccataatctcctctttctcgaaaagttcacagagttgttgctcaattaacttctcttcctgaatcaccacgtcattaactggtgactgtcgcagggatttcagcttcctctccatcttgaggattttcctgcgcacagacccaaaggaagccttactccagtccttcaaagacactgcgacttgttgcaagacactccaaactcccctcagccccacgcatccagcagaagagatcctccaagaattttctaccacctccctgtaatcctccgcccgcaaccaagccgcctcaaacctgaatccctgctgaatgggaattctcctttgaccgtggttccttctcgacaagtcaatagagatggcgtagtggtctgaggatgttgttatcacattttccaccaggcagtcctcaaagtatctcgagaactcgccatttgcgacagcacgatcaagccggaccttgctattactgttagcatcctgcttattggaccatgtaaatttgggaccaacaaatcctaggtcaataagaccacaatcatccaagcaacttctgaagtgttgcatatgtggctctgatctctctcgcatccccaagtgctcatcgaggcataaaacctcgttgaagtcgccacaacacagccacggccccctccactgatcatgcaaccggcgaaggaggttccagaaaaaatgtcgaagctcacgtttgggttcaccgtacacaaaggaaattcgccaaggaggcaactcctccgtagagaccagcacatcaatgaaatgggagttgaaccccctaagagaaaccgtgtaggctgtagtccaaaacagggctaagcctccactaaggccctcgcagctcacagcaaaggagccggagaaaccaagtgaccacatcaaatttcttgcctgtttgtccctcatcttcgtttcagacaagaagacaagggagggtctcaaagacttcactaaccagcgaagttcacccactgtcgcagccgaccccaagccacgacagttccgaccccaagtcacaagcttgtttggttccatgggcagggacttatatttttttagagagggtccctctctcccaaacatctctttaggtcttagcaccgtatacaatacgactagggtcttgtttggtttcatgggctaatgtaagaatttaaacatgtgggctaattttgatctaaaatgaattagcccccctcaaaacattagcccctccaagagatgctaatggagctaattttgtgtgaggactataaaaaccagctctctctctccttctctcccctctctttctactctctctctctccaccttttagccttgaattaactcatggatccaaacatgccaccctagactaatatttagcctaccaatttatgactaaacattggctcttaaaattagccctgggctaatctttccaacaggcatagtacaatactcgtacgtatcatatgcactatcgtgcgtacgagtactcttggcgtgtcacggtcaacatagatctcactgttggcgttattgtgacaatgcacaacttttttgacgtaggggcactgtactactagtagaaatactagcgttgcccaagagattgttcacgtgccacacacatgcggcgcacccgtcgatcgaatcgaggggagtgcacggcttttgagttgtgaccacgcgtttggtcgggcctgggctgaaatcgtgaaagtttgtcgggccggatcgcgggatcgaggcggatggaggcgcgcgcggccttcgaaacgggacgaattctcgccgaccgcgtttgggccgcctgcccggatttgcagaccgttttgctcgtctgggctttcactatgttttgggccgcaaatttctggcctaatgttttcctcgtccagactccagcgacgaacgaacagtggagttgcgaacttgcgatcaagctacagcagcagcttgtctgattttattcgataaccaaaacaaaggggtttatgcatgagtagtacatacgaacgtagcggaattcacgatgccagcatcaccatggctaagaagcaaaaaaaaaaaaagtatgagcgcttcgactgttcgacacgattaagatagtgtccagcgacgtacgtgcatgcatccgtacgtaacggcatatacgtagcattattattctaggtcgtcctcctgggcacgaggcgcgcgcggagcggcttggccatgacggtggtgaactcccgcttctcggcgaactccacctcgtcgccggccacctccttccactcgaactccctcaccatgttggccacgaagtactccaggtggtgcatggcgaagctgagccccgcgcagatcctccgcccgacgccgaacggcatcatgcggatccccttgctgcccgtcacgtccaccccctcgccgtcgccgccggggaggaaccgctccgggatgaactccattggcttcgcccactcccgctcgtccctcccgatctcggccaccatgaagttcaccgtcgcgcccttggggatgaggtagccgccgacctccacgtcctccgccgccctgtgcggcagcacgaagtgccccggcgggtgcttccggaggccctccagcaccaccgccctcaggtacggcatgccgtggacgtcctcctcggtgacctccggctggtcgtcgccggtcttggacttgatctcgtcgtggagctttgactggatggatgggttcttgaccagctcggccatgatccactgcagcgcggtggacgtcgtgtccgtgccggcgttgaggaactcggagcagagcttgatgatctcgtcgtcggtgagcgcgcggttgccgtcctcggggagcttgatgtcgagcagcgtgtcgacgtacgagtgctccaacgtggtctctttgttcgtcgtcttcgtcgtctcgccgccgtgtttcttgtactcccggcgcgcgttgatcagtggcatgaagagctccctctgccggcggcggagggcgtagatcttctcgaggcggccgcggaagaggtgcttggtgatcgccgggaagtaggcgaagacggccatctggctcgtgatgtagatgagcaggtcgcgctgggcgtcctcgacggcgcgcaccgtggcctcgtcgaggcgctcgccgaagcacatattcacgaggaggcagaacatggcgtactggagcgtgtccacgacgtcgtggggtgcctggccggacgccgccagcttgtcgacgatgacgcggtgcacccagtagcgcgccggcgcgaacaggcgggcgcgcgacgggtgcagcgtctcggagacgaggttgcggcggaggaggcgccacacgggcccgtacccggcgcgcgtgatgatgttgtcgttctcgccgaggagcctgctcgccggcacgccggggcggtcggccagcgcggcgccgccctcgacgagcgccgcgtgcgcgaggcggcggtcggcgacgaagacggacactcgcgtccccatgcgcagcgacacgatggggccgtaccgagcgatcagcctctggaggagcagctccggctcgacgtcggtcagcgccttggtcagcagcacgacgctgccgagcaacggcaccgccggcgggccgggcgggaggcggcggccgcgcttgccgccattgccgcggaacagaatgaacgggacgacggcggcggcgaggattgcaccgaggatcaagtacaagttgtccatggtgaaccggagcttagctagctagtagctcaccacgtacgaacactacgagctactgagtgtgtgtttgtttgtcatggctagctctcactctcggcgccaatttatagagatctctggccgatcgatcggagacgaagagaacggacggacggttagaaattattttctacacttacctgccatactgctatgtatgacacctactttagacagttatataaaaaaatcataaaatttgataatatagactataataatataagacgctatacaaatatgcaagtctaaattcgatctacacatgaagaaacaataataataaattttatctgcattgtacgggtactatttattatttgatttttataatttttttatattatagataaaagagtaaagtgcattggcggtccttaaacttgtagggttgtgtcgtataggtcactaaactctcaaaatatatatacaggtcccagaacttgtcaaagtgtatcatctaggtcccaaattgacacatcacctctagtatcctacgtggcgatgatgtggcatgccacatggatgtgacgtgccatttttttttcttcttcgttttcttctcattcttcttttttttccctttcttctgctcgggtcacagagaaaggagtagaaagggaaaaaaagataagaaaaaaagaaaaaggaaaaatcttaaacgagacccatttgttagtcaaaatgatgacacgtcatttcgtgtggcatgccacatcaacgtcacgtaggatcctaaaggggttgtgacacactatgacaagttctgagacttggatatgcattttgagagtttatgaatctagatgacacaccactacaaatttaaggaccatccgtacactttactctatataaaatatagtcttgcacgtttgtgtatagacttatatcattataattgatgttactatactttttattttttatataattattgagtcacatggtgctatgctatgacactaggtgtggaaaagtagaaaatccttgtcccggttggttgatcttgcatacgtcggcgtaatgatgtcatgggtttttgaacgatggaacaatggtcaaggccgggaagcttccatctgggaacagtccattttgttctacgggtgcaactgtagtgtgccatcccaaaaaaagaccctaatttccgtgcccaacgtttgaccgtctgtcttatttgaaaaaaatatgaaaaaaattaaaaaagacaagtcacgtataaaatattaatcatgttttatcatctaacaacaatgaaaatacgaattataaaaaaaattcatataagatggacaatcaaaattggacacggaaacatagggtttgcctttttttttggggacggatggagtacaagtactacaacacgtgacatgcatgcgatgcagactcctgaacggtagtacagtccattttgttctacgtacgggagtagtaagtatttcatataaaacattattgcctggccaactgcttggctccacctggaggtgtgtgtcacacccaggtgttgtggtacattgtgattttttttgacgaatcaatcgagattgtcttgggcgcttggctggcttcggcagtatgtcgttgatttgcgttcgtggggttgaccggcgtttggtggggggagacggactgacggaatttagtttacctcggtcgtatcgatgtgtagctgtgctcctggagcctgatggaaatccaaagagatcctttgaagataggaatttcatgttctctccgtctacgaatataaaaatttctaaagtttagcatttctctgcagatataagtatttttaaagcatcgaaacattttaaaaattttgcgaaacacaatgaaaatacacactgaaacatgtcgttatcgcatatgaggcatcaagtgttaacggattgaaacgtatgtttttcatcagaatatagtcatgtaatgtcttgttgtaatatttaattgcaacaaatacaatggtgtgatcggatcgtagatcggataagtagtttagaagaaaaatcattttgaagatagttaaatgcatgcatgaatgaagtggagagagaggagatagagtttatgtgaattttgtgaaacatacagaagacacatcttgaaacatatcgttatcaggtatgagaatataatcacgtgatatcttgctataaagatttaattacaatcaatacaatggtaccgtatcgtagatcggataagtagtttggaaaaaaaatatttaaagttaggagaaataaaagagaaacaaactagcttgatacaatcttgcatgttggggagtgtcaggaagcctgatttttcttctctaaatcgtactgtactaccgaggctaaatattctcctcaaaattcccttgccaaaccaaatgatgcacatatttctacgatgtactctctccatttcaagatagggatacccaggctccgtttagttcttaaaatctttttttcaaatacatcatatcgaatcttttgatacatatatagagtattaaatatagataaaaacaaaaactaattgcacagttagggaggaaatcgtgagacgaatcttttgagcctaattggtccatgattagccataagtgctacagtaacccacatgtgctaatgacggcttaattaggctcaaaagattcgtctcgtggtttccaggcgagttatgaaattatttttttcattagtgtccgaaaacccattccgacatccggtcaaacgtataacgtgacacccaaaaattttctttccacgcactaaacatggcctcatttgggtaggtgaacgaaagaatttttcctagaaaaaactagtactattttcccacattgtagagaggatggacaagacacgtgcactggctgcacaaacgggtagaggtaacaagatatcaaaattttttcacaacactatctagacttcatatatttttaattttggaaaaagtacgaattacctctcgaactattgtggtagtacgatttacccccttaaactacaatactggacatttgacaccccaaacaattaaaactggataaattacccccctaactcgattcgtagtggttttcagtctacatggcacacacatggcgatacagtcagcaaaaatacaaataaaaataggtaggcccacctgtcagcgattttttttctctccttctcccccctctctctctctctctcccccccctctctctctctctcggccaacagaggctgcggctggcgggcggcgggcgggtgaggagccggcgccgacgggaggccaccgccggggatggctgcgggtggcgggcggtcgaggagccaacgccgactggcggtcggcggcggggatggctgtgggcggcgggcgggcgaggagcggagtgtgtgcgcgaacgggcgctgccgcagctcccccgtcggcgactctgtgactgcgaaggcgaacgcgttgctggcaactgcaacggcgaaggcgaaggcggcgacaagatcgaaccgcgagctccggaaggccagcgacggtggcacgagtgcgtgcagggcagcgatttcgcggtggccgaagaagggaggtgcacgagtgctcgtggggaaggcgtgnaggcgctccaggcgaccggcggccagcggcggaggcgcccgggcggctggtgacggaggcgaaggcggacctggcggccggtggcggaggagaaggtggacctggcgggcggcggcggaggcgcccaggcagccggttgcggaggcggagctcgctcgggcggccggttgcggaggcggaggcggagcgtgcgtccgatgacggaagaggagggggagcgagcggccgatgaggcaacgactgagacgttcgcacggctgcctcctcgtccattcttcctcaccgccacgacggctactgctcccagtagcagagagcgctccgcgcgaaggtggtggccctccccgccacggccttccccgcccagaccaccaccgtcactgcattgcaggaaagtagaggggaaagggagaaacggcggtggcggccttccgcgttgccgttcgccggcggaggcgcagctccatctctcccggcaacaccgtcgcagtgccctccggccgccgcccgccctcccagccacgcccgccgcgtctccagtgttagagagagaaaagagagagatgggttgaataggagtactatatgacaagtgggcccatagttttttattactttttttctgattatattgccacgttggcgccacgtgtctgccacataggagcaaaacccctccggattaagtcaaaggggtaatttgtccagtttctatagtttgaggtgacaaatgcacggttttatagttaagggggataattcataccgtcacaattgtttaggggtgtaatttgtattttttcctttattttttggtaacaagatatcaaaatttaacctgctatagattcagcactggaattttctacggtaaaaagttaagcacattatcacccctacgctgctacacacacggtgcaaagtttgcatggctgaatcgtcgttatgggaaaacaattctaaattctcgaggagatgtactatcattatttacatgtcacttaaatagttataaatttttttaaaaaagtttaacaagatagattaatatgggatagatcatctcacaaacatacaatataaaatttaagttctacatgttgtaaaaaaaataaatttgaatgtgaatatacattaagtaatggtagtttaattaatttttttgcaacttgtagaagttaagttttaacttgcatgtttgtagagtgatatatcacatgttagtaatttttattattattttttaattttgttcatgtttgaaacaaacatcaaaccatagccaagacaaatagaaataagtttaaaatccactctctcttgttatggacttgaggattgggctgtttctcacgactctgtagtttgtccaacccaaaccaaagccaagacaaatataaataagttcattttaggtccttcaatttgtcgttgagtctgaaattcatccctgaaccgaaatacatgtatagttcattcctcaacttacagtatcgtgttaatttaactttgatccttcgatagtatagttaccggttttgacttacatggtgagtggaacccacgtgaactctacatgtgagcggttaattcctctccctctccctctccctctcccacacgcgccggaaacggcatgtcaccagcgcccgtcgtgtgcccgtcgtcgggttgcagccgcgcctctaattaaacaaactccatcaacaaagatgcagctatttatatacgtgcacgcttcaaatcaaatggcagctaataactaactgtaatctcaagatggatggtacgtagaggctggtttgatccattatctaaaagaaacgaaaatgctagggacgagataccatcccccaacgggatactccttctccacagatgcgattctcatccatgcgacgcgggtgaaggcatcaacgcgcgcccgt

SEQ ID NO: 4654 - DNA, 9209 bp, Oryza sativa
tccaccgcgtgttccgccaggagctcgacgctctcctccgcgtccgccatcctcacatcgtccgcctcctcgccttctgcgagcagcaaggtgggttgggtgctcccgttctcgcgcgagcctcgccgcgggcgtttgctcgagcaggttgtgtgccaccgcgtcgtgctgaagaattctttggtttttttttgtccttgcagaggaaggcgtgctggtgctggagttcgcggcgaacgggaacctgcacgagcggctgcacggcggcgggaaggccgcggggacgatgccgtgggcgcggcgcgcgtcggtggcgctgcaggtggcgcgggcgctggagtacctgcacgaccggtgcgagcccgcggtggtgcacggcgacgtcaaggcgtcgaacgtgctcctcgacgaggccatgtccgccaagctctgcgacttcgggtcggcgcggatggggttctccgctgccgtccgcccccggtcctccgcgcacaccatgctcggctcgccggggtacgtcgacccgcactacatccgctccggcatggtgaccaagaagagcgacgtgtacagcttcggcgtcctcctcctcgagctcctcaccggcatggaggccttctgcgccgccgagggccgcctcctcaccgccgtcctcgcgccgcgcctcaggcccgcctcctgcgccgcctgcgacgcccgcatgctggtcgacgagaggctgggcagcgcctacgacgccggcgaggcctccgccgtggcgtcgctggcggcgtcgtgcgtcggcgagaacccgagcctccggccatcgatggccgacgtggtgcgcgcgctggagcagggcgcgcacggctccatctcggccgtcgcgaggagatccgacggccacgggaagctgtgattcacacgaggcgtgtcgaatcctaggcgcttagatctggggggcttttggtgagctgtaacttgcgatgacgacgatgacgtcatctggcgtcacctgcacacgtggacccctcctactgggtggagcttagaacaaagcggggtagtgggcgagcacctcaaaaaaaaaagaatcaaaaaaaggagaaaaaaagtagtagtggtatgatttggaaaagatttggagcatcaaaaggtggggtttgtgtgtgctaatggaggaatttcgatcacattgtggtgcaaaaaaaaaatggcagcgatttgggagggtgaggtgattatgaaaatggatcgtccattttacgattccaaagagattttggtttttattctttcgtttgttcgtgtaaagttcaccgagtgcctcctgtttctgttcatattgttgatgattgatttagatttcgaccagagtttgaattccaagagactatgtatatattctatgttcaacttgattctgtactgctactactattgacagcagggttcagtaataagagtttagatgtactaaacaataaatctggtaagtatagtccatgatcaagaataaatacagcattatgaacttaaaacacaactttattccgctgtaccgaagagtgctaataattgattggatcatggcgcccaggatttcaaagagcgtctctgaaagtctgaactgaacgcatatattcgcttcccttttctcactgacaactcagtcttcgctgccctctgaccagctatagtaggagcagtattctactccataatgctgaagtatctccaagtcaaacaaccgtattctacatttgtactcctctagtacgtactggttaccttcgggccaaaatcgaaagaacttgcaaacatttgataatctgctacctactctaatctgattatatttcccctgcattccatcagacttgcccaattcatttgacgatttccatgtattagcaaactaaaaaaatgtgcgactataaaaataaataaataaaatctaaaacgcaattttacagttgaatttggggacttctcattgaaatttatttcccagcagtgacttttaaactgagaacaatataaatatacaatatttacctataaataattttatgctaatttttccgtgtttctaccgcttattggttcaaacagcctgacttcatttcttaactactttaaaagcacagtcgttctactctttccctagaaaaacagctccagaaaagcccgtgaaaaaccagcataaacaaaaccgaatttcatttttatttccaaatccgatataaaagaaactaaattacaagtttttttatctcttgttcccgttgcaacacactggcacatactccctcaatttcataatataagtttttttttcttaggctgtgtttagttcacaccaaaattaaaagtttggttgaaattggaacgatgtgacggaaaagttgaaaatttgtgtgtgtaggaaagttttgatgtgatggaaaagttgaaagtttgaagaattattttggaactaaacacggctttagtcaaagtttttaggtttgatcaaatttataaagaaacacaataacatttccaacacaagacaaatatactatcaatcaaggttatatatagtgaaactaatttggcatcataaatatttctcttttttttctataagtttggttaaatgtaaagaagtttgattagaaagaaaattaaaacaacttatactatggacggagggagtaattagtttgaaataaaaacgagaaccagttacaccacggtgtatagaggtgtttgctgataataattccggtcaaattagcgaaatgattaggggatttgacctgaacccgatgtggacgcgcccgcgctctgccttgcccccaaaccaaccacgcgccgatgcctctgctctcctcacgccgagccgagcaaagcaaaacacacccacgtcgcggacgacgttgacgcgcccgcgcgccgctcccgtgacgccgccgctgccggtgccgcccggaggcggtcacgggggacgcgacgcgacggcgcccgcgcgcgcaccggcaccggtggcgcgtccccgtcggcgacggcacgcccaacaacctccctcggaaaaccggcctcccatctctttcgcccgcgacgcacacgcacccctcccccggttaattccgatttgaatcttacacgtactaattttattgttattattattttagtttttttttttatttacaaacttgttagaaacgccggtgtggtgtcatggtgtgatgaaatctgaattttctcggtgcgtttgcattggctgtacgtttagtttagtactcctatatgcatcctaaattttgatgtgttattggaagtcaactgtgaatgtcactctactaacaatatgttcaatcttcggttactttctatgtttcataattaaatatttttaaattaagaattaatagtaagtactaagtattactaagttacagtacttaaaattaattttttttaagtattttaaaatcaacaagtaccaagttaacttgtcatgcatccttaatttagttttttatttaatatttctaaaactagaaattaacacgtaccgatttgtacatgtcaagaacttgctgtttccttttctaatacatagataagccgttataatttgctcctgagcagatagatggccaatttttttttcattgttttttttttccacagaccactggcttgaagtgactaattaagcatagataaatagatagacccaccagaagttcagagaaccaactgaacacatggcaaagcctgaagattcagttattaatcgtatacggatacagagcagttgttgcaacagggagaaattaggtcggagtgacaaaatgggaagaaaaaaaacagagaggaagagcctagtgagcgtcttcctcctcgcagtgcttggtgtacttggccgggtccagcagggcgtccagctccgacgggctgctcggcttcaccttgatcatccacccgtcctcgtacgggcttgagttaatctgtcaccaccattggcagtagcattagggtttgaaaattgtctcgcaaaaaagaatttgtaattctagtttgtggagagtactaatgaattaaattaacaaagagacattccggttaattaaactaacacctttaaacagggacatgctaccagtcttgaaaaaaaaaagagacacatgtaattttacagcgttattgttaatatgccctatgttaaaaaaagtaacttctgagaatgaatatgcacaaatgtatgtttagatttattttcaaaagttgattttttttaacggaggttatactctctttgagacggtgggagtacataccaggccgggtgtctcagagagcttgtcgttaacctcgacgacctcaccggagatgggggagttgatgtcgctggtggccttcacactctccacgttgccgaatgcacctccctggctcaccttcgcccccgcctccggcagctccacgaacaccacctctcccagatggccctgcgagtatacatacatatctagtcatggctatgtatatccctcatgaatacagagaccggattaataaaaattcattatctaaaaaaatatatatctagtcaggtccaatcaaattattttttaccccccatcttactgttacttttgttttcaaataattgccatcattactgtgtagcactaaaaagtaactggctagcattctgcagtggaagttagttcctttatcttgtttcttattaaagtaacaaaagacatgttctatttagtttgaaaaaaaaagttacagcaaaggtacttcatcatatttcttaaaagtagtaaaggaaaatgttctgtgacatatcaggaaaagggttgttagttgttgcagcagagggcagaatatttgattttgtagcatgccacgtagtttagaatacaacagcaaattgacacttaggccctgtttagaaatgcattaagctttaactaatcttgttgcacatgaaaggcatggaatattttctcctttggttggctcacctgagcatggtctgtaattccaattgtggccacagagccatcattcttgacccactcatgagaggagctgtacttcaacccatcaagaactgcaataccagcatgaaatcatcaccatggcttaaatcaacagggaccatagttacaacaagtatactcaactcttttcaacaactggaatttctaaattttattcccttcccttttcaatcatttagtatgtctccggtgtataactacagcatggaccagtcaatgtaacaatatagaatgtaaaaaagaaagaaaagaaaaaaggaagccacagcaatttataactgggtgcaaggatagcatggcacaatgcaagactgtacaggaaccagaacattgtaacaaccacatgctttgttgcaaaaggcaacagaaaatttatttgatatgaattctactactcaagctagctataccagtggagaagtatctggagattgagtaggcaggtgcagccctggtggctccactgcatgagatcttgagggcattggcagctgagctagcccacagcctcagagccatttctgtgccaatttcttgcttgttaccaaagtatctgtgttcttcttttttccttctcctagttagctggatgagtagtggcagctcagtggtggtggtagtatagtggaaagctgcagtgagatgaggggatagggaattgtttggctcaggaggagagggggaaaatgagagggggttgtgcagggataggatttgtatggttggtgggtgctcatagcctcatcctttgtttagaccattaattcccctctgcttgatccagtgtacatccatgggttaggacagattagttactcagttaattaagtgtgagactggaaaaaaatatctgacggcagttttataagttgagtgattgaactagtgaaagttcagttaactgtcaacggctgtagatttgggatggcagactgttctgagtcaaaatgaagcttttactgtgcgtggttaccaggtgcagtaaaataatttcagatctaatcgcagtaaaaaaaatgtagtactatatgttaagacgagattggtcggtcaaaatctatctggccctttacatctcccaaatgttacctcagttgcaggtggtaaaaaaaaatcactcgtttcacgtgatgtcggcagatcatggaccatgtctcaaatgctgaaactctgaacaatcaacaaaaaaatccaaccagatgagctgtgcaactgataattgatcatcacactatttgcaactcatctttcatgtagatggaacttcaatcccgaagaaataatgacagcaaaatgctgcgatcctgaagaaaggatggcggcaaaatggcagcgataaaaaaaaatggttggttactgaagaattatttgtgcagcagttgagacagtagcaagataagagctagctaagctagctaggtagagttggatggaagagtagtagtatgagatagagcatggagcgcgacaactcaagtggatgctaaagtaaaaggcattctcttctcttgtttggaatcagaaaagaaaagaaaagacttgagctgcttggctggaatgtttggttggatcatgcgcgctctccttagcttagctcgccaagaaatcctctcttcatctctctcaataattcaaagccacgagctctctgctcatatccagtgcgacgattcccgttaatgcaaatgcattatatccagttcgaaatgttacaattcttgcgtttgcagcaagccagcaagtggtgtgaattgtttaatccctcgtgcatttcaacgaaattctctcacaaattcgcattgacttctttcttagcacaattagtaagcagtgacaaataaagaatttttgaacaggatgtctttccaaggaaggtgagattttttatgtggatagcaaggatcgcctttccttagcatgaagagaatgtgatcaactttacaccttgcttacgattatggccttaatttttgataccctaaacaggagcacatcacatgcatgtcgacctgagaccaccaattaactgattaagttggcattgcagatgcatccgtcagttacatgatcaggtgatcgatggatcaactgtaggtttcattgctaatagctgctgctacatctgattattggagccagaaaaagatgcctgtcctttgcaatgtaaagagtgagtgaaaaatctcttcttcatctgctcctgcagcaatgcataccttgagagaatcatatcttgctagcattcgaatgattcatataagtaattgttagtatatattagagatatgtacttgcaagtagcactgaacaataataaactttgcatgctgatatatatcaactgaactaagtacaggttgttcaagaaaaagctgcaagaaccaaacatcaagtagtccagattgtagtagctacttcttcacggggtgcaatgcaatgcaacaatgaatcagaaagtaggataccttttgcatgcacttgaggaggggcatttgttaatccaattattcaactactaactaaaaactatatgtaattatgtcacatccacctactaccagacgtcattcacagacattttttagatggaagcttaactatataagtttgtgtcatccaaagtacacaagcacatgctaaatgttagcatgaggttgacacaatgctaactgccattgcaacaacagagaaaaaacagactagttaacaacagctgctgcatgcatacctagtgaatgattcacattgatcaaccgatgatccatattaggagtatatatatatatatatttatcatcatggaatgaacagttcaggagagaataaagggttcctagctggtgagctaaaagggggaattgcatgaacaacccaactgcattgctgctgtgatcatcaaccaacctataattattcatcctaacatgcagaaacatcaattctgcgttgatccataatggagtttaattagaggaagcatggcacatgccaaacacttgtcattggggcaatgctgtggtcatatccagcagcatgagggacatcctcgacatacttggtcacttccatcgataggtcaacccatcaaacggtactttcaaatatatttatatcaagaatgttattatcagcattgccaattactctagcaatctcccacatgcaaatgcacagtgttactttggaacagtcattctcagagattgcgtatgtggcttggtttaatcatcgttgttaaccggtaatcgagtgatctatcagcaatgcaagcagccaagctggcagtaggtggtagtagtagtagtagatacatgttgattgatcgagaggccaataagaccttgcatttcgcagagcataattggtacctagttgcagggttaacgtgctactgctctgttagttgcaatgcactcaaagcgattaaccattctatatattaattaatttctccaagaacaacaagatcgaagagatagtgccatttgccattggtctaccatggaggaggataagattgtgcattagctcacatgctctggacctcaccttatccatggcgaatccatcattgccgccatgatcgagagagatgagaggccgggagatggtgttgttggacatgtgtgatgtgatgatctctgcacccctgtctgtcctgtcgagtgtcgatcaccactgaaagctggagtaggctgcatgcatggatggatggtccccatttcgttgcaacttttcaagaacattcgacagcaatcactatacttgtactgccagtggtagtacattaaccacgtcgatcgactgctaattaagcattgttcctgcctgccattgtctcgacgactgttcagagccgtcctactctaccagctgtttagctaagctgattgtagtttttggcttcgttcgagtccagcgttcaaaatttcggtcctatcggtccctttatatgatattatattggccgaaatttttattttaaaacgtttcatgaattttaacaatatttattcaaatttgactaaatttttgaaaatattgctatctcgacacccttaatacaaataccgaaaacgaatgattaagccctagtcgagtctgccactcgtcaattagctcgagctcgattgactcgaagctttaggtggtgtttgg

SEQ ID NO: 4655 - DNA, 14473 bp, Oryza sativa
ttggatccttatccattcactgaagggtaaaacagtaaataaatatttcataaaaagaaatttctatttctctttgtatatttttaacccaaaaccgtgggacccatctaacggggttaaaagtgagggcaaacggtgggttcgtgttcaaaaagatagggcaaaaatgcaaactttaaaaagtaggggtaaaacagcagttgaggttcaaagtgagggtatagatgcaattatcccaaagaggatccatgccaccgagaagaaggatccctgagtttccagcaatctagcatacactaagattttccactccacgcactgtgaacatgatcatcaccatcatctaccaaagaacacaagagtaaagtattacgcttccgagcggcccaaaccggtctaaaaatgcttgcctctcccacttttatccttcgagcgtcgcctcatttttgcgcaccgctccctggccgaatcttcaaagggggagtacacgcttacccgctagaggagttccacgctccgacaaccacattaccatcgatccctaaaaaagagcacaaatcaaccactctgagatagatagaaggtgcatgagcgatgttctggtactctctactggtagtattattctaccagtattattaggggtaaattaataatttaataataccctaattagttatgttttcttttctaactaaatatatctatgattatctattacgatgacattactcatattgcatagaaaaaaatgtttagtcgctgataaatgatgattatacccctccgcacctttttttttataataatgcccctccgcgttttttactaccactagttactattgtagtataaatagatttgaacccttcgatcaaatgaaatcaatagttcatattgttttctacttagtagtagagaacatcgtaatggagctcaaggtgcgtagggtacctcatgtccataacaccaacaaataaaaatggtgcaaataccattgagtatttgagtatatttcttcgatgctttctggtacttatatggattgtgttagattacatgtttgttcagcttcaaataccactataaatctataatcactgttgtcgaacttttatacttttttataatgtaaagtatgatgggccattggagcgaggggtacacttccttaataattaagatgttaaactccagctccaaatagtagggaaacatcactgaatctgccttcaagtctattatactccatttatcatcaaaagatccatatcatatccttgtatttcttaatgaaaggagaactaattaggtcgcatgcgccagccattcacacaagagcttaacgaaaagaaaaaaaaggtggagaacaactcacagaatcctcttattctatttatgtttgtgctgtaatctccgctctttgctcgctgacttgcattatcttgcaaaaagcaactctagatatgcgcgtccaaatcaacaactatacaatcagtggctagctagctgctagctagctagtgatcgatgcaagttgatactaggattaagtatactattacccggtttgatcgatcaatcagctcatgatcaacactaaaccgtatcgatcggcgtcacatctcacatgtacttccccagttgccggttgccccctgcatcgatcctctttcgtgttgcctgccgcctgccgcctgccgctttcagctctgtgatgttggaaaactattctaaactctcaaagatgacatcctctcgttatttatatatcatctaaatagttataaaaaatattaaaaaaataataagatagattaatatatgataaattactccacaaatatgcaagataaaatttaacttgtacaggttgcaatgaaaaaaaataaatttaactaaatatatgttaactaaccatagtttaatttatgtattttctataatttatagattttaacttgtatgtttatggagttatatatcacatattaatctatttatttaattttttataactatttaaattacatgtaaataataatgtaaataataaggggaagttggctcgaaagttttagagtccactctcgtgatgttgccactcgtacgtgagctagcttagctatatattgcgcacatgtgcagcaaccaaacctagctgctacgagcaaggcaaagcagagccgtcagttgcggtcagtttccctgtcacctccaggcgtccaggaacatacacacacatcaaggtagtggtggccatggccgcgtgcaggtgcagcagccgcctctccctgcagctgcctcctccgtgcttgctcatcgtcctcgtcgccggtaagtgtatcgtatcttgcatgcatgcgtacgtgtgtgtgatgtgtgtcactgtggctgacacggcggctgggatgtgttgttgttgttggttttggtgcagcggcggcgatggtggcggcggcggcgacaggggcgagggcggcgtgggtggactacccgtcgggggtgccgtgcggggagacgatcccggtggagcagtgcgacccgggcgacgcggcggcgaacagcgcgtgcatggacgtgtgccactacggcggatgccggcgcggcggcgagtgcgtctccctcggcttcggccgcggccggggatgccactgcaagtgctagcagctgaactgagctgagctgatctctgatctgaactgaactgatatgctaatcaggttgagcaaagtagtagaagcagtaattaggagagaataaattaatgagcgctaagctgctgtttgtagatgctcgcttagctactgtcccgttgctggctgccttgctagttttcccgcccttttttgttcctctgttttttcctgatcttcgtgttttgcatgagttggtagcacattaggtttgcttttgtccgcgctgcctctctgtacaaaagcctaaggcgtgagctttgaaaaatgaaatcgccaggtgccttttgttttcttgcacctgtcttttgcctcctttttacaacaagctcgtgctaccaagtaccagttggatctaaacaaacaggagaaaataatcactggattgtacttgcggatccggagtgttcttttggttgccagaagcatgtgtacttccgttacaatgtttgtggtcaagagtttcataatccatgttctagagacaggaattctctaggacgcatcaactattcgaaggtgtgtatgattctccaggacgaaataaagtaagcaccattctgttcttcgggaccaacattgtcacacaccatccactctctgagactcggtatcaaatattcgcttgctaaagcaagatacttcctccgtttcagtaatatgaatagatttattaacattaatatgaatattgaaaatattagaataacttatattgtgaaacggagagtagtactactacaagatgtgcgcattcctgtgagaatataacaggcaagtaaagaaagcccacccaaccaccaaattgcttatcctccaaacgacaacaatacacatcagtaactctatcttcacaagatgatcatcatcatctagctcatgtggcagacaacacgtacaaatacaactcatacatcaccacaattcacgaagaacaagttacaagggaggggatagaaaggtacatgagcagttctgcactacagattgtccatcttttttttcctgttgaaaaatcctatactgtactgagaacacaaacaccgcaggacacaagtcttattcacactttgtaaacactacaaggctcaagctgatcaaggacatcacattcggggtgctgtccctttaatgggggcgatgaacatcaagtggccggcatcagggacctcaaaacaaccacacaaacagggacctccaaacaaccgcgcacactgggggtggcagccactgtgttgtttcgaatgcaagtacaccgattcgagattactctatagtagttgtattagatatcagcaaggtaaaaaggagaaaccacgagatgtactacacaacaagctgcagtccagactccggataggcttttacatttggatagacatcacctcaccaggcacttttgctcgtcaagcacacgatgcacacctctgaagttgggtgtcagcaaggctgttctgacttctgactttagctatgatcaagcacacgatgtacacctctgaagcaaggtgccagcaaagctgttctgacctcttgactgtagctatgaatctgtgggcgtggacaaaaataatccacacctttgccgattgtacatgaacaggatatcgggcaaacttgagaactgtgcagactttggagtcatgtatttacagctactgtacaggatttttggctggcctgccgattaatcgacattgctgaggcagcaaactgcatcgaacttgccccttgacatgcaatagttcaccatcaataccacatccatcatgtgtgttgggcccagccttgagcctcacagacttaacctggaaaagttaatatgtccgtgaactaagtaaattaaagaaaagagttttaacatgaaaacttctggataacaataaaaatatcatgacaggttcaataaaaaccagaaaattctaacgtaatatatgccaatcccgactttataggtttacccttttttttctctcatctatgattccaatttccagaacagattgtgaatggcatgtgaaaggtaaattttttcattacacacctacaattgaaccaagttgtgcagtgaatccaggagatttgcaataaaaaagaaaataaaaaatacaataatcacatgacatgcacaaaaagattttaaaacaacagtttctaagaatgaacgaaaaccttaatatttgaccaagagaaccaatcgtattaccttcagatattccacattgggaagagaaatatgctttccaaactgcaaaagcaccaaaaatttcagtaacctcagcctcccacttccaccaaccaacagtaggtccaggcaattgtcatcgtattcagccttaggagcaataacctgagagcttaaactctgcacagtcttgcatgaatggttgcataccagtacaccaagataccgccccttcctaactgtccatctttcatctaagcttgggactagttccttagtcagaccaagttcaatatcatccaatggaccaggtaagtcaatgggagtctctggttcccagttaggttgattatcccatttaggctcatcatcccacttgggtcctgaatcccacacaggcccaggatctgaaattgtggaggaggcgtcttctttgtcatgtgttgtggtaccacgagaggaatttgcatcatttgtagcacccgagcctggccatgccttttctgtccttgatttcgatttggatctacgccagttgggagtcgatgaaacatgagcctgaggatggatcacttcttctggttctttgaaagtacttgttctccctaatgataggcgctttgattttgggtcaagtgcacgaacaagttcagagggttcattattagcatgtggactcgaaacctctagatctccacctgacattattcctgtagacatgattgaatcaatgctagataaacttgaggcacgaggtagacattctactcgcgacctccgaactacatcatcatagaggtctgatgcatcaactttatcttgcccttccacaattttatgctcaccaccaccaccatctgatattggaagatactccaattcaaagttatactttggcaagcacaagaatttcagaaaaccggctacaaagtaacggagaggaccaaaacgcttctggtatctctctgagagttcaagaactgcaatagaaacaaatagtcagattttctgcttccatttcaaaaaagaattaatattgatccaacaggaaaagaaaatggtctgaaatgtcaattatgtggttaccatcactaacaaaaccaaaatatgagactgttgtgccaaaatggatagtcccactttgaatccattcaacggcaaaaacatcaatgggtgtaaaacctccctgcaagcaatgaacagtttaacaaacattgatgtgaaacaaaaaagaaaaaaatgctgacacaaaattgtgagggcaataattaactcggtctacgttagacagctaaactagtacacagcagaactcttgactaatttgtatgcttcacagactttcagtgccctgctacattttcttgaaaagcagcatgtaaactttcatacacgattctaccttcagtgttcaaactaattcttgccagaacaatggtttcaaatgatggattctctaagaaaaaaaaatcagcatgacttctgtgtactttcagaactgctcgactgcacctggtgacagaagccccctttgacataagttgagctagcttactactgtggcatactaggatggctagttaatggagtacaataagcagatctagaaatgtcagtacaggcctggccaacaattccacatccccagggtccaactagagcaaagcagtgtgaacacatggttggcaacaaagagtaaagagtcatgatagctagtaactcaagagctggtatcatatccagcatcatcaataacatttaatttctttgatgcctagtactgaatcaataaatcatgtgacacgtatatagaaaaccataaatactgaaacaatataatgatgtttaccctgacaattgacattgctgcagaaatcggatctttaacacccaatactgtccaaacaagtgagttatcggaccctgctggtattataccaattggaacagatacagccacattttgatcatctctacaaaggagaccattgagaacctacaaaatgaatttattaatgcatcagaacctgtagttgacaaatgagcattttatagtgacatgcaaggagaggatggcttcagaaagtggaagacaaacatggtctagtgttcatagaagtacataggttttgagaagtaagcattaacagccctcatgtgataaccattctaggttagcagcgtcactgaaaatgatttgaaggttttgtgggttcgacaaccagttgtttaatgaactccaaaattgtgaataacaaagtaaaatattacaatatacaaatctgctgatccctgggagaagcttcttgaacttagtagtttccccctgaaacagttcaggctgaggaagtagaaggttggtttcagaacaaagttgcgaaacttcaagcaattttcagcagtttatataggtatatcctatttgttcttgatataacagatcaaaacttcagaaaagctaaggcaatttaagaaactgtaattggtaatgttgtcataaaagattaccttctctagttggtataccaaacacattaaaaataagatgaggaaacataaaaaaatcatgcatgaaattaacatagactaacctcattaacaatcccatcgccacccacacatacaattcctagaagacaggcacaaacatgaatcagatgatcaaaatagttatgtagaacacttcaggtaagatgtaaagatatatataccatctggacaggtactgaaatctattgttgatacaagagattttgcatgaccagcatgtgtagttttgaccacttccatcttgaaacctgcaagctgtcaccggcacttattattgttataaaaacaagcacaaccacatgatacactgaaaacaagttgttttgctctggaatgataagatgagtatttccatacaattgaatgctcacttatgtcaaagactatagtgatgccgaattttcatccctaataaattcagcattacagagatgataggacatggcagaaataatcttcaaggcatggcactagaagcagcaagattgatatgtaacgcagtagagacaacagtgtatcaagatattactccatcacacgtgtctatgtaataccaatatcttgattcaaatagactggatgaaaggatacaacagctacagacacacacagcgagagagagagagagagagagagagagagagagagatttaaaatcccttaaagttcaggaacatttcaaacatatgaatcataccaaccagcggaccttgacagataatgtgaactactagagccagagaaccttcaaaatggctcctggcaacaaatggatagcaaagcatgctccagttcaacaggagagatgattcttagggcacaatatgaactcaaacatgaatttatacatagagaagctcatcttggtaagatactgacaacatgaatattgatatggtcctctactacaaacgaattcatttttatggagatggatcaaggaacataataaagaaacagttcgtgccttttcatctacctatgcaaagttagcatcttacttgattactacaaataaaaaggtcaacacgattaggtatatgacttgcatttttatcggtaaccaatgtcaatggtaaataaggaaacatgaaagacactcattgcaacattttttttaaagttatgtaatgactatatgaccatagctaatgctgcaaacatgcttaagagttgatgaggcagacatcacagctctgattataaaataatgcacatgattctattcatctagacataccttgaatataggttccacttttccgtggaaaactttgctagatctaccatgtccagatcgaggattcaagatgacaagtatctttgggggagaccggcatttaacacatggatcaaacatattatcaaatggaatgagttcagatgaatgcttcttgctagatgccatggggtgaggtaatagatttacatagcattgttgatctgcaaaaccattaacccaccgaaaagcctcgtgtggagaagtggataggaaacgtaagtccttttgaatttttctaggcttcataaagcaggaaagtccactggatcttttttcaagagggcatgcatgcacagtgaagtgacggagcccggaatgatatgatacctgcaatgttaaagttgaaaagatcttagaattgctctcacatgatgtggacttgcagtgaaactcagaaacataccaacgcaatttacagaataaagtcaatgagctaaaaactcacagatacaatgtcctcgagcttaaggatattagaaccccataccaaggcttcagtagtgagtctagcatcaaagcaattgctactggaccctgatccagactgttcacctgatgcacttttggctttgttatccaatgtaagcttcccagaacaaatttcataccctaacaaatcagacttctcatcttcaattctgttgtcgtgtgtgcctgccttctctggatccttgatggcatcatcaatatccttttgctttaagaattttgaattgcttgtctccaggaatacaggagaagggttatggtctgctgcagttggagaacgcctgctacttgtgcgacgcagcactttatggattagccctcttggtgaagtaagattctgctcatgatgatcagacttctgaatttccatcttttaagggagcccagtacatgcataacattgggagatgctagatgctatagaaacatgccaataatggcatcactcttataagctcatggaacaccaacttatggctgtgtgcctgcaaaacatatgtaacagaacatcaagcaggtaataatggaacagatctgcgcctaattgattgctgtggcaacatcagtaaccaatgaaagccgcaatggatgagtagcagctactgagtgttcagttaaatcatcctatacatttataagaaattgcctacctaatatgatagtttagctagggatgcaagtggaccagatcaggctgacccattgaccccttctagttcatttgagtgcaaataatactaaatggaccaccaataggtgggagtgatccctagaccattaccatagtacttgaggaataaattataacagatcctacaggtgaatttttctaggtccaccatagccaggagctaccctgcatcaataattcatctctatttgaactatgccagacatacaaatatcgatgtatgaagctgaaacactcaacaccaaccttttaatcaaggacagagatcaagccaagtcaaaccacacagaccaaaagggaaaaaagtatttagaaagctacatagaacaattaatttatagtgccactttgtaaccaacaaaaactattttaaaatgaaaggttccgttgttggcctgtcaaaggtgatgacagaaacttaatgcatatacatatgcatgccattaggtgataataacatgagtaaaacgcatggtcattcaacatgtttaggtgtgtcatataggtcactacttccaaaatgcacatttaggtcactaatgtgagttaaatgagtcatgttctcatctaactatccatgtaagcataccttacacatgacatgccacctaagactgaaaaaattacttctgaaaatgtgcagacctagcaatgtaattgagtggaacaaaaacatagtgaaaataaaagctgctagggtttgatggcaactgagaacttgaactcgtcaaaataggcacatgaaataatttagtttcactaattccgtgtattgccaattagtagtgctctgacaaaggaaaaaatacacaaagagttttctacacatttctagatgcaattttttaatcctatgtggcatgccatgtgtacaaggtatgctcatgtggatagttagatgggtaaatgactcacttaactcacattagtgacttaaatgtgcattttctaagtagagtaaccaatatgacacctaaacaagttgggtgaccctccatgcattttactcattaaacatttttttgacaacctttatagaatttatttataaatatacgcatcataggtccatacaaataaagagtagtaggcattacttatcattttaagagatcccacagtgaacaatagaatttacgatttcatgaagtgggcattcatagcaaactcaactatatgttttatactcaatgaacaaaggaatcaaagggacatctcatgttgttacttttcatacagcatatgaatctgtcttatagtaaacttactcaatggtgcaaaccttactcttatagagttacagtaagatgtctgaaggtgaactacagatgtcggtgtaacttccatcaatcattagggaaattaacttccattctatacaaaattgtacagatatacatgagttattccgattatgaaacaactacacctatagcatctacatgatccttggtttgtgaaaaaacacaagtgatggacactaaatgttcctaaatcttgtgggttaggaacaaatattgctcaaggaaagctatctgctgcattgcccaatgaaaaaacaacaataaaaactatagtacatgaagcacatgaggcgtatcaactggattcatcacccgtccaggacgggaatgaagaaaccagttcagaaatgactcttaaggatctgcaaccaatggatagtggccaaggaaaagactaataagcaaccgaagagaacatcatgttaggtacaaccttggcacagaaaaactgcgtctacctaaccacagaaatcagaaggcaaaagcatcccacagccacagcccacaggactcgcaccacagccctgggcgaaacgccgccgcccaaaccgaattcgcgcgccttccagagcaggcacgccgaggaggaggaggagggcactcaccgatcggatcgagccggacggaggccgaggccacccgaagcctccccaccgccgcgggcgctccgccccaccgcaaaatccccgcgccaccgagctcgattcggcggcgaaaccctagcttggtcgaagcaaacggagagagagagagagagacggagcgcgtagccggtggaggaaggaaggaagaggaggggggaaatttattaattaacggagagagacagcaaggcaacgacgacgaggaggacgaaggtatagtggggggagctgctttggtttgcttttaatccccgattagactgtggggattagctgctaatcgtgccatttcctgcgtgctaattatggcacgtagcgtgtcttccacgaagagacgcaggaaaggaaaagggggcggacgcctgctttctctttggattttatcggcacgacccccgcggccgcacgatgggaatttccgacagcttttttatttgggtagattcgtgttattataatttttgtggttttgttattataatttttgtggtttggggaaaaaaaacattcttactgtttagtactctgtactgtttttgagtggttatttcgattcatgtcattataatttcacctttattaaaaatacgctaatttttagatcatattaccctcatattcttccttcatcctctactctctttcatattcatcttctccaccgctagatctgacggagctgatgtcgttgaatggtagctctaagcagtatgtggtgggaatagggcagcgttgttttccctcgttggttgaccctgctcattgacctatttgcatgttcacacctcgaagcccacaaccctcacctgcacgaggagcttcccaactcacagtcccaaaccccaagaaggcactcacctttgagctctcccgcgatatgggttaggatgtgctcttgccgctacctaggaaggaggaaggtgaagtgggataggtgtcagagctcgcggttggacgcgacaaatgggaggatgggagaatggtgtggccagtgagggaggggatgggaagagaagagggccctcccatcgtggagcttgtcgcactactctgcaccgttttcactacatggaactcgtcggtccgagtccctgatctaccacttgttggcaccgggagaagcaagggcaatggtatgagcttgtcggcttgcgccttcatgatccactccgccatacgccatagtgcgccgaggagcttgcgggagaagggagaggtacggtagcagcagaaaggggatcgaggggagaccggccctcggtccgtgagatgatggggactcgtcatccgtgccatcgccaaggctcgcttcgttaatttcatcaggttggccgcctcaatcttgagaaatgaactagagatgaaaagtggatgaggagaatgaaaagggtaatatggtccaaaaattttagagaaatatagtaaaagggtaaagagtggcatattttgaataacaacttcaaaactgtaaaataataacatggatccaattaacccggtatggccgcggtacactagcgtgtacggtgaccccacctgtcggcctccatcgctgacgcgagttcatcgacctgggtgtgttctgcatctgcacatccacagctcggccaatctttggaaaatcataatttagggaatttgggcttttatgatgtgcaacataagtgagcccatcttattcttcagacttactgttgggccactcatcttaccttcacgtcccatactgccatctaactaaaggaataagttcacttgaagtcccttaatttgtcgccgagtcttaaatttgtccctgcaccacaatattagatagaagcatctttcaactaaaaaactactgacttcgatagttgatggatgcaacatatctgatattgcggtttatggatgaattttagacttgacgatgacttagaaacctaaagtgaacttattcctaaactaaatgggcttgctttgtaagttttactgagatctgggtgttgggcttcgtaaatggccaaataggcctcggtgttggcatggtttacaaagggtctgtctggcacagctccaactctagctccacccctcctggagttggagctcagccaaacagtttcagctccatcaaaactgggagtggagttgggtggagctctctcacaaaatgaactagagttgtggagctgggtttaggcagctccacaactccactccagacccaactcctgaagctaaatttatgagttggagctgtatcaaacagacccaaagtattgacaatctggctaagcgcctatcaacgaaaagaaacacagatgctttgaaaggttttttttttaaaaaaaaaagttttcaggggtcaatcccaagtgtcctaatattgctacagattgatagagctaaccacaaggtctaatggaaactttgcttccgaatcagaataggacatatacactttccgatgtactataaacttactacaaaagaaaaaaagcggtgaaaaaaaaaggtactacctccgtttcatattataagactttctaacattgtacatatttatatatgtgttacacacacacacacacacacacacacacacacacatatatatatatatatatatatatatatatatatatatata

SEQ ID NO: 4656 - DNA, 14169 bp, Oryza sativa
tcaaagtcctgtcccattgattttaaatggtacaaaattacttccttttgtgactagagggagtagtagtacaactcaatacaacaatctgatcaacaatggcgcattatcgatccgcggagtaagtacaacttaaaaaaagaacttcttttaaaaccaagttatcaactttctaatatttaattaatttacttatatttactctcgaataatggttaatcacaaaaactcattttcattcatcatccataactctgttgagaatgcatataggtgtgccatcctacaagcgcttcaaaagcaatattatttgcccagagctcagtgggtctatatcaatgcctgaactacctttcagaatcacggggggtaattaattaaaccagtacactataaaagatcaagaaattatatatggatcaatccaggcaataccatttaatctgggggtgtttcaaccatgcatgtgctggctagtatttcaacctgaacccaacatcacatgaccactgtagaaattatcccagacaaaggtagctggatatatcaagaacaaattaatgcagatctgaataaatggatcacatgcatacatattccaccattaaattgcgaggttcttaagtatgaattctttggttctatatgatcaaagtgtcatttggaagatcgatatacatatcaagtgcaacgttacatgaagaaatagggtctctatattttcaatatactgaatagtataactgaagaggaagaaagaatcaaagcacgtatatagatgcattattcttactgatcgatcaccacacattgaaattcaagtagaaaaggtttatcagagttcgatctgttggatcatggtattctaaaaccctacctttagaagggagcctgcttttcatcagagaccatggaagttggaacgaaataagtacattcatgcataaaagaagaaagacagactgcgcaggaataataatctcgtagagtagaacataaacacagttaaatattgcctttgctcatcccaaagtatcatgcatgcatgtgtgtatgttctgtgttcagccaacaattaatcttgctagatacaaaatatacagtaaaacaaaacatgcataaccgcatccaggttacttcttatccccacttcatctcttatacatacattcttgaaagcgtatgcagaaggttaaaccaagctactcgatcagatctgagttattgtacgtaatctagcatcagttcgtcctagagcttcttcggactttataccaagacaaatcatgattgaacctgcggataagggcaaattaaaaaaaccatactggagatggaagttagttaaaaaaaaaatacagaaagttttcactgaaaacattcatatatatatacacctctattccaaacatcactactgcataattatgagcacactacatgttcaaccttgaatcacataagagcatgcaggctgcacagcatcaccgagaagacaaccctagctggctagctatagctcttatgcatgtcgttgctagctagctagagctttttctcttttggtaatataaccagatccagatatacatcaaattttatgctaacttgttgaagtaacataagtatatctttcattgaagagaaaaggaagcagggaaaagaacacctgtgaaaatgaagaaactaaacagaatggaagaaataaagagagaagataatgaaatagaagagggggagagagaatgtcaaggaagattcccccaatcaaaaggtaatgatgaaactttccagcgcctgccagagagacagagaaaagaggagtcaaagcaagccatcattacaccaatcttctatctctcctcggttctaagcaaacacaaacaaacaaacaaaaaagcagtgaaatcatgaaacagcatcctcggttctcaacaaaccaacaaaaataaaccgaaacaaacatcacatgaaaaatgaaatcctcaataatagagggaagaaagtgaagaaataatagcgagaactatagatctaatgttttgaagctatctctgaggggaatgaagcctggtccgagatcccacggatgagaggaatgaaaaaccttgcacaaatcatcctcaaaaccgcaaggtgcatgagaccttgaaccagacaacattccactcagaagcaaatagcttcatactatctattttcctttcccctcctctctctctctatctatctagttctcatcctctgatattcttcccttgcaagaagctatgggcaaagagcacgggtatgtatagacacaaggagcaagggccagtgacatggtccatggagtggtcatgatatgtgaaatgattacagctgcacacatcaccataaataatttttttttgaagtcacccaaattattcaaaagaaaatactctgacgaccatgcatccccagtgcatctattgaaacgagccatgcacctgcatagtcactgacaagtggaccatgatgcagctgtagcacccgtggagcccacctgtcagtggctggggcatggacagctatacatttacatggggggtgtttagattaggggtgtaaaattttgacgtgtcatattgggtattatatggggtgttgcatggggtacttgggcactaacaaaaaaaaactaattacaaaatctgttagtaaaccgcgagacgaatttattaagcctaattaatccgttattagtaaatgtttattgtagcaccatattgtcaaatcatggaacaattaggcttaaaagattcgtctcacaaattaatcgcagtctgtgcaattagttattttttagcctacattaaatactttatgcggattttaaacatttgaaatgacatggtgtaaaatttttgtgtgggaaatatacagggccatcgcaacaggcaagaccacatggaaaaaagagacggcattaaaaaaccataaagagcggaatgaatggtgacaaagaacacggcggcagaggggttggacctacagctgtggtcgccgccgtggagagacccgggatgcaatcctagccgtccatcgcggcctcgatcgacggatgagagagcacgagacgccatgaaaccctagaaatgacgagagggtcggggggcagtcactgggggagtggttgagttaaatgcgcggcccaagatttggaatttggtgtgcctgctctcgtgtgttgtgtgttgccttgcttgccctagggccatgaattattcatttttttcatgtattttgcttggagtacacagctagctagcaacgagcatatgaagatctctcactgacaaggctccatctctctgcattatgtgtacgtgtacgtgttttatcactgagtcactgacaggagacatgcagatgtaatgatgcaaatatataatacatgtagaatctgactgcattgtacatatatacacataatacatagcggcatgcactacaggtaggagttaaggtcttcatttcttcaaggagtttgtaaactctgaacagtgtggaaaaacgggagagaaagagagcctagatcagacatacacaaatttctcagtaccatggcgtacgtggcactttagcttagctgctgacaaagcccctgcactagctaggttgcatgtttcagtcatcagcaatagaaaacacgattcaaccgttgtttatgtttctcagatatgttaaactaatggccatatgtcttgtgacataatgacatcttctatcagcaattgtcttattcaatgcatagagccatagtccatagctagatgtctcttgatcaagcatatggccggcattaattacaaaatatggagtagtagtactgcttactgctgatataatgtcgtacgtgatggaaaatatatgcattgatttgaattattgcttgaacagggcctccttgtttcatatgcatagcctgccacaaaacacgtactcatgtgataaggcagacgtacactgttggtttttgttaatatatctagagaaatccatgtattgggtttgttgttttgttagtatattgtgaagtactccctccgtcccaaaataagtgcagttttacactattcatgtttaacgtttgaccgttcgtcttatttgaaaatattttatgattagtatttttattactattagatgataaaacatgaatagtattttatgtatgactaaatatttttaaatttttcaaataagacggacggtcaaacgttgaacacggatatctatgactgcacttattttaggacggaggtagtagatgtgacaggcactgacactacaactcaactttacatatagaaaactatacatagtgtagtatgtccaactactattcagagaccttgcccatgcacgatatgggcacggggtctgcgagctagggctcatctggggtcaagcgaatcaacacggtcggcctttgtatggcccctaattcaaaagggttaggccggccattttgtcatctcatcgtgtacacaagtataagatagtacgtactactgtttaacaaaataattaccgtacatacaaaattttgaattagcactcataagtttagcatttaatttgtaaggagtaccacacattattcggataagtttgatataatgtgcaatgagatgatcgattgtgatgcatgacttcgttaagcgtaagttataccgacttagtattttggaagctctcatatgggttgaaacgtgaatattggggtgagtgcgcttgcgtgtatgagcataatggtttaattatatcgcgttttgcaaaaaaaaaaaaatgaaaatcctaaatgtagcaaatgttgactgtgtatcgacaataacccattccctctggcctggtgtggccttcgtctgaaccaggcgacgacgacatgatcgatcagccagccaaaaagcccaaaacccttgccattttcaagcttctcccatctccactacgtgtaaacgccgcatacgcacacagaccagaagctaccgccgagcgccgatcgcgcaggcatgcatgagctatttcccgagaaagccaaagctgtgagcgcccgtagctccagggcttctgcagcagcaagtagcttgtgactaggtttcagccacttgtagcgaaggattagaccacacatgacatgcatgagaatgcagagagctaggcgcaccgcactggagcgccgatttgatcgattcgtctctctgctccttaatttgcgtgtgttttggtccgttgctccggcgtcgtcttcgccttcgcctgcatgcgtggcagcatggctgcatgggtaagtgcatgcacgcagagagctagcggccggcactacagtaacgcgtgggtagccatggcgtgtaacgttttctcatgcgttagattattcgtatagttagtttagtcgtactagccgtagtagtagtagtagatgtgccgtgcgtgaagcggtcaagtgatcggccagagacgtgacatctcgtcgcactctcgatcacctgcatgcgcgcgcgcgcgcccgtgaggcgccgaaccgcgcaaacgcacgcgctgcctctcgcggtgagatttgccgatcgcggtgagccgcgcccgagctcccccccgccccgcgcgcgtaacgctcggctcggctattgtctgcgcggctgtgcgaacgtgacgatgtcgtgggcggaacacgcgctgcctctcgccgtgagattttgccggttaatttttctgcgagatttgccgatttggagcccccgccgcgtgcgtgcgtgcggctatatcctcttgggcctccttcccgtgcgtacgacgcgtgggttgggtcggggaaactggccggcggggcctgcgcgaggggaagctttgcgttttttttttccggtgttgggcttggtaggccaggagcggtggtccgcggcgtagctaggacgcagagcctgtttctgtcgtgggctgcagtggttttactccttggaaggagttgtgagctctgggctgcggcaagtgatggaagatggaagaaatttgatgtgctttccttggttttcttcaactccctccgtcctaaaatgtcctttttctctcaatgaattccctttcgacgggaataaggccttctttcttcttgacacaacttcggatccaagaattttttagaactaagtatccctaacttcacaaatccatcaatttagatctgtgaccacatttataaaatttggataaattatttcgttctagatgaaatttatgattttaaactatatataaactataaatctatcgtgaacggtggattgagatctgaaactgtattgaacagagtccaagagtgtaggtagtgggaaatgggtagaaatggattccatgctttttcgtgtctcagttttatatggtgtgtttttttataaacaaaagtaataaagcatgcatcagatgccaaggtttttgataagggagaaaagatggagtgctatttgcgaacatggttatatttttattgaagtttcttcaagctgattttactcgttttgcaacacacatcatcttgtgagggagtgatgtataaagtatgtaatttgtaaacgagtgaggaagtgacaaaaaagttgcacgtattttgtatacataggctgtgtttggatgcctcctttcccaaccactctccctcgttttctgcgcgcacgtttttcaaactgctaaacggtgtgttttttgcgaaaagtttctatacgaaagttgcttaaaaaaatcaaattaattctttttttaaaaaagatagcaaatacttaattaatcacgtgctaatggaccgctccgttttccgtgaccacagggctgtccctaggggcgtgcagcctgcgcgcccgcacagggcccccaattttcaagggccccttaggcccaaaacttcaacactagatatacaacttaataagtaaattggtagcctaactagtcccgaaaatctgttatttttcttgtcgtttcggcttcgataaagcctttgccggttcgcatagttgcgccagttcgcaattttgaatcgcctcccactatggaccttatcaatcaccaaccgcaacgaacgagaggagtaaacgacgcctcacctctctcttgtgcggtcgtgccgcctaatgctgtttgccacgcccctaacctaattatttctgataatttctaatccggtaatacctaattttggattatcattttaggccattctaattttttatgaaatatattacggagtataaattattttcatattatatcatcaattaagtttttatccttcaactttgcacaggcccctgaatttaacgggacggccctgcgtgatcactgttacggatgggaacttgttctaacggacacagccatataatacatggcttaaaaaaaaaagcttcacctcaaacggaagatctctacaaataagtgtacaaattctaacctaccttaccagtactctctctgccttcaagtatttgtcaagatagtggatagtattcctcaaatttcgaccactcgtcttcctttaaaaaaataaataaatactaaaacttaatgttccgtaataacataacaaagtatatagcactctaaatatatgcattcatgaaacttttgtcagtggcaaaaccacgggagtgccagagtgggcctgtcactcctcattcgacctggaaaccctggtgcatagtcaatcgatcatttgtgtaggcattcaccaaactctgtatgtacctacttatctacagtcttgagtaaataactagctacaataatacatttgtgatattgaagctagactgatttctattatcaaaagaaaatctgaacaagctttaaggcaaggttaatggcacgataaacttttctctttctctctcgaccatgacatcgtcttatcaatgggtccaatgatcgatgatatatttctctaactacggtatgcatgattgtgctctcagtggacaacctaggaattttttaaacctaaacgaaacatgaaaagcatgcgagaaagcatgggctccatgcatctctgagacgccgacctcacagtggtgagatcttataattaatggcgactagccacagtccattttccccgccatggtgaccggtgtccatcgtgacgttcgtcctcgttctctaacatgtggtcctattaattatgttcttccactcctaggtgttagtttcaatgttagaggattatagagtccaagcactcctcatgacttctagacaattacagcttctgagaatctgtaccaaaagctgagctgtttgaggaagtttttgattctgagagaagctgcagcagctagaaactccctaatcagagcctcaatatgctgtgctattttttattacatatagtccaatttcgaatctttggtctcgctaaaatactataaaatcctattaaaagtacacacgcgctcatgtgtaatagcgggctcaggatttgaaccctaataaacaaaatcatgcatgtactatttcacatgtatacttttggtgctgatcatatagcatgtgacttcgcttgagtatataatttttgacatttagttatgtgaccccttaatttttttgctcaaagtacgccactgcatgggttcaaacttgtgtgtgtcttgtgatcaaactaatacttgtttggtcctattatcaacctatatatcgttgccttcaaattgtggagaattgaagaatagattaaccgatcgatcgatcgatcgaacactgcaaattgcgagcagcatgttgctttctgaccccagcaacgaaagacaccattcggcttagccctctagcctctgtatacctgattacctgtacgccactacgcactacagtaatcctactctacaggtgtcatcgtttggcttatttttgataagtcaaatagcatatttataacgaaaaataatttgtgaataaaatttttatatacgtgttcttaacgatcgaaaataaaaaaacaatctaaaaacaaaaaggggaaaataaactatgataaaacccttaaaatcaactcccaatttaatattgaaaatttaaattttagtttataagcataagccaaaagatgaggttgcacacccgttaactccacctaggaagacgcgcacgcctatcgatctgtcatgttcaacacatacatgatttccacttttgttccaaccaggggcggattcagcatggggatggtggggtctcgagccaccactactaacgtgaagactatgagagccccacgaagaccccactaaaatttttttaccatacatagatgggagggggactgtaactccatctagtttgcttagaccccactgatatttctttctggatccgccactggttccaaccgcaattatacatcatgcgtgcatctttcagtttcaggctttcagggatcagaacactagctagtagctaacaatgtttaaatttcctttttgctgatcggttaatttggtgcggctattctacacgcaaagtctcagtaaggttgcctttacggttagtgggtagtgcaagttgccataggcttcaatatacaattgcaataatgtatcaactatcaaccgaatatatgatcgtcctgactgatgatcacttaacagtctgtcattgcaacgacacctttttggaacacagagtgttcgacgatccccacagatattgaccagtccagctagctaagctagaagccgatcggatggcggcctttaatttggtcagtatcttgtgccgattcgatcaatcttcagagaaagattatacagtttcagcggtagcaacagcggtacaatattatagagagagagagagagaggaaccaaggggcaaatttttttgcttaaacatcattcatttcaatagttatgtaaaaatcccaaataaaagttacaatactcatataacaacatgtattaccagagtaccagtctaccacatcacaagatgtaaagtcgaaacaaaatttacacatcgagaaaaaaataattaaagacaaatccagcgtatgaacggtacagagcatttggctttgcgaaaagtcgagaaccatcgggtcaaaatatggaacctagctagctatatataagcatatttttctaattgcaagtgcgacgttatcacacttgcaaggaaaaggcggttaattccgatctatcgatgcatgtcgatcgaggtagttagtggccatcgttttcgtcaatttcgtgctgttgtttcttttgaaggataaggcagggtggtggatgcatgatcagatcagttttcggttcagttaaaagcggcgacatgaggtgaaaggtcgctgcacggcttgccgctatctctcgctgtctgtgtctccccctcgctcgcgatcggcgccgcgcgcgcgctagcgagctagctagctgcgtcgtctgtgcgccacgacctgatcagcacgagcacgaaccgtgcggctcattggccacacggagcagctagctaagggaacatatatgtcacactgctcgccatggacgccgcccgcgaaatgaggtgtggagagggtggttaggctagctaggccgtatctctatctcgccgcatcattattttggattcggcgaccaggagcagcaccagcggcatactccgtccgtcccaaaaaaaaaaaaagacaaaccctgatttctgtgtccaatgtttaaccatccgtcttatttaaaaaaatatgaaaaaaattaaaaagataagtcacacataaagtattaatcatgttttatcatctaacaacaacaaaaaatactaattataaaaaaatttcatataagacggacagttaaacattggcacgaaaacccggggtttgactttttttttgggacggagggagtacttacttcgtaccatgaaaaaccaatctaatatctgatatgatatatcatagtactatatttagattcgtagtactaaaatactccctccattttaaattaatctacatatagttttttttaggttattccgaaatgatctatatatttgtgtttattcattaggtctattcgttatttgtgcattggagtaaatggacattgatgcatgcatccatgcacacaaatatttataactcacatgcaatatcttgatttgctattggctaggagatagtggggatggtgcatatatctagtttgttgctagagaaaatatagtatgagagagttattagcttttcttggtcttggtgtacctatgaaatatgtagatcaatttggaatggagtgagtatgtcacatctaacgtcagattgtttttatggaatagagggattactagctacacatgctctgaatcagtcagcggaaagagtataaaaaacaaacctaatatcgaatattgtaatactacaaatccagatatacatttatatccagatatacatttattgaaatttatagtagtagaatgtgtaataggaagtatttgatatcaggtttttttttacagagtgaatactagctacacatgctctgaatcagtcagcgggaagagcatgcaggagcagtgtgcgcacaactgtgcagcggcacgatgatggccaaggagaaagtggagcttaacgttgttggttccaattaattactaattcctctctggtttaatttgaaaagagcagggagccaattgattttgcgctagctgagtccgtctgcatgtgtaactgtgtactccctccgtccaaaaaaaaaaaggcaaaccctaaattttcataccaatgtttaactgttcgtcttatatgaattttttttataattagtatttcattacgcgtgacttatctttttaattttttttcatatttttttaaataagacggatgatcaaatgttggacacggaaaccagagtttgtcttctttttttagacggaaggagtatggttgtagctagcttttactgcggtggtcgtagagagggtttgatttccaaaaggtgttcacgaggtcgggtttccggccgatcgatcgacagcaaaactagctagggttgcccggtatgtacattgatgtgatacggccgtgtaggtcactatagtgacctaaccatacatgtccatatcacaggctagatctgatctctcatgctttgcttacgattaaggaatatatttcagtacttccttcgtttttaaatatacgatatattaacttttagatagacgatgtttgaccatttaccttattcaacaatttagtaatataaaaaaatataaacaatgcttaaaatatatgcaatgataatataagtacaacaagataataatacttgcataagttttttaaaataaaatgaattgttgcatgttcaaaagtcaatagcatcatatatttaaaaaggaagataataactcatttctactaggacgttgtgtggtaagtagaatatcccgtgatgacctaggggttcactaaggagttgaagagttatgatcactttagtctcatatattgatgactacacactttttttttgggggagggggggggggggctgctctcggggcgcatccaccacctttccctcgggcgccctcctcctcggcctggttgtgcttggggtctgatcgagacctacaatatcttcaaggtgttgaagttgcagctcacgaccttcggcatctccttctagctatatccatcgtgaactcctgcgccatcaacatctttgagaaggtcgtccaaactaacaagaaaacctacattcagccatagttattaggaccggattggcggtccgaccgaaaaaaatgggaaccaggggctcagccgatccgatccagtttaaaaattggagtgcaatcaacccggaaaaaatcggttgaatcgccggtttttggaaagaaccagtgaaaaatcaggcaaatagaccgctaaagaaccgagcgctcgtgggaacatgtgtgaaaaggccgaacactggctgaaacgtggggatagagaagaaaataggcggcttgagggatttgaactctcaacctcccctttagactcaatcatccccaccactgagctatgcatgcttatcaattgatttgaaccgtgttggaccggtggttcaaccgatcagaccaatcaaaccgtgtctggtccgatcctaataactatgcattcagcaatggtaacgatcacggctgccctggacgtgcggttaaaaaaacactgagcacagtgaccgcctatgaataaggctcaaacgtcttgggggggcgggctcaggcccgagcatgccctctgccccgagctctcctcagaaggctctgtcctatttatgggtattggtgggcctatagggctaacattaaccgacacaccgcttaaaccgcagggtagagcaactcggtgtacagctcgtccgcatgctgagaaacatgatgcttcatgaagccccttacatggccacatcaaccaaagaaatagaggggaggtaacatggcatgccctcatcatccgtagtttaggtccacctcggtactttagaaaggctgacatgtggccctgtgacagttgggaaaacactttcttacctcctgctccactagttagccgacagctgagacagtcacgtccggctagcttgtttgtagggacatcgacaacactaagcatacctaattcaatagagtgggtctcactcctgcatacatgcattggcattgtggactccccttcatgtataaaaagaggatggggcaattgcatcggtgcccccactttcaaacccatttgctgttttatcatcactttttagggtttacagttttaccctcactctttgaatctgaaccagccagttacccccacttctaatagaaggtgtcacggtgttagttgtacaacaaaaggacatgtataccctctgcatccaacaacatcgtgcaggggaggacctggagcaagggacggggaggagggcggcgtctgcgccgacgtcgacgtccagcaggatggggtcgtcgccggccacgggagcagcagcagcagcgatggtgggggcaggtggaggcggacgctgacgacgatgcctcagcgtggaagccagcggccacgggagcagcagcagcagccgccgccgtcgcccgcacgccgtt

SEQ ID NO: 4657 - DNA, 19543 bp, Oryza sativa
acaactccactccagacccaactcctgaagctaaatttatgagttggagctgtatcaaacagacccaaagtattgacaatctggctaagcgcctatcaacgaaaagaaacacagatgctttgaaaggttttttttttaaaaaaaaaagttttcaggggtcaatcccaagtgtcctaatattgctacagattgatagagctaaccacaaggtctaatggaaactttgcttccgaatcagaataggacatatacactttccgatgtactataaacttactacaaaagaaaaaaagcggtgaaaaaaaaaggtactaccctccgtttcatattataagactttctaacattgtacatatttatatatgtgtgacacacacacacacacacacacacacacacacacatatatatatatatatatatatatatatatatatatatatatatatatatatatatatatatatatatatatataaaagtatgtatgtatgtatgtatatatgtatagattcattaatatccatatgaatgtgggtaatgctagaaagtcttataatatgaaacggagggagtatgtggtgagcgcgtttgcccatcagacttttcattataaattgtgtgtccattccacaccgcttcagatagattttggagggattcggttcaggtgcagtagctagtgtgatattgtgactgcaagttacacagtcacaccagcaccactagatttgaaacatatggcccagatgcattagaatactgtagcaaagtactgtagcgttgctgcaagaactagtgctgattcactgtagcaaacgatttggatcattggatcaagaaatagagggatcagattatgcgcagtagcaataacaactgcactggatctcaatccatttttgagatatctaggagttttgtgcattttcattgttgatcaaaatccaaagtcttttattctactaccctcgagaaggaggagatgtaaattagatctattggatcaatagacccgatgaactccgagaaaatccattgttaaatggcctataaaacgaaaatatgacatcgtgtaccgagggatattaagtttagagtaacaccaataaactatttttttctcgatccgcaactaatgttgatggtattgttgtaattccatctatgccttcccagactacattagaaaatactcgttttagaccttctcagaagaatctttttacctgtgacccttaaatggcgtattaactttttattagtttggtgttaaagcctcttttaaatggtgcatatgagccttaggatacatatccaaacattttaggtacatgcaaaaaagtagttaggtgttgtatgctttagagcaagtctaatagtatagctcactactagctccaaatcatgtacagccaatatagtagccaattcatataatagttgcttactatatactattaatgcatagtctcacctgtaatatatacgttatgtttttgagtccatgctgtagctagctacagatctgtagcccgctactcttctctctcttctttatctctttaaaatatatttatagctagtttatagcttgctattgtacctgctcttacatgagttttggcatctatcctatgtgaatggctagaattacagcctacagcccccaatgctccaagaatttgagtcacaattattttcccttttctcctctccatgtggtttgtgcaaaggcaactattttgtccttcttgtggtgatgtttggacacgtggcatacttgaatagaggaataaagtttatcaagatatggatgctatggtcctcaaataaaagataggaattcctcacaaaaaacaggagaacaaaaatagacatggttggctgacattaaacctccaaattgaaaaataccgccaaaaaagaagccatggatgaagcagattatactatcaaactgctcatacgccttttgcacatttgtttcagatgacacttgtatcaccattaaagcagtattgaccaaacaaaaacaggccttatttagattcaatttttttttccaaaaatgtcacatcgaatgtttgaacacatgcacagagcattaaatgtggacgaaaaaaaaccaattgcacagtttgcatgtaaattacgagacaaatcttttgagcctaattacgtcattatttgacaatgtaatgctacagtaaatatttactaatgacggattaattagacttaataaattcgtcttgtagtttacaggcggaatctataatttattttattattagattatatttaatactttaaatataaatatgtatccgaatatacttaaaaaaattagccaagaaactaaacatggccacagttaagcagagtataggagtacagttaagcagagtataggagtaatcacaacataggaacaatgattgatgggatggatcacagaatatgttctacaaggtcccaaaagaatgaaaatgaaattcctttgatcacaagttctaaacacatggcaggacattagtaagcatcctaatagcttaatgtatagatcgccacacaaagatattcttttttaaaaaagcatatgatgcacatacactacaagtcaaaactatttcgtagaacagtggtctaccactaaacactcaaagcccaccatcctcctccacgtgcaggtttcaaaccgctaacatgggtgagtgaatctgtattcaaattcaaataaatatatttaaaataccccacaccgaacgaagatttactcccatttacacctaattaggtggtggttggatccaggaacttaactttagtctctatagttagacactaatttagagtattaaatataggctacttacaaaactaattacataaatgaaagctaatttacgagacaatttttttaagcctaattaatccataattagggaatatttactgtagcatcacataggctaatcatagattaattaggcttaaatgattcgtctcgcgaattagtccaagattatggatgggttttattaatagtctacgtttaatatttataattagtgtccaaacattcgatgtgatagggacttaaaagttttagtcccatctaaacagggtcttattcttttaacggtagacgacacatccatcatcagcgaaacacccatgataactccgtcaatcataatatatgctggatcagtttttcataagtattcataggtgtagagtgtgcgtgtgtatgtttacatgggtaagtgtgcgtgtgttgtgaacctctgtttataccgtgtttttttttaaaaaaaatgaaaattcgaatgtggcttgttggtattacaaccgcaggtgagtgagaccacccaccggttcgtgtctccgcaccgcccatccctaaaacatcgccacgtccccgccaccccccttcaatgtccgtcgccaccggcggcggcgtcgtcctctcgcgtgcccaatgcgcaagccccaccacgccgcgcagcctccgccgccgccgccgctcccgctcccgctcccgctcccgccgcggaactgcccgctcgcgaccgcggtcctggcgctcctctccgtgctcctcgccacggcgctgtgggtcctcctcgtgctgtccccggcgtcccacgcgaggggcccagccgcggggctgtcggatgcggcggacgcggaggcgtttgcggtggcgggcggaggaggcggaggcggcggggagggcgcggaggccccgctgtcgctcggccacatcgtgttcgggatcgcgggctccgcgcacctctggccgcgccgccgggagtacgtccggatgtggtgggacccggccgccatgcgcgggcacgggtggctcgacgccggggcgcccgcggcgccggggccgagcgcgtccggggaggggtccctcctcccgccgatccgggtgtcggaggacacgtcgcggttccggtacacgaaccccacgggccacccctcgggcctccggatcgcgcgcatcgccgccgaggccgtgcggctcgtgggcggcggcggcgggggcgcgcggtgggtggtgctcgtggacgacgacaccgtggtgtccgcggacaacctggtggccgtgctcgggaagtacgactggagggagatggtgtacgtcggcgcgccgtcggagagccactcggcgaacacctacttcagccacagtatggcgttcgggggcggcggcgtcgcgctcagcctccccctcgccacggcgctcgcgcggacgctcgacgtctgcatcgagaggtaccccaagctgtacggaagtgacgatcgcctccatgcttgcatcaccgagctcggagtgcccctctcccgcgagtacggattccatcaggtatgagcttatttttcaacattttgtggccattcaacagaaatgtgggttgggtattaacagcgcttagattattgagtggtcttatgaaatgttattcgcctcagcaattggagcacttattctgttctgctttgtacgatctgctgatagactagttaccagtgacacagtgacttgaattcagggactatccactctctcctgatcccatgcatgaatttagtgcgaaatagcatgctgtctatgctcacggaaattcgggggattgctaatgaactagcccaatttagaatttgcgttagatcttgggaggcatgcatattgatccactctttggaaccttaccatttctgtgatgcttgattcattatggcagaaaggaagtgtagcctgtctgctgttgtgccaacctagctggctgttatatgttcaatcagaatacatgaacaatagtagtagggtcttgccagagtggttatgttagattgatagtgaaaggaagtttggtagtacttgaatgttacctttctttgggctcttttatggccagcagaagtttttgcaagaacttgcctgcttgctttatagtactattgtaatttctgtcaaataggtaccagcatgctgcatgtgtttgaaaatatgataataagtgattagcaagttcttttttctgtttgcacattaacaagtcatatttacttttttttattaatcgtgtgtatggagaactaaactctactctcttaatcttacttttgtccctttgcattgtaatcagtgggatatcagaggcaatgcccatggtatattggctgctcatccaattgctcctttcatcagtatccaccatctggagcttgtcgatcctatataccctggtttgaactctcttgagagtttggagctctttacaaaggctatgaaaacagaacccatgagcttcttgcagcgctcgatttgttatgataaaaggcagaagtatacatttgcagtctctttgggttatgttgttcaagtgtacccctatgttcttcttcctcgtgaattggagcgatccgagcggacttacattgcatataataggatgagtcagcgaactgaatttgattttgacactaaggatattcagaaatcattgtgcaagaaacctatattatttttcttgaaggatgtttggaaggatggaaacataactaggggttcttatatacgtgcaagtgttcgggatgacctaaaaaacaaagtgttttgcttcaggtcaccccctttacctgacatagacgagattcaagtttctgcatccccattaagcaaaagatggcatctggtttgttctaatattcctaacaatatatcatatcttgtttctacatttacattggctaattgtcgtaccactgatataggcaccaagaaggttatgcagtgcgcttaaaggatctattaatggcactttgtttatgtttgttcggcaatgtggacgggggacatttggctcagcttctgattctctataattgatggaaagcagaggtgtatattttctgttcagatgatacctggaagatgtagttaccatcctacattctttgaatcgagtgttgtgggggctctttttctgcctcgagcacttggcagttaccaactgcttgttatacttggtagttgttgaaggtagtttctgtatcttctgaatagtgacattagaaaatagttttaatcgttgaccgtaacaattgggattcatttttgatgatttttaaggtgcttctaaaattatgatggtttctcaggctagtaccattccctatttgacgattgatgacctgtaatatatctaatgtaggccttttcaggttttcattcactttgtactatatttcatcaattggaaaaaaacccaatcatgcatgggctatactaagtttaaacataggtctcagacataaatatggaccttacttattacataaaaaatggcatcatgcttgtccatacctactttgagttgcaaattaattccatgtgctatgtatgcttatcatggtgttgtcttttgatatggatgcaagaggacccttctaggagatcataaccccccctcccccccccctattttcattagtagaaatgagcattacaaagtttctgaccgtcagtattatgattaattgatcaaaatttgatactttcttcttgtcatgtaccattttgttattaaaggatatagtttctaactttgtttaggcatcagagcaatcaaatcattgctaatatacaaaaaggaattcagaaggatatgcagatatacaaacagttgaaaaatgacagggaaaaaaatatgcctgctgattggagagagattttttttgttgttaaaaataagttagcacacaggcgtacgattcaaaattaattgtggtctaatggctgagtcgatgagcgaaaatacctagttgcttcgcacgatgaatccagttttctacgtcttgcatacatcttatgagaaaataatcattgactgacatggttgtcaactattatgttccagttacgaggatctttttgcagaaagctctgaaaatttaagttgcatttgccattttagttatttgaaggaaaaaaaactgttgtgtctagtcataaactgccttgagcttcatttttcctaatttttataaagaatgttggagtgggatgcttagcttccgacaatcttttacagtgtcagtgtgctgtgtgcggtactctgtttcgacaaccttaatgcttatttaagagtaactggcttactggcatatgcagattgatatttttcatttcccttgcattttgttttcagtatccggtgctttatctgtagccttttttcaacactctgttctctacttttatgtcgccacatgatgtgctttaatcaatgctttatgctgtggtcacaaatgttctaacttttgagcaaagtttcagtgctgtattcattcacttcaatagcaagattaatctatcatggtacattgcaaaagttgccagattgacttggtgttctgaaattcttttgtagcagtttgttaatagaagaatctgctgaggaacaaagctgaaaaagaaatactggtggctttttttgtggaatcttcaagctactcgtggatgtacgatacttgtggacggagactgggtgaacggagtgtcaccctttgattagctgcattagtctgactgaaacaactttccggcttcattctttgagacccgtgtactaaccttgatggattctcagtcgaaatgtgaaatcactaaatcaggtaagaacagcactccattagcattgtattggagggctgtaaacctttcccgataccttgtttagaactgtaaatcagtgtgaactgtgaagcgccataaccatgaaagagattccattcaatctttattcctttccagttcattctgaaagccgttatctgctatgacgcctaaatttacttttgtgtccattttagtcctactccttttgatatctgctttatactatcaaagtcttaccacagctaaacatgttacctttattggggcatgtctaaagttgaggatttaaatggggcaaatccgcaaatgcacatgtaccttttccagatcaattaccttaagctatatgccatatcctttctgtagtatatccttgctgttctcgtgtaagtcgaatttctaacgtgtttttccttttcaattgacttccctgatttagtcacggttcaatccagtcttgctgctcattattctacgaatctcccgtatgtacttatggtacactgtttgctgctaaattaacatatgaactgctatgctgtatctgtttgctgctaaaataacatctggacttatatgctgtgtggaagtgattcatcttccttatcaaaaaggaaaataaaatgtgtatgtctgtgatgtgctctccacggtcggcaagcagatatttaacctcctagttctgttcgttgttattttcagtacatgatgtttcctgagtatcaacaatatttttcctcttattttttcccctgaggtgggactatcaaccatattttacccgttgctaatggctcaagtggttggtggttacttgtcaagggcacaaaacatggtacttgactactcctaattctcaagtaacaggtttgttcagatactgcatcgctgcttttctgtttactctgcaaattgcgatcctcttattacaacttgtgtagcaactcttgtgctgtgcaaaggcaacactacgtactgcgctagtacatggtccaatcagggcccaagcccttgaggcccatcttagcccatgtggtttgagctttgccatgtgctccctgagacagtaattagagttaagttagcaccctagtgggcctttttcttaattgtccatgagctttggcatccattatcgaaatgatatgaacataagaggatttgaataggtgggaaggaggttaaacatcttcccactacttgatcattggccctattctttccttggtgcatttgtaaagtccaaatataaattttgatgtactaacaactatgctttccaactgtcaactgttaggcgctgactttttgtagtttaagactggagatcagattcggcgtatggtcgcatggtctcgtgggacatttcatatcctcgcaaagctagcttaaatgttccatcatggggtcatctgtcaacgcattttgcatgttgattttgatatttcatatcttcgcaaagcttatcggacgtagctaaaatttaaattttaaaacttaaatttaaaattgattttgatgctttttatcgtagtttattttcaacattagcttttaagtcgctaaaatatatatatgtagaagttatatataaaattagtttatatttgctaatcagcgttacgccttataataagtggtatgtgaaaggcaaaactatcacactgggactgaggtgctctcctctaatatcaactctgttaagtttcgaattccgtgaaccaaaattcttttgtcagcttccaccaaaaaatgtcctcttatttcttctcttgaatataagagcctggtctctataggtgaagtacagcagttttaccaactactatagtctggttgacacagtatttttttttcctgatcatgcatttacgtgatataggcccatattaactgttactcattactgttgcgagcaaaacctaatttcagatcaaggaccacacgagtgtctctgactttcagattcagtgtgaaaaattccttgtatttattccgtggacttgcaggctgttactttgtcttttggtgttcatccagcccatgttttgtcaactctctacctaacttgcttcctcaatcttttcctaccctctttctactgtgttttgccccagtaggtaaccaattccaatgtaaaaaagagaaaaggagaaatgtcttcagtggcgtgcagccagggtagtatagttgtgtggttaaaatttggtttgacatctctggctctgaccagcaacagcatcatctttgctcctaatgaattctaatgaaattgctcaattattaccaggatttaagaaaaacctacctgcatgcatgatctaacctctagaaaggagtccttttgccttctactaatccatttctaatttttctttctgcgaaatgcgatccatcattccatctcatcgatcccaacattttgcaaccgatatacaaaacagtacagtgggaattgtgggaaaggtgagaccaactgtgcagtaaggcgagcagttcggttgcacgctatctgaaacatgttttgtgtgaaggctaggcggttggaactaacatcatatcgctggcaggcagcgtgcgtgcgtgtgtgtgaggatgaacaaagagacgatgcgtgccgcaaaggaaaagcgcatgcaaattgccttcgttttcgcgtcatcccgcccggtgcatggctggcacgcgccgccgtaagcaaagctacgccgagcatgggagtcgccgagctgcggtggcacgtacgtggacctattccaaacaacttcaccgttttgctcttcagcttatcagccgtaattaaaatttaaaattatcagacttaatttaagggttgattttcaatttttttcgtcgttgtttatttttagtttagagcttttaaatcactaaaaacatatataaaacgctttacttatactatatataataaaccttacggtttaaaatctgctgtaggcgaaactatgggaatgaaaaatgtttctcaataactaaaccagccacttgtcactttgatcattcgttcacagatcacaggataagttgactaagttcagaaaaccgactgcaaaatttctcccatggcacgagctctctatctctctgcccccaatttggcgtagaaaagaggtcaaaattacgtagaaagctctttctctgtttctcataagtgagctttgagcttaacgtcgaaacgtccaagtgttcaactctccaagacctcgatgatgctctctgttaagaggccaaaattacacgtcagatgagctgcctagtgtggccgtgtccgtctgcaactctgtttgcttctcccattgggtaaaaacccaattattgatcttgtgtgctcaactgctcatcagaaggtggcatctgactatttgtaccttctgcaaattcatccacttctgctgcccttttcacatctcctaactaattgccgtgtacttacacgctgatgccatttatttcctcagcttcatccacctctcactgacccattacgtacatcaatcatcagatcacacagagatactcctatactcctccagaatgtcagtgtgctacagtacgtgtaatttcagaaacacggattcagcagagtggtttagccaataattgtgcagagtttgcttgcgtgtaatacaaaccaatccaaaatgtgcatcaaaagcttggagttaaaactacctacccatcttcacctaatccccatccttattttacgagtccttctgtactactaccacttaattaccacgagtcattttattcgttatcagtagcaatcaccaacatctcatccgctgttcatctttgactcctgaaagctgaaaaaacatactccgtacagtactctactagttttttctaaaaaaaaaaaaccatatactcgcactggaagcagtaaattgactggaattcctcactccagattacgtgaagaaccgagatatttcacgcagtggatttctcccggtactgatcctatctctgaaccgtactactgcaaagcctgcagagccgtgtctgaattctgacactgacgaggttgcagatatctgaattttttttttgggtgctgaaagctgcggccactacggacactgatggttacgtgaggccgccggcgccgaagctgaatatatgcagatgtggccgtgcccttactaatggcactttaataaccagccgcactgttagaaagaagcaagcaggacagtgctggctctaactcttaactaactgaattaacttcacatgtgactttgcactaccgtatcttatcttccatgaaagtttttgcaagtgtagtttccagtgctggacgatttaagcctttcagaagatcagatgctgcatgtcaaatatggtaacatggtgtccatctccgtacatttttctcatgcagaaaaaaagaatgaaaagaagaatgaaagaaaggaacattgcgtgcatagggatcaaacattgctgcatgctgagatgagatggatcctgtagatgtagctagcaatggacaggtaaaatttggccatcacagtgtttgatgcttgatctgatctgatctgatccgatctgcttctccagaatgcaccagccgtttgcatggacgcgtctctgtaaccaggtgccagccaagtcactactgtcaagagtcagcatctgtaattctcctcttctctgatctgtccctccctgtggcctgcgtgcgtctctccatccccttcatcacctctctgtctcgcctccacgaccccgttcttttcggctacttcacagttattgttacgggttactcatttcacgtctctaaaaactcatcttctaaaaaaatagagaacatttttaattgtttatatcatatcgcttgttataagttatccgcttactatatttaatttatatttataattgtatagttaatctgctataataatttggtcaataatctgttgtagttttggtcgtgaaaacgggagaaatcgcaacttataattgtatatagataattcactattgggacgcaggctattcatctaatttctctaaaaattcctttttttctaaaagaaaagaataatccttttactgcacaacatcacttatcctaagttatcagttattaaaatatttaattatttactatcataattcagtggataatctgtttcaagcaggtcgtgacaacgagagaaagcaaacagccaatagctcggccgcgggcgtccctttctcgtgcatggctgcaacctgacggggaacggaaacgccgagcacttccgcgcgcggcgtggaaggaagccgcgcgcgcgcgcgtgcgacttggcgaggggagagccacatgtgtgcgtgaggagacagttaggcaaagctgggcacttaacagtgctgacactgccgtgtgctttgacactttgacagtgaaatccccttgagtttagttcttttgctcgtctcccggtggcatcattgctgtgctgggggctcaaaaaggagagagagatggagagggtgactgtgactctaggttacaccttcaccttggttaaccttgtaaacttgttttgtttagatttaaccatggttgcaaaaaataggggtatttgcttttccacttgcaagcttgcgtgaggaatccttttatttaggtttaaccatggttgcggaaattgggtgtgttccttttccaccggcaagtcgtgtatgcgtgcagaatcttttgtatttaggtttaactattgttgcggaaattggaggtgtttcctttcacactggcagacgtgcatgcgagatcttatgaccgtgataatttgataccataacgtttaatttgggcggaggtgcttcttgtgcttcttacttaattacgagctcattttcggattcgtcctcgatttatcaagaagggtcaattaaaacatgcactaatgtttaataagatttaaccacggttttttaaattggaagttttagggttggtttggtttgtggtcaaatagacattaccaaattttgtcagtgcaaattttagtaagttttggcatgactaattttattaaggcaaagttgtgtttggattgaagctaaaatagcctaagttcattattgaaatgacatattttcttaggcatgtcaaaatttagcttcaaaccaaatagacactaaacactattgaaattatcaaatattggtaagcctaatttaggtctcaaaccaaaccagcccttacttttcggctagtagacatacgagtgatatatctcttaactatgatatataccacactacgagtatttagggggtggtacagaaaatcaacaactcagttcgccatcaattgtagagaatcagaagctgagccaaatgtcccccgtccacattgccgaacaaacataaacaaagtgccattaatagatcctttaagcgcactgcataaccttcttggtgcctatatcaggggtacgacaattagccaatgtaaatgtagaaacaagatatgatatattgttaggaatattagaacaaaccagatgccatcttttgcttaatggggatgcagaaacttgaatctcgtctatgtcaggtaaagggggtgacctgaagcaaaacactttgttttttaggtcatcccgaacacttgcacgtatataagaacccctagttatgtttccatccttccaaacatccttcaagaaaaataatataggtttcttgcacaatgatttctgaatatccttagtgtcaaaatcaaattcagttcgctgactcatcctattatatgcaatgtaagtccgctcggatcgctccaattcacgaggaagaagaacataggggtacacttgaacaacataacccaaagagactgcaaatgtatacttctgccttttatcataacaaatcgagcgctgcaagaagctcatgggttctgttttcatagcctttgtaaagagctccaaactctcaagagagttcaaaccagggtatataggatcgacaagctccagatggtggatactgatgaaaggagcaattggatgagcagccaatataccatgggcattgcctctgatatcccactgattacaatgcaaagggacaaaagtaagattaagagagtagagtttagttctccatacacacgattaataaaaaaaagtaaatatgacttgttaatgtgcaaacagaaaaaagaacttgctaatcacttattatcatattttcaaacacatgcagcatgctggtacctatttgacagaaattacaatagtactataaagcaagcaggcaagttcttgcaaaaacttctgctggccataaaagagcccaaagaaaggtaacattcaagtactaccaaacttcctttcactatcaatctaacataaccactctggcaagaccctactactattgttcatgtattctgattgaacatataacagccagctaggttggcacaacagcagacaggctacacttcctttctgccataatgaatcaagcatcacagaaatggtaaggttccaaagagtggatcaatatgcatgcctcccaagatctaacgcaaattctaaattgggctagttcattagcaatcccccgaatttccgtgagcatagacagcatgctatttcgcactaaattcatgcatgggatcaggagagagtggatagtccctgaattcaagtcactgtgtcactggtaactagtctatcagcagatcgtacaaagcagaacagaataagtgctccaattgctgaggcgaataacatttcataagaccactcaataatctaagcgctgttaatacccaacccacatttctgttgaatggccacaaaatgttgaaaaataagctcatacctgatggaatccgtactcgcgggagaggggcactccgagctcggtgatgcaagcatggaggcgatcgtcacttccgtacagcttggggtacctctcgatgcagacgtcgagcgtccgcgcgagcgccgtggcgagggggaggctgagcgcgacgccgccgcccccgaacgccatactgtggctgaagtaggtgttcgccgagtggctctccgacggcgcgccgacgtacaccatctccctccagtcgtacttcccgagcacggccaccaggttgtccgcggacaccacggtgtcgtcgtccacgagcaccacccaccgcgcgcccccgccgccgccgcccacgagccgcacggcctcggcggcgatgcgcgcgatccggaggcccgaggggtggcccgtggggttcgtgtaccggaaccgcgacgtgtcctccgacacccggatcggcgggaggagggacccctccccggacgcgctcggccccggcgccgtgggcgccccggcgtcgagccacacgtgcccgcgcatggcggccgggtcccaccacatccggacgtactcccggcggcgcggccagaggtgcgcggagcccgcgatcccgaacacgatgtggccgagcgacagcggggcctccgcgccctccccgccgcctccgcctcctccgcccgccaccgcaaacgcctccgcgtccgccgcatccgacagccccgcggctgggcccctcgcgtgggacgccggggacagcacgaggaggacccacagcgccgtggcgaggagcacggagaggagcgccaggaccgcggtcgcgagcgggcagttccgcggcgggagcgggagcgggagcgggagcggcggcggcggcggaggctgcgcggcgtggtggggcttgcgcattgggcacgcgagaggacgacgccgccgccggtggcgacggacattgaaggggggtggcggggacgtggcgatgttttagggatgggcggtgcggagacacgaaccggtgggtggtctcactcacctgcggttgtaataccaacaagccacattcgaattttcattttttttaaaaaaaaacacggtataaacagaggttcacaacacacgcacacttacccatgtaaacatacacacgcacactctacacctatgaatacttatgaaaaactgatccagcatatattatgattgacggagttatcatgggtgtttcgctgatgatggatgtgtcgtctaccgttaaaagaataagaccctgtttagatgggactaaaacttttaagtccctatcacatcgaatgtttggacactaattataaatattaaacgtagactattaataaaacccatccataatcttggactaattcgcgagacgaatcatttaagcctaattaatctatgattagcctatgtgatgctacagtaaatattccctaattatggattaattaggcttaaaaaaattgtctcgtaaattagctttcatttatgtaattagttttgtaagtagcctatatttaatactctaaattagtgtctaactatagagactaaagttaagttcctggatccaaccaccacctaattaggtgtaaatgggagtaaatcttcgttcggtgtggggtattttaaatatatttatttgaatttgaatacagattcactcacccatgttagcggtttgaaacctgcacgtggaggaggatggtgggctttgagtgtttagtggtagaccactgttctacgaaatagttttgacttgtagtgtatgtgcatcatatgcttttttaaaaaagaatatctttgtgtggcgatctatacattaagctattaggatgcttactaatgtcctgccatgtgtttagaacttgtgatcaaaggaatttcattttcattcttttgggaccttgtagaacatattctgtgatccatcccatcaatcattgttcctatgttgtgattactcctatactctgcttaactgtactcctatactctgcttaactgtggccatgtttagtttcttggctaatttttttaagtatattcggatacatatttatatttaaagtattaaatataatctaataataaaataaattatagattccgcctgtaaactacaagacgaatttattaagtctaattaatccgtcattagtaaatatttactgtagcattacattgtcaaataatgacgtaattaggctcaaaagatttgtctcgtaatttacatgcaaactgtgcaattggttttttttcgtccacatttaatgctctgtgcatgtgttcaaacattcgatgtgacatttttggaaaaaaaaattgaatctaaataaggcctgtttttgtttggtcaatactgctttaatggtgatacaagtgtcatctgaaacaaatgtgcaaaaggcgtatgagcagtttgatagtataatctgcttcatccatggcttcttttttggcggtatttttcaatttggaggtttaatgtcagccaaccatgtctatttttgttctcctgttttttgtgaggaattcctatcttttatttgaggaccatagcatccatatcttgataaactttattcctctattcaagtatgccacgtgtccaaacatcaccacaagaaggacaaaatagttgcctttgcacaaaccacatggagaggagaaaagggaaaataattgtgactcaaattcttggagcattgggggctgtaggctgtaattctagccattcacataggatagatgccaaaactcatgtaagagcaggtacaatagcaagctataaactagctataaatatattttaaagagataaagaagagagagaagagtagcgggctacagatctgtagctagctacagcatggactcaaaaacataacgtatatattacaggtgagactatgcattaatagtatatagtaagcaactattatatgaattggctactatattggctgtacatgatttggagctagtagtgagctatactattagacttgctctaaagcatacaacacctaactacttttttgcatgtacctaaaatgtttggatatgtatcctaaggctcatatgcaccatttaaaagaggctttaacaccaaactaataaaaagttaatacgccatttaagggtcacaggtaaaaagattcttctgagaaggtctaaaacgagtattttctaatgtagtctgggaaggcatagatggaattacaacaataccatcaacattagttgcggatcgagaaaaaaatagtttattggtgttactctaaacttaatatccctcggtacacgatgtcatattttcgttttataggccatttaacaatggattttctcggagttcatcgggtctattgatccaatagatctaatttacatctcctccttctcgagggtagtagaataaaagactttggattttgatcaacaatgaaaatgcacaaaactcctagatatctcaaaaatggattgagatccagtgcagttgttattgctactgcgcataatctgatccctctatttcttgatccaatgatccaaatcgtttgctacagtgaatcagcactagttcttgcagcaacgctacagtactttgctacagtattctaatgcatctgggccatatgtttcaaatctagtggtgctggtgtgactgtgtaacttgcagtcacaatatcacactagctactgcacctgaaccgaatccctccaaaatctatctgaagcggtgtggaatggacacacaatttataatgaaaagtctgatgggcaaacgcgctcaccacatactccctccgtttcatattataagactttctagcattacccacattcatatggatattaatgaatctatacatatatacatacatacatacatacttttatatatatatatatatatatatatatatatatatatatatatatatatatatatatatatatatatatatatat

SEQ ID NO: 4658 - DNA, 25747 bp, Oryza sativa
ctcctcaaggatcgtaaaattgctcatattagattgtgcaaaaaaatagttgatcaattaatctctaaagcatcatcctttcacttatgcttatataagccaaactttaaaatttaaaacttagttttaaagttgattttgttggtttttcatcatagtttattttacagcacatgcttttaaatctctaaggacagtatgtataaaaattttatccacattatttttcaatggctgataagcaatacggataaacacgaagtataagcgaaacaatggggccgctagtctctaatgaatatgatgataactgtacacttgtaaattttacaaaaattctttcaacacagttcacctgaagactatatttatattgaaaattttcaagcgtctatgtatcattttgtcaacaatatttggtgactaattatcatcactatgatagaaaaagaatatatccaaaatatactgcaaacaaagtcaaccacataggagaaaaaaaagagaacaataatgttgcatttttgtagaatatcttattagatgacacaaactcatgatctccaggacaatgaaatggcatgcatatgccttgatcaggctgctagcttgtctggatcacagtattaaacagataactaaatgaacatgatgaatcatcaaacaaatgcatagtctttttcaatatttattatcttactcctatatacatagaacatgcaccacattttatatagtagtacatggaacactctatcttcagtgctatatgtcgggtttgctatcctggtttgtttttgactttacatagtagcttttatcggtgtgctggttaggtacatgtgtgaagagggacatcaggaagcaaaagagaagagaaaattgaaaatgcttccaattttgtggcaggtagtacaaatgttttatcaagaaaatataccgcctgcaaaaaaaaaaaatcttcggaaggaacccaaagtgaatgatttgagatcacgcaatactcatttcattctgttggttggctaattagttatagatgctttgtgccttcgttgacacactcatatgccaatcaagcaaataaacaagtttatttccaagtccaaataggaatgcacacatataggaaatttagcattcggccggtggtcttcacgttagatgatgccattcaattaaccagggacgacctttcaaatagagtcatcgcctcattggtgtagttacgtaccctttgcatgtttctagttacacactcagtaatccgtttttaacgaaaaggccggatttcacacccaatcgattgaactatttttattaatgccacacaatgtctgaaaatgacacccattgattgtgttgttagtagcactgtggactaaaataagatataaacagtcatgtcccgtgagtacgtaccatccgcttaattgccgtgaatagtggttaaatgtatacaaaactctatcatgtttgcacaggatatgattaatcaaccaaccacattttcttgttaggttatataggggcatgtcattgactaattaagatgtgttaaagtaatcaccaaaacagcatttgatatagtaggtgtggcggtatattaatcctttttgtcttcattaaaatttgatggattttatacaaaaccaaatttgacaactagataggtagaacatacatgtacatgcttgcatgtcggtgcaaacaaaaaaaaacaaacaaacaaaggcgtgcagatgaggaggtatcatccatcctagggtgacaaaccggtaaagagaaaaagggcatccttcctagtgcaagaaaaggtgatgttaaaatgattgggtcgcagctcaaatgataagaacaaagagaagcgtttggaagcggcacaagtatgcaaaactaaattattaatagcttaatatgccgcctgatagcgacatcatgatgtgctagtttcttttgatctgttgcgtatattattgtttttttatctctctatctcttttcattttattatattagtgtaaccgcacagaagagaggaaaaaaaaaacctgtaaagttgcggcgattccagggaccttttccagtgcagcacggctgaaacaaataaaaagataggaaaataattaaaaaaaagggttccctccaacgtcgggatgagctctgtgtgtcgtgttctgtggtgtcagtgtcgcacaaagctgcaatgctaacttagttatatatgcatgcatggctgctgtgtgcaccaagaatttaccaaaagaagcctcaccaacgtgtatttcaaattaccctttaaaggccctgccgcagggatacctgggactttttaatatcccaaatgtttaaaaaaaactctaattaactactttattatgtaaaaaaaatatcaaagttaaagctgattgcaatagttcaactggaacatatacctagctattgtgataaaaaaattctagagtagattatattacaacatgttgtatataaatttgcgaattaattaggaaaacaaagcacctgatggattacctgaacaattctttttagccaggggtgtgaccatttctttaagaaaattaaataatgtgagctctgtcaaccaatgaaagggtttaataaggcaaaccttgtctggcatgactaatcaaaccagttaaacagggagatgcgtccaaatggccccttgctatatatgtgaaccatggtccagccggcggctcccactgtgcacgccggtgagccgcggcgatcgatgatggtccaaacggaaacccatacattatcatggtcccgtacgtgttgctggagagacgatctgaaattagacatctttttcccttgtcctcttcaagcttggatgcataggagagataactaattaagcagatccatcgatccttgagagataaaccacatgtatatctagttagcttgtgttgtccatctggaccaccaagtcatcaggtttggttagccacaaaaccttgcgtaaatccatccgatcgggtcacatgccgaggcgtgagcctgaagctcgttgaatcattagtacttgcccctgaagaaacagcttcgatctaatcggcagatcagaggctggatgcatgcttggattccttccctgtcttttaacaaagacgaattaaaacccagtatgttaacagactccgtgagagttaatgacagattagcactgaccttattcgatgaaaaggaaccttctttcttcagagaaaagcttgaactggctttagcctgtgcaaggggtaggaccatttctgttacagcaacaatccaagattgttgtgtccaggatggagctgtcaatggctcgagatgttaatcctgccaactgttttcccctttccataatcccttgtgtggtgtgcatctgtacaaagctagctaaatggtgcacttccattaaccttttagcagcacctacccaacaagtgaagctaggaccaactgttgacaacaatacttcaacgaccacaatgaaagatagccggccaatttggttgtccctgtgagcacttgtacgccataatacaggttccttgatgccgtcagattatagatgcatgtactcaaatacgcatcatctgtaaacaggaaaagaccgtgagtgtaactgaagatagcaatcttgtaaaaaaaaaagtgtaataatacgtcagagatttcaaatactgatatcagattgataccacttgattggcgaggaaaatgaagtgctggaatctgggccaggatttaagtaaaagcagataaaagtcacaagcatatctgggcaggactaaaatcatatattccaacttgcatatcggcttccagtgtcccaaggtatttttatcttgggcatctcatccatactcaaataagagcctgacccatgtgataatcagaactactagtttccttctcattaggttaaagtgccaacatttcgcttgtacatcatggttccagcaaagattccctacagtttcacaaaaggtaccatcacctaaagcacacacttgagtgttactgtcattacagggcagtacaaagtgaccaaaccacaaaagaatttatcagtcagaagtccatttcaccttaatgtgctcaattacatgtagaattgccaccgttgctctggttgtcttgtctcatgattaggcgagcgcaccgatgctgtagtgcactaggaaactctttctgatatccgttagtgttaggtggtgaaaaaactttatttacagcgtgcaaaatccttcttccatgaccatagcacacatggcaccccagcaatccatctggttccagtaagaaataacagaatggtacaatgggaaaaatacttaaactttaaagctgattacttggtagaaatcaaggaatcagattttattcactttgtcaaaataccagctaaaaaatatcacatatgagggaatgaattctcttccatgtcccctacagggatgaccgccaattgaaatcggatctataaaagtaaaacggaaaaggaaaaaatagtaaagcttccatttcttttggtttctaatattggtaggaaaagggtaagtaatgtaaagtagaagtgggggaattgtgagttgttgatagttattcccatgccagaggagtccagccaagaacgaaagctatacacaaatactcactaggcaacatggagagacatggctcccatgttatcccgtgcaacccctgttccccacttgtgccctcccgttgcacatggcctcataaccaacccttcctcccctcctctcctatagttaacattgccatgggaccccattcctatacagaacaattatcaccaccttccttttcccaactcctctgtaccctagacttctgcattggaacagtgctctgttctaagcattgtatagcaatatctctaccactataaaatcaattcatgaggtgaatctgattgcaaacttttatgaattattgcatggactaaatagtcttgttataaacaggaaccaagctaaggataaagaaattcatgcaatttaatatacagatgctaaaaatgcctaacgcttaattgtgagattaaggggatctttataatgagcatctgtaccatatacagtacttcagctcagttagtcacagctactgtagaagataaatattcgaaattggtggagtcccagttctttcgaaaaggacatgttttatcattttactttcatgtccatctacactatctttcgttgtcagcccaatcttggaggtgtgtcataatatcatctactaagatatgacaaaagtattcgggctagcgggccaggtggttaattagataatcacaggggaggctttagagcccataaggaattgcacgctacagtaggaactgcaataaagaatcccaatatattgaaacgttactgttgactgataggaacatatgagcataaaaattcctgtaactttccagccatacaagtgggttggcctttgaggggtcattttcacagaccatacttacaattgccacaactttgatagagatattgtaaactagaagttagataaggagtctgccgcttacatattaaccattaaaggaaatctttagattatcaccgcatagcccaaaataggaagattctcaccaagttgggcctcatcaattgatatgccggagttctgataagagtcacgcagctactcgaacagcaaatgccagtgtaagattcttcacctgaaataaacatttggacagaaactgatgtagtatagatatcaatagaacagatgaaactcaaaggattattccaaataagtcatcgaatcacatatcatcaattcttatatatataattacccacagggggtaaagaaaaaaaggaaaaagaacagaatcagaggaatcagtgatcaaaatagctccacatatttccttgtttcttttaggactaactggcttacaaatgaataataaatatatggaagtcattgttgtatagagttgttatgtattgaagcatgtagaaataagttcaatattactagtttgggtcccacatataaagtataaaacaaactgaaaaaactatgttagcttgagtttcacacggtaatcctccttatcatattttacacacgtcacatcaaataaattattattgcttcaccagacataacttgcagtatatgctaaagcctactttaaacaataatgaaacaaacttacatgcccttaacaacttgactactgacctaaataacgtttacatgatgacagtgcaagctggatgtgatgcatgaaagattgttcaaaaacaaaataatcattcacttacatcgatgctgtcaatcactatcctagtcaaacttaacattttgaagggtttattcagaggctatcattattataaagcctaagagtatatgaaaatcagggaagattcatctccccattcagcccttcagggaatatgacttctgtcatgcaaccctgacaggttattgttactgcaaaaagtactgaactccaatatcttttatttcccttgaaattatttgacccctgtatttcactttctatttgatggaaactatttcgttgagttcacaatagtaggagccaaaacaaaaatctattgcacagcagctgtaagtgtaaagcatagcactactagatctgtgaagtcaactgccgggaaccatagagaactcaaaatcaagtgattgtgtattggagaggtagacagtggaatacttacagaatgtctgaaacgacaatgctgggacatcacttatctaataaatgaacaaaagatagctatgaccaagtgaggcactgcaataagggggtaataatcgataaaaactttgaagagagagccgattgtaccaatcaaagtacgatgcaaacataactattcctttcactcgatttcgcagaatccctctataaaattcccttgccaactccaagcactacttgtgcagttctgcccatgcccagccatcaactaggatcgtgttagggttaatcactacatgaagtgaataaaaaaaatatcaactgaccttattgggtaaaattttacaggcctagcgccctacctctcaaattaacatctagtgaaactgaataatagataaacagaggcacaaagtgagtactggttactggtaagggaaggggcgtcacatcgccactacagtgctcgcggctggtctcctccccctccgaatcgaaccgagcagcgccggcgaggaggagccgccttcccccaacccggcaaccccccgaacccaacggtgcagaaggggtcggcggccggagcggagccgacgcggcggttgaagggagtagccgagttaggaggaggagctcaccgccgtgccgagagtgggtgcacgcacgccgcgccccgccggccggcttgttcggccggccgccgctccgcgcgacgcggcacggcgaaggcgctcgcctcgctccgtccgtccccacgagcagaggcttcagcgggccgtgtgcttcgtcacgggcccaacagcaagaagctcagctggagaagcagcccgtgtagatgggcccgtccggttaccgttgattggcctcagtggtgaaggagcccgtgtagatggatcttcggcgtgggggaaaaaggccgaaatgtcacgggaaccaactacgggaggccgtgggccgcatccattaggataagcgggctagatctatccatgcgactagcgggcatcaattcgctgcggaaaatgtctaatttttcttaggttggatctaattcgtcttttaaccataaaatcagatataataacccctctaactattaagagagttgaaaaagatttctaagatagtattgcgggaagaggagagagatatggggaggagggaggaaggagaaaggaaggagggtaagcgagaatgacatgtgagttccacttgatatcctaacatccttgttggcttggtgtttttgaccgtggttaatttgccacgttagctaatgccattctaaatactccctccgtatctaaatataagagattttagtcggatataatatatcctggtataatgattcgttatattaggatgtgttattttcaaccaatatcccttatatttatagagacagatggagtagtgtcttataagtttttttttccggttttaacggttagtagagttgttgtatccagcagctttacgatcgagaaatacggcctatatttaagggagttacaatagacattttccattcggcaagtcagaggttgacacgacgacgacgcgagtcacacgacgcgacagccttcaccgacgcacatggccgtccagctcgggcgcatcacggggcacgccgcacgcggcccactccgtaccggccgcgccatggattccacgcggtggccgcactccgtcccgtgcgggcgtgcggcccatgctgccatggcatccaatccgatgcaatccaaccgacatctccgcggccgcatcgcccgctcccgtcaccgacgcaacccacggtccaaagtccacagacttcaccgccgctgttaccgcgatcccgggctcctccccacagctgtcgtcgcgtcaacccattatccttcaccgccacactcgctgacaggtgggtccacgtcgccgacccgcaccacatggcccacgaggcagtcaccctacgatgtgtggcagtgaccctatgcaggcggtgccttatatttagcgcacaggaaacccatgagaaatccaaggtcatcaccaccttcttcctcctcttcatttgccatctttagtaccacctcgccttcccaatccaatctcgccgcccattaaggcccgagagcccccattccgccagatccatgacggtctcgtcgccgtcggcggaggagccgttccgggtgttcgtcggctacgacccgcgggaggacgaggcgtacgaggtgtgccgccgcagcctgctccgccacgcctccatccccgtcgacgtccgccccatccggcagccggatctccgcgcggcggggctctactggcgggagcgggggcccaccgagagcaccgagttctccttcacccgcttcctcacaccctacctcgccggctaccgcgggtgggcgctcttcgtcgactgcgacttcctctacctcgccgacatcgccggcctcctcgcctgcctcccctcctccgaccccgaccaccgcctcgccgtcgcttgcgtcaagcacgagtacgcccccgccgaggcgaccaagatggacggcgccatccagaccgtgtacccgcgcaagaactggtcgtccatggtgctctacaactgcggccaccccaagaacgtcgccgcgctcaccccggacgccgtcagcacccagaccggcgccttcctccaccgattcgcctggctcgatgacgacgagatcggcgagatccccttcgcctggaacttcctcgtcggccacaacaaggtcgaccccgccgacccgtccacgcagcccaaggccatccactacacctccggcgggccgtggttcgagaggtacaggaactgcgacttcgccgagctctggatcaaggaggccgacgagctcaaggccgacaaggagaagcagaagcagcagcagatcgtcatggccaacggcgagaaggagaaagacgaggaggggaattgaatcgaatccaattgaattcattgtgccgcattgcgttgcaattttgcatcgaattggttcaaatctgttgtttattgggttggggttgggtggtaggctatgagtggatagctctagtattggtagtagtacgcttttgtgtagcggcaaatcaatctatctatgagtcctcaatgttcaggaattttaattcttttggcctttgatcaattgaccatgtacctgtttttgctgtttctgaatactgatcatactggctagccttctctaatgctggaattgagaaatcaggttgggtctcgagtgtcccgtgagggaatgaaatgtgatcattttccttttgcagtgaagattttgtgcccatttcatcagtttgcaggtagcattatgttcatatgttgatgtctgcattcaaccgattcaggagattggattttcatttggtgatctgaacctcagaatgttccgtacagccgatacagataatctgaagagataccttcgttttatatatctgttactactaattaaattaaagctcagtgacagatcacagatgcatgttctttggagattggacaagaccagcttaaaatgtgtcctgtcatccgtacattgtactcctaatcacgtgtagtgtacacaatacagtactactattagatctcagtgatcactgcagtgttctggtgatcactgtattctggtcgcctgaattttctctcttgataagagaatccaaagctgactgaggtggtgtttgggtgggagggactaaataagtcattatcacatcggatgtttggacactaattataaatattaaacgtagactattaataaaatccatccataatcttgaactaattcacgagacgaatctattgagcctaattaatccgtgattagcctatgtgatgctacagtaaatattatctaattatggattaattaggcttaaaaaatttatctcgcaaattagcttttatttatgtaattagttttgtaagtagtctatatttaatactctaaattagtgtctaaatatagagaataaagttaagtccctggatccaaacatcacctaaactttagtccttcacaaaaaacataagggggtgtttgggagagaggggctaaactttagctatctcttaagtattcagtccaaggatgcaagcaaagcatcatgctggatggattgctgaacaatttatcccattgatcaatgcctttctcaacatgttgtgaacttgtgatctgaaagcaaagtatctggtctctctgaactctgaagcttggaaccagcagcaattggtgtcagtagtcagcaactgtgtactgaaacgttgggtttgctgttttgagcccactgtaatgcatgtgcacatgtcttggctgtaagctgaatactgaattcgttgcaaaatgccgtatggatcacagaaagcacagccagaatggatcagtacattggttcctgcctgagaatggttggaatctgatgagttgcttgaattcctgaaatgtggttccaaacaacgtgtgtaaatttccattcagaaataccacatgtaaacttcaatagaggaattgatcattgtgagctggttgcatctttgaggctaaaacacattatgttcatcgataaagtacctcaaaccttgaaaccttgaagagtggagttgaggcatccggacagcagaggaagagcgtgttgcagctgaagactgaggagcaaatgaaagatagcggcggcggaggccaatcgtcttctccgcggccggtggatgtcgccgccgcccaccggcttccaatcgagtcgccgcgctgatcgatggagcaaaaactctcaattccatttccggagtaacaagtacgggccgcacgtagcccgcactcccttttcggcccaattactatataggccgcacgtgttgcatcccaacaaatgggccaaaagtaattcgcaatccagtccggaccgacagagttggacgtggccagcgaagtgggccttgtgggccatcgcatcgcaccactgcattttatggtttgtaacaggaaaatatgttgcaactttgacggcatttaaatttcttcaaaacaagaatattttgaaactacactgaacaaaagtcactgtgaaattatctagtcctgatgtagtctgtctgtgattttgtcatgtatttccttttttcctttggtatactttggaacgaccaattgacaagtataggttgaattcacattgaccagaagaaatataccatacattatttcatgatgtcctctatacatgatgataatttattgcctttcggttaatgttttcatggtatcaggcagtattttgctatcgtctacattactgtgtaccctggaccgcctccaccttctggaacggtccattcgatgttttgctttggatctttgatgtcacaagcctgcagataccgtcaacatttcattcagttacaggaaacaaaagatgcaaatgtccatggacaactgaatcaacatggaggcaaataccttgcaatgaagacaattttgagcatttatgtgaagcttctggtcacctttctcgtcggtgacatacctgcatgagaacatgtatggcagaagtgattagcaatccttgtttgggcattcagtacttaattgtaggttatctttcattcaagtaagaaaggccaatttccttactcgtaaactcgagctggacaataatgtgactctggtccagcatacagaggaagatttactctctccggtactgtaggatccctcaaacggagatgaggaggttgatcatgctcatggtttgtgctgctcctgtataaatgagatcatacatgatcagtgtacagaatatgcatgtaaatcactccacattacatttcagttcatgaaaaaaaaatggagaacgatagccattcacccactaaatttgatgaatctgccgccactatactacatgtgactattaagaaaaagctctaaaccaattcacaggaaagcactattgcttctaaaaattgtgaacataacttgaaactttgaaagaaagaattctaaagagtgatgtctaaagagtgatggacgtcatcattcttgctgcatatcttacctgtataaagaagttggtacgtcaaaggatatttgaccatctggtttcggatattgaataggcgagtgcaaactggccatctgttcacaagaatgtgtttggttaatgtcagtagtgaaaaaatgaaacaatgtgcttttcatttatgctaacaaagaatgtctatattagatgagcaccagcagtacttgaaactcacatctgttgcttcatggtcaggtatcccgtgctttaaggtaaagggggactttcctttgaatacgtatctaaaaattgaacaataacaacaaacgtcagcgaaccaagtagagtattgacttcatcccaaaagaagtatagaatattaagtaatattaacaaattagttgggcctcaccgttccagtgcagacaaggcaatgcctggaataaatccatattcaaatgcctgtaacagaatataaataaatctgtctgctcaatagcttcagaaaggaaaaaacagaaactgcatatcctcacttcaaaagcttgtatgacggaatacttaattagacaaaataaatgttcaggaagtctgtaacaaacataatcacatactggtctgtaattccgagctctataaagctcttcccatatccatgacttcttgagattctcccaatagagttccatcgaagatccttcaacaagagttttgaaagttgcttctgcagccagcatacctgttgtacacatccaaccctttagtacatggcttctcagcatactctacagttagcacacatgatctaccatttttggttgagaataatgtgccactttaaggagatcaaaatgtgtactctgaaagaaatgtaaagtaattgacataaaagtgaacaggcagcactacaacataaagctcaaagcatcacgtaaagagatacctgacttcatggctgtatgagttccttttattttgggaacattaaggaaccctgcagagcatccaataattgcacctccagggaaaactggatttggtattgactgaaattttacatgaacattatcagcaccctatcagtaactattgctaacaactaaagaaaacaaaatacaggagacctgactgaatgacggaggtaaaagctacagtgtcgaaacatatagcataacaagaacactataacaatgctgtgtctcaaagttcatgtaccagttaaccggaaacaccaggtgaattgattttgatgtaaaatgcttgtaatgtcataaaccggcagatgcccaatatagttatgcgcagagtttacatatcatatgaatctatttacaacaaaattttcatttctttgacatgccacttacttgaaaaccaccttcattcaacgtacgagcaccatactgaagaactgttccaccatccaaaattgtcctgacagcagggtgttgcttgaatttctgaaatataaaatatgattgcataatgcttagaagaaaaaaaatcgaccatcaggagttcaggactatactagtacactaccatcataaaagaacatacccatagaaatttgactaacctggaattcatcgtatgggctcatgaaaggattttgatagttcaaggcaacaaccagacctatcgctaactgaaatatcagagcagagataaagtaaacaccactaagcgataaagtaatcaaaatttccggggaaaaaactgagcaagttatacatttatccactctgcaaacaaaaggccttatgataagggatgaattaatggttcctcctttaaacccaaattataatctgtaagctgtgaacttaggttgtggagaaggatgcatctatcatgtaagataaatacatttttacatctttacacagatgacagacttcactgaacatatatttgcaaaagaaaagagaactcataaagggatattgtagcaaataacagaagaactacctgtctatcatcaaggtgatacataaatgatcctccatatgttttcgagtccaaaggccaccctacagtatgaatcacagaacctggcttgtgctttccttcctcgatctcccaaacctaagaaagcttccaattagtttcaagtggcactgctaactcgtctgtaagtcattttaaggaaaagaatggagatgttttgaagataaagctagtaaatcatagttctataaggaacaaacgaaagcatctaatggaattcctcaaaaataaccataagttctttattagaaaatatttttgaagtgtttgtgcatgggtgattttgaaaatgttaacataaaagagtgttacctatagtttgcatatattgcatgtataatgtggtatgggactgatttaagtcagacgattttcacacatacacacacacacacacacacaaaggatcttgttttcctcacgagatatatgagttggtttgataagatttgagaacaaggcatttggaaactgaaagtggtattactgaatatcaaggtacctccttaattccaagagcatatgtctgatgctggccttgcccactctctctgagcttgtggttccttattattttctggaaagagaaagagggaagaataacatgataagtgttagcaccaaatgaaatatatatataaaaaagaacatatgaatttcataaaactagatttatgctgacctctgataatgaacctcggcaaccctcggccaacagtgtcattcgccctgcattttctaagtagctgaccatgagaatagacacgtgagtggaaccaccagcttggaacaaatgggtaccaattttacagaaagaacaacgtcaacagactgaaaaggttttaaagacaaacaatagggaaaacaaaatcactattatctgcctatacaaacaacggaaaaaaaaggagcaattgattatctcaacattatgcactcaataaggatggttactcgcctcttagttcaacaccaggttgaaaagtttcccttttggaaccatctttagcaataccaacatcattggttgcaacgcctgtaactatttgattttcatcataaaggatctgttagagaagaattcagacagattaatattagccctttgacagaagagttccacaactgaaaaatggtggtacctcactcgcagcaaaacctggatatacttcaacacccaattcttcagctttggaggccatccatcgcaccatttggctcaagctggacaatattaagcattgtttctaaaatcagatactgtcgaataagtgaaatatactagaactttgcatagatgaagctaataattagaagaaaatctcagcaccttatcacatagtttcccttgttatcgaaaggagatggaagtgtccatgccttattctttgtcaacagccagaacttgtcagatgagacggggactcttattggggtctatcaaacacacagtaggcacataaatatcaatgccttatgtacttagaactaaatttactttgttactgaagtgtattttgctatcattattcaaggaactgccatatcaaaaggaccaggtcttattcattgggaatttgggacatctcatgatgcaattgttagtttgaaactgttactgagcatcaactaattaaatttcgcccccccccccccccaaaaaaaaaataaataaataattattattattatatatcgtttatttctgtgcatttgccctacgcaaagcaaaattagggagctgaaacatcctcatacaccaaaatatccatgatttcccatgatcaaatgaacctcaggcttctgatgaagggatcaaccatagttaatttgcacttggtctagagtctagacagcagaatggccaactaaaacatacttatatagcatatccagtttagagcagagaagggcatacatcctcttgcctccacttcgggatgagttcatccaacgctcgtggctcgaacacgttccccgacaatacatgcgcacctgcagcgagagcaagcaaaatcaaacaaacgccaaattacacgagcaggagtagagtaacgccatcgcgcactggcgtgctaagacgcaagcaaccggaccgaagggggaaccgattccggaggaagacacgcaccgacttcggagcccttctcgaggacgcagacggagaggtcggtgtcggcgtcgcggcagagctgcttcagccggatggccgcggcgagccccgcgggcccagcccccacgaccaccacgtcgtagctcatcgcctccctgcccccgctcagccacctcgccgccgccgccgccgcgccccacctcggcgcgcggtggcccgacgcgtggccaatccccgccgccgccgcgcggagcactcgttgcattgccgcgggaagcttcccgatcccgagccgaaagggaggaaggagaaggccgggaaggtacggaactgtggaggaatgggagtggcagttgagctccgcgacgggacggcgatgggattaggtcgctgaggtggaagaagacgaggacgaacagtattcctttttttttaattgaaaactaatactccctccgtcacaatataagggattttgagtttttgattgcaacgtttaaccacttgtcttattcaattttttttacaaatataaaaaatgaaaagttgtgcttaaattactgtagataataaagtaagtcacaaataaaataaataataattttaaatttttttaaataagacgagtggtcaaacgttgcaagtaaaaatctaaaatcccttatattacgggacagagagagtaataataattcgctctgttcatgggctgtttccgggctagctttatgggcctttgaacacttctactagtttttgggccttacataaatgggccgttacatggtgatgcaggctggagtttgggcccatcgaacaaggagcatggtattgctgggcttctttcggcctgccccgctgttcaaggatttaacctcgattttgctattacatccatcatcgaacaaaaaacttgtcaagaataaatatagtataattatattgtaacttacgtttaactaaagtataacttgtattatattatagttgcatgtaaactacagtgtaattatgctacaattatactatatttagattttacaaagttgtcaacaaatgttagaatataacatagtcattacacaagtacgtggttgtctcgaagaaaaagggagttacaatgttgccatcactggccatagatgatgtatacgtatacacgtcctgtacttgtctctgaacacaagctacgatacccagctagttccagaaaagaaaagcagagaagaacatctgaagcaatgccagaggaagtgccacagcttcaagtcaagctatcctgcttttgcacgagcgtgtagtgttgtgcatagacgacggaaggggataaacgcctgtgatttagccgacaaatcccatttaggacagatgaccaaagctaaactatgctggttgctgccttacaaggaacatccctcctgcctcctgattcctgcacacactgcccggcatctctctctgtctgggtcaacgtacaaatcgttctagttttctactactatatattgtatactactagtatatttgatcaggtaagtgctagagaactgtgtatagctagcacaaaaatgtattataattaggattggtttaatctgtaaatgtgttgcactccaaccaagcacaagtccccatcagaagtttcagagccattagacaaagggttgcaccacactctgagctgcctgcacgtagcttcgtttctgtacttctctatttggatgccaaaccaagacgcttgtcccagttagtaggttcaagcaacaagaacagaaaatagtacatctcttctacgattaatattattcagagtttcggacacataaactggagctaatcagctaatcgcagcagcgtgcaaataatagagagaatctcttatatgccactagaatttaaccagttcccttatatgccatttaaaattggcttctctcttatatgccactagttcaagtttttccacccttttatgccactcccaccactatagtgttagttgactgttagtcaaaggttagttttttcataaatgaccaatatgccctctcaactaaaaaatgtgtaaacttcaaaaaaatcataactaatttattttaaatcctttttggatgaacaaaattttatcagaaccagtgaaaaatgctctttatattaaaaatattgttggaaaactgcatgtttcatgcttacattgaaaatttatttgtgatggtaatggctaaaattgcatgtgatgcataaaaaatcaattttcatatgttgtatccagtatagctatattagtactaaaatacctattattaagggcaaatgagtctttttacaataaagttaacggtcaactgacggtggactgacggtaatggcataaaagggaggagaaacttgaaccggtggcataaaagggagaagccaatttaaagtggcatataaaggagccggttaatttagagtggcatataagggattctctccaaataataatatttggagaacaaggacacgttttcagtaccggtgcgataaacaaattcaagtacaggatcgtagaagatatagcttatggattgcagcgtccgacgacgattcagccgacaaatttgctcgcgccggcgacgctgtccggtggttcgacgaacaggatttctatcgctgaatcctccacacgaacgatctgtaattcgtgcgcccatgcaactccaggggagttgcaaaaattgcaatctcttccagtcaatgacgcaaccagatgcaaaattgtgatcctactaaaacctttttttaaagactatttcaactgatgaaaagtttagaatcacgcatagtttcaaagctgctgttccaatcagtgcatttgaataggagtataggaccccatgggtagtactattttatggctcgttgcgaagctgttgagcttggaagttagatgaacacagtcttgtcagttctgatgtccattttgctcattcgctcctcgcacgtagcttccaagcacactgcaaaactcccccaaaattattatttttcccctctgaatatccatatatccattgcaccaaacgattgaattggtggtacggcaagcaaaagacatggcatatttattgtctctaaattatatatttagtagccgcacgcacggtttaggaagattgttcttgtctgattgattctctagtactcctctagctagtagctcctgttgcacacatctttttctgccttaaaaagttcgatttttttcttcttctgaatgactcgtgaagcttcttgcttgcttcacgctctcgtcttgagcaaataaatttgagtcacatcacatcgctcaaagatgcctatagttttaagtatttaaactctaattaatctgtcgtgttcatgattgattggtggtggcggtgcgattttgggaatgtgatggaatttggaagccatcagagttcagccacgcatggcccagcaggagactgcactgttggtgttaattgtgtgttcttcgtgtcaattggactgaaactaagtgcacactatgttaggacgtcgtcttctacattggaccccaggatgtgtatccctgtgctgctctctccatggacggactccaaatcttcaatccaatatatcgtgatgtgatcgccgcgacgatacgattttatagtgtactacacaagtacacatccgaaaggcgctgcgatgtatgatcagacgatgaaacagcatcaagatcaagccttttttcataaacaaacagctgtcctattcctagatagctatgattaattcccaagaactgcaagatcctgaaggcaccaattaattaatattcagatgataaataaagatggtacaaaactgagaggtgaggggttaagttcttggtgtcagtgagatgtgaatcacaagagagaaaaattgtgacctaaatgaacacattacacatggaatgaaaggctctttgttttgtttctcttacaagttttattaaaaaaaactgttgcctagttgtggaagcaagaactcgagcgctttacggtacattgtcaataattatctagcagctttcacgcattcaggttgttgacatactctctccatcactcatatcagaatctctacattagtatattgtttatctacaagccacaaaatcaaaggcaaacgaactgacgcgtgagtctgaactctaatacgattcagggactagcagtagagcacaagacagtttagtttagcacatgtgatccacacggtgcaattcgccgtggaaagtcaccaaaatgtgacatgtaaactcgcttctgccgttgctttcggagctagtttctttcgtcaccttgcagatcactgttgcaggacagcaatcagtgaccaaatcaggtagccgtgaaaaatgacagtaacctgctgaagaaagctctgaatttcttgtccgggacgctgggtgtaactgcttaaattaatacttggacctaatctcggatgcaaattcttttgtttgcatctttctcacgagagttgaacatagtgatgactaaatctctgaaaaggattcacagacaatctgggaatcaaagaaagccatattttcagtgattcaggacactgactgaaactattttctttgtaggcatgcaattctgtcatcatccatcaccaggaacactgttctgtgttctacacttctactggtagcacttgcaattatatatctcagctagtagctgtttcagagtgaaaaagtctatggcgtcccaaaattcactcatcaagatgcttcactgtgaccatcactttgtccttaaagagcatttggacgtactccattttgcaacacagtgcagattagtgctttgttttgtggtcagtgagccatccgaatcagcaccaaatgattgctcattggcctactcaattagtagtaaggcccaagctgctgctgatgctgctactgttcctgatgacttagcctcagcgactttttgttcccagtacaggtttcttttcttgctgcagcatccgtagcatagcagcaccctcccaagaaccaaacgctgctgattgctgcgtgccaccggatgtttttttctctctaatgctgacaagccaatgcactgttgaaccttgatggtttcgtgatatcggcgcaaggtggacggtccagatcatgcaacgagccatcatccgacggtcccaaaccgagtcaaatgatcaccagtcctctcctcccactgtttttattcacatatatgttttctgaacttttctctgaattgagcttcagtaaaccagaagtgttcattacgagagatcaattgctcactttttcaggtgcagctgtacgtagaagcacacttactcctgcttgaccccagtgactcctacacttgtcacattttcagtgtcttgtcttgttggatcatccaaacggcgagatgcccttgcattgcaaaagaggggaagatcagaagaagaagaagaattaagacggttcgatccataaagattaaagagagggcagcaagaacaggatggctagctgctcgtagcaagaacagtagcttggaagcaataaatttcaccttttaaaaccgctccccgtacgcagcccatgcagatgtgttgagttcagtgaacgcgatcgatcgtgaagagagatactagctctctttcctgtgagcttcaggaatccgatgtgtgcaatgcatgcccctctctctccttttgaaaagctgttcatctatgctcagctttattaactcgcaaatctgaaacaccgaaaggttagacgggtagtagtaactgtagtagtaacagcagaaggcaagtaagtactgatgcataactatatactgacattttagtcagggtttacaagcaaaatgttgcttttgctgatgtaaccttgtgacttcagagaacagagatatttcttttaccaccaaggactgcattttcgtctgcatcagcaggagtcctagatactactacaaggggaacatggtggcggaaattcctgatcgaccgagtatcacaatttttgtaaaagtagtaccatttccaattgtttttattctatccctatatatatagaactttgatttttatgatttctggaatcaacattgtactgatatcgccatcaaattgagtatatgaaattctcgaccaaccgagaaccattttccatagacatgatatcgttttcgacagttttcattccagcatctagcacactcgtatgcgagcttaattcgagcctgccagcttcacttcgccaacaacactcgagcattgcaatctgcaagcttccagcagcaagcagcctaattagcatcacagactcatctcagtatcacaccccatgatttcttagatgcatatgcatgcattcaaggacaaatcaaagcattctgctaataagctcgctaacgcggccacaaaatccgtcgctgacagatcatcagaagcaaccaaaaacccacattaatcgcggcgactccgctcagatcgatcgatcgatcgctgcgcccaccgtgatggccaccacaccagccgtcgtcgtctcctagctccacacctcccccttgaccaccgccaccgccaccggccggccgggccatgcacggcgaccggccggatcgaccaagccgacgccaccaaccaaatccatcccggtcatatctctgtcgcctcctcggacccccaagctccatcacatggtggttgtcattactgtcactcgatgaaaccccatccattgctgcggacacttatataagaataaaaaaaattttggatgcacttaatagtttagtgagaagggacgtgtggtttcaacccagaggtccctattcaatccccaacacgcttacatatttttctttaaaaaaaaatggagaggcgtctctaccctccatatctccattttttaaggaggatggaaattttattaaataaataagcaagaacaattagcaataaagtaggtactaaataagttgagtaattaatagggaatataattgcatagaacatgaacggttgagattaagcatgagagagatcgaatggctcatcttagcttcacgcatgttgagcttgtggctgtaactttatagaaagagaggatttgtgtcgtcagtgtaagtgtactgctggtaattgcacagtttaattaccagctaatgcatggctgggtggttaatcagctagatctctctggttttgagctagctgatcagtgatcagtgtagcagcggcaaattaataaatgggatgaaaaagcttttgcattgcatgcatcatttcgtacctcacctagacgatcaatggtggttgtgagacatcctggatcttgaaggaaatataactgtcctgtgtcacatataatggcgtttcagctgtaatctaatccaatggagctacctaagctaccacgtatacatgtacctatagctcacattatgagtgatcgatttatctaaaatccaataattagcccatccaaaaagggccataattgtttcaatttcagtgtaatctattggattccagggatgttggaataatggaataagaaggtgagctcaaaacggatttcctgtacatgtttaacaagtgtatttgttgtaacctaacactggcgagtgagtgaatgagtgagtgagtaaggtgggccccacatgccagtcactcacccccaggctctgctttctgctcctgcataataatcaattttttaatcagtcaccagttcatctcaacatctcatcctaatttgtctttgcatttttttttgcagtttacacccccaccaaatctgaaatccccacacgcagcaatatataaggctacaatacagagccccaaacgccacacaaagtctcctcctttcttcttcttcttcctcctctcgcctttcctctcctcctcctcttcttcttcttcttcttctcgtgggtgcaagaagcagagaaggagcaacgcgagctgagatcgagcgcgaggatgtggcagagatacaggttcttgtgctgcggctgcggcgggaacatggcggcctcggccgccggtgacagggggtgcgacgatgacgcggactgcggcggcggcagcggcggcgggggatttggggaggaggaggaggggggaaaggatcaattccacatccccagggtccaactagagcaaagcagtgtgaacacatggttggcaacaaagagtaaagagtcatgatagctagtaactcaagagctggtatcatatccagcatcatcaataacatttaatttctttgatgcctagtactgaatcaataaatcatgtgacacgtatatagaaaaccataaatcctgaaacaatataatgatgtttaccctgacaattgacattgctgcagaaatcggatctttaacacccaatacttttcaaaaaagtgagttatgggacccttgttgtattattccaattggaacagatacagccacattttgatcatctctacaaaggagaccattgagaacctacaaaatgaatttattaatgcatcagaacctgtagttgacaaatgagcattttatagtgacatgcaaggagaggatggcttcagaaagtggaagacaaacatggtctagtgttcatagaagtacataggttttgagaagtaagcattaacagccctcatgtgataaccattctaggttagcagcgtcactgaaaatgatttgaaggttttgtgggttcgacacccagttgtttaatgaactccaaaattgtgaataacaaagtaaaatattccaatatacaaatgtgctgatccc

SEQ ID NO: 4659 - DNA, 20915 bp, Oryza sativa
aacacccccttagtctaggatacttcttgtaaacgatggaattacttcctagtagtatttgcgatctcaattttggccttttgtcctcgattcatccagaaggatcaactggaccacacgcttagttttcaaatagtggagtacaatttgcatgtacagagattcaaaacaagaaaaggggagcatgtacaggaagtgcgagtctaaaaaatgtactgaattcgaacaggacagagtgacaaggagagggaatggcttgaaatggcaatgaaaaggccaggtcaaattggcaatcacaccggccagaaaacctagtcaaaacgtcattgaaaaagagaaaaaaaactgaggcgttcaacctgttcatgcacgagccgttcgttcggttcattcaccttttcacagcggtcgctagctgacggcatgtcggctcgcttgtgttactactacttgattaattgacagctgcatgccataaaacccaattacaattagcagtggtatattttttttcagataaggacaattagaagtagtagtaaaagaccaattctttctttgttaattacgcgtatcaatggatggccttttccatgtgcagcagctgcagtggtatgatcactgtcaatttatgggccggggttgagcagtatatttgacttcaaaagatgggaggccattttaatcaatcacctgttctaacaacctttaactagacgtgtttggtttaatttcaccgttatttctagaatgaggtttgtgtccggttgttgatacggcgcacgagtttgaacagtgacatgagagttgaagtactgctggtggtaaatgctaccaaaattagtccgacgtgaccaattcaattattacttctctagtttctacacttttgtgccattggtcaaagaagtaatactcgtggatgcacacactataaagatatatatcattctcaatgttccggtatattctttagatagcacttttaagaaaaaaaactttttaatcacaaataaaaatatctataaatttcaagcattaatttaatgagaatgatactggtacattctgtagttttatgatactctactttaaatctgtaattttgtaatatattttgtgttaaacctatagttttctgatatatcatctttaatctataattttgtgctaatttggtcaatatatctataactttgtgaaattacttttttatataagaaaatggtgaaaagtggcacattatggggttgggttttaatatgcatgtgatgtgaatggttcgacttctctggtttggttgaacttttgggtgagtttcatttttttttgtgagaaaagctttggatgaacttattgttgcatacaacttaattagtaaataatatcagtaaacatttcactagtcaaatttatgatatatcggactacaaaatgcagaacaaaacatcaactttgttttttagcatgggtgcgacggatgaaagtgaaacaacgttagaaaactgggagtataactgttgctaacaagtggacagcgtacggacgaaagggtcagcagtggtcaaattaaccgattactgtagctagccgtcaaaccaccccaaatttgaccgccgaaaaatctaaccattccctctgaccaccatgcatgtacgtaaatacgtgcacacaccatccccgaaacacatccaaaagccgaccttttcatcgaaatgaatagcgatcggtcgagtgagacgcgcgcgctacagtgcaagtacttcgtagcttttttcttaccgtcggttactgtggtatacgtataccgggcacatactggtactactgagttggagtataattttacatattgttttcatactatattcactgttaccgtgcttatcttaatttggctagggtaaggatttgcattcttgatgaaaaccgatctggatttcacataatccagacttctctaacgaggtaaaaaaacaaaaatcgctttttcatgttaaattcaaaaaattcaagctggactataaattttcgacaaaaaattatcgatttcatctctttttcatttttatcaatgtctttggtgaattccaaagatacacctcgtgagcggtttttatccagtatcaggatcgtgaaccctattccctctcccccgattgtccccggtaataaggcaaactaagagcaggtacaatagcaggctataagctagctataaacatatttaaaggagataaaagagtagagagaagagcagtgggctatagatttgtagccagctgtagcacggactcctagacacaatgtgtatatgacaggtggaaccaggtattaatagtatagtatgtaactattgtatgaattggctactaaattgactatagataatttataatccctccgtttcataatgtaaatcattctagcattttctatattcatattgatgttaaatgaatctagacatatatatctatttatattcattaacattaatatgaatgtagaaaatgctaaaatgatttacattgtaaaacggaggaagtagccggtagttggctacactattaaacttgctctaaccgagcgcaaagcctggaagaaaaaaaaaacaccgagccatcgctcggtccgcatccgcgcgcaagtgtgggagcagccgcggccgcccgcccgcccgcccgcgcgcgcgcgtgtgccgcatgggcaaattttccctctcacccgcacgtatgcacgcatgcgcgcggcgtttgcgtgtggttgcgtcgcgggagacggcgccccgcgcccgatcgatcgatcgaacgagcccacgcgccgcgtgcgcgtgagccctcgcacgcaacacatgaagctagtcgatcgatcgagccgccgtttcgttagccgacacgcttcgctcgatcggcagctggcggctcgcggaaaaggcgagacgaaatcacgctgcaacttgccgccggatatgcacgcattgcatgcgtatccggtcaaaactcaacggggatccacagctagtttatttcaagtctggactacttggttcatcacatcgaccaatctcggtcagcctcacagttgatttatcgctggtcgtatactctgctctctttttttttcaaccctaaaatgcacgcactcgtgtgaaatgaaatgaaatgatacacgagatcgatgtatcgatcggtatcttgttgccagaagctaacgagatgatatgtacgccagcagggtttacattaccatcggtaaccgcgcggttatcggtcttaacgtgggggtacggtaataaaaaaactgcgataacctccttaaattcaaataaaattttaaaataatttaaatttttaataaattttacatggtttcgtacggtttgtcacggttatcggggtaactgtgcttaccgccagggcgcggtaaccctgacccccggtgttttgggaaaccctgctagaaacaggttgggaatctcaacatccgataaacgagatcgatatatcggtcggtatcatccggtgctgcacgttgcaaactcaaactacgggagtcaaaaagtttcgttgcgaaagtgagcagatgcagcaccacatctgtgtatactccagttgcttcctcagcataaacatctctcattctttgacgggaaagcaactagttagcaagcatacatataaacatctctcactctcacgggcattgggatgcacacgcagtagaccaagcagcgacccgactctgatttttgtactagtagcgcctgtagacagcaacgtataatagtacgacgtatgttgccatttgtaatacactaagctgcagcccaccgcgcatattattcccccggacaagttgctacttaacaaaatgacagggaaggaataacatactttgcatatgtacacaaaagggtgttcctgttcatggaacaagagctcgtactgccgctgcagcggcaacccctgtcgtgtggtggcgctcggctaataaaccaatccccaatcccccgagcgaatagaatttgtgattaattcttcggtgtccctctctcctctggtttgatgtgaaatcctctgtcacgttgccaattggaaagaggtagctgtacgtagccgaagtccccgaggcggtttggtggtggtgtggtgtggttggtcgatgcgcgcggccgcgttcgagtgcgtgcaccgtgcgccgccgcggggtgggtgattgggtggctatggttactcagtgttcagttccattcaaactcccaaaaatttcatcacatcaaatatttaaatatatacatagagtattaaatatggatagaaaaaaaaaccaattagaaagtttgcatgtaaattacgagacgaatcttttgagcctaattgcaacatgatttgataatgtgatgctacagtaaatatttactaatgacgaattaattaaacttaataaattcgtctcgcagtttacaggtgaaatttataatttgttttattattagtctatgtttaatactttaaacgtgtgtatgtatatttaaaaagttttaggacacgaactaatcactgccggcttttgcaggcgcgagatgcgcgcgccgccggatgaaaggtgtggtgtgggtgtgtgggtggtcggagggaaagctgcaaaagccggcaggagcactgcggtgcgggcggagatggacgtggtacgtcatgctgctggccacagtggtgcatgcctagacctgcggcttcctgggccactcgtactagctcctggggagagtagcttaagccagatagtgggtaatcagtggaagtgctagaccttggccattccaaataaggagattcggttaactaagtgctttttactctagtattataaaaactaaatatattgttaccggtattttgttacctcatccgtatttgagttcgttttaaagttcgttcgcttttaaaaatacagatccgtatttaagtcggattttaaattcatttgtttttagaaataaaaaagaatcatataagaaatctctttaaaatactccctccatccacaaaagttagaaatatttcacatttgagtttttccaaataagttattcctatttgtagtctttatgcattcaagacttaaataaagagataaattaaatgtttgattagaacccaaggagtcatataaatactcattggttgcatgctttcattcactcgttgaatttgtaacatccaagatgatttaatttctccttggtcttgatgacaaaagtaataggtataacttttgtggatggagggagtaactcgcaagctaacttgagatgaaagtcggattcctaattgcagctcatgattttctaaaaaaaaatatctaagcgaattcttacagtgaatttcatcatagctaaaccgtataataataataagattaaaatagcattcacctgttgcaacacacggatattttttttatctttttaaaaatataaaatatttgtatttgatcggttcttaaatttgaagcagagtatcacgtcgatttggatagcttcacatagaattttcagctcctcaaacagttcatattgttacctaggttctgacaatctatagttgtagtcagaagctgaaaaacaaaattctccgtattctcgaagttggctaccaaccagcagattattagaatcttaaggtccccaaacagaaccgatcatctagattcatgcacttataaaatataaggactaaaatcttggtttaatgtatcacgagatgtataaagtacaaacaatgtagctcgggtgctgacatggttgtccacaataacgagaattttgtatttacacctattcaatacaatatgtcccaaaatccggctttcatcactcccaagttgactcctaacacacatgtgggagaggtggcgaagagatgacgattagagtggcatctattgtcggagataggaggtccccgaaaaccgaggtaagatggcaccatagtgaaagggtgatcccacgaggggggaaggctaatgcgcgtacgcgccagcaaatttagctggcgcacacggcagttggccccctccccggtttcagcgtgcttttctttctcacattcctttttacgattttagtgcccagatccgggcacgtttttcctttttttggtttctttctattgttttttaattcttcagacacctctttacaaatgtagagttgaaagtatttaattttgacttgaaagttttcaaattttgtgttgaaagtttttatatttgagttgaatgttttcaaattttgagttgaaagtttttaaatttgacttgaaagttttcaaatctaggttgaaagttttcaaatttgggttgaaagttttaaatttgacttgaaagttttcaaatctgggttgaaagtttttaaatttgacttgaaagttttcaaatttgggctgaaagtttatcaaatttgagatgaaaagttgaaagttttcaaaatttgacttttaaaaattcaaatttcaagttgaaagttttcaaatttgggttgaaagttttcaaatttgtgttgaaagttttcagaatttgacttcacgcataaatttcttttcaatctgttacttaaaaaaaaatcttatcttcattatctaaaactaatggatttttttacatgctaaaactaacggattagttactagacgcgctatggaaaaaatcccgaaaaaaatctaaccgcgccgacgcgcggtgccgcgcatacgcgtgggtcttgtgggccggaagtacacgtcggcgacgcatatgcgccaattaggaattatgtcccacgagccatgcacgtgtgatcgtcgccgtgaaggcaaacaatggaacatcatattgcacgaggattacggcgaaaataacaccacactgaacttacaatattaaccctctctatgtgacgtggtttttctcggttctagggactatccaccaatgacagtcgcagctatcctcgttaccatttcttcgcctcctctcccactggcatggtgggagttgatttgggaggggaatattgtactggaggggctgaatgtaaaatttccactggatggccaaattagtttctaagtttgtgttatctgtactttgagctgagtgatacattaaatcaaaattaaagacatagatgtgcattttaaaatccataaatgtagatagtactctactccaaatttaaagactagccattattttactattagaaaaaaatagctactctaattttttcaaatataagcatgtctgaccgttaatatagataatatattttggaacgttcgtacggagtacgtgatagaaatgtgatagcaagggagcaaggagtgtccatgcctgtgcaacatgcggatgagcttcggtagaaaaaaataataatgaaatttaccaaaatttcgcataaaatttctaaaaacttattgtgctcccataaataattaattgcttcaagacatgtataaagacaaaatggaagatatctggtggaggaacgaaacaaataaaagtatttagaaattccacaattttattatctgaatataaaatctgcttcagtttttgttcgaattgtctaccgaactttcggtttaatcgcctcctactgcaatacaataaaataaatttgatatgtcctcatcatgagccgtccaattttggatactctcagtttctcaaacgtgtcgaattgctcagcagtacatgtacagtaatatatatattgtagaagtgaataagctaaacgagggggaataattaatttgattgtgatttagcatgcttaattgaattgaccacacgttgcaacttaacacgtacgcacgtataccatttatatatcttttgctactttctttaaagcaaaccaaaagaaattagaaaacgacgagactgaataaagttaaatttatgagaacaaatcaccacgcatatgaacaaaaaaaatggaagatgatatgggatgatagagcagattaaataggaaaaaaacggaagatcagaatatgggatgacaaagtggggtggttatttaatctgatgaatttgaagtgacttattttattttcatgcaaaatattcctgttattagttattactaaccaatatccaatctaagaagacttctcatctagaggttactgccatcattcacaatctcttggatctgatcgagttgagttattaaggtaaactgccattgacgtgcatgcatcccatcagaaagtgacactgcatcacacctaagtggatgagttaaaaagagggtgaagcaactagaaaaaaaaacccaatttaagccacacagttatggattaacacgccgccaatatggtcaggaaagttgggcatctacttgcaaaaatgtggggcccggatttgattaatgaaaatgtgattagatggtgatatgagagttttgagcaactaaatttatctaagcatgcatcctaccacttctttttttcttgctacataaagaatatacatgatagtgtatattatggtatcaggatagagtatagaccgaactattttggtacaagtctacatgtaaatgtgagtttcatatatagttaggtatgagttctacgagttcaacccagataggttaagaaaacgtcgattttctttgacccaacataaggtgattttgacggcacgtgtctacatgatgttggtagttcaatgaaaaatgacctagcttaattacagccaccagtttgagagtaaaatcttgtcctcaataatgagaaaaagtatcccatttgaacacatattattggtcaattaatattatagatatatgattttacattttccatggaaaataatttcataatagattattcatatgatgttaaactatataaatatttagaaataaatggttaaagttttatattataaatgggtgcccctcttttctttcaagagctacaagtacataaaagttattgtataattctagtatagttacaatctaattatattgcgattgcactatagttatgtttgaaagttttttactgaacaaacttgtgacattttttaaatattccctagaactattgcatatccctaatcttttgtataggtgcaaaagcactatatatatatatatatatggatacccatatgggactctatggtgcccgggctccaaggtataaaacacacaaattctcttaaatttttaaaaatttacaaattgtaagtagatatctaggtatataaatttgattcatacaaatacctaacaacaaaacaactcaaactcaactttatttcacaattaattattacatacctaacgaattatatgtctggatgttatatacctagaaccaaaatctaacaaaaaaaagtacaaactcagttcaaacttgtttgaacttgttagtaaagaagttaatgttcatatctaaacattttaaaaaaattcatactcattcaaattggatatatactcaatttgaatcttagagcccatactgtatgtagcaccagttaatttacctatatatatatatatatatacacacacacacacacacacacacacacaaaagtacaacactagacccttacttatatgcatgtcttactttataaccaagtaaatacacatatatcttcgatctattagaatcatatatactggatcgttgaattgaattataatttaccacgtctaggatgaataattgttgaacaatccggcggctaaaaggtccaacaaggagagttggaggttggaacagcctgtcacaacaggttttttgtacgcagttgttaccaacttcaacgccgacgacgacgtcgtgtggccaatcttcacctgtcaccgctggctcctgatggccggcgacgacgatagatgagagccaaatgaataagtaaacatctcatcaacaaaagccctaattaacatgctaattaagaggctatgaagccctagctgggtagtacttattttatttgtgcaagataggattagccttggtagttttagttaattaaagggggtgatttggggatggatggattgtgcttttacatccctcaaggcatcatcaatcattatccttcctccggctcccggcagatgatgaggtgtgatgcaggtgggatcgtgtgccacctggaggggaagattcctctttctctcaccctaaacttcagcgtttttcttagcctttgagcaagtttaatagtatagctaactgctagctctaatttatctatagccaatctaatagcttattcataaaatagttacatactacactattaatacctggtcccacctgtcatacacaccgtgtcttggagtccgtgctacagctggctacaaatctgtagcccgctgctcttctctctcctcatttatctcctcaaaatacgtttgcagctggctatagcctgctattgtacctgctcttagtggtggtggtgctagtgctacacgcacttgatgctgtaccaggataaataacacgcaatgcatgagcatcatgcccaccctaaaaggcagaaaattaacctcctctcttcctatgtatattgccatgtttaccgtgtattcatctatataattaaggtataggatgtgtgcgtaaaattgtttcattttgcattcatgtagataggtaaagctggtaccacgtctaattagttatgtgcttgttttccataaagatttttttttatttgcaccccttccttagagaattaaggtgccaaaaatgaagaatgtgattgaaggtacacaaaaaaggataagtgcttcccctgttggtattgcaccgtgaagtatcaggctcaaacgttcggctacaaaaacttctccttaaagatagttttggtcttactgtcaacagctagctagagttatgtcacaaacgtatgcatacacaaaccgacatacaaaccaatggtcaaaccagagaagcatcccatggtttccattacatacataataacttctttcatttatttgttgtgtgaagtaatacaccaatgatgaattctactacaaaagaaatagtgaaatcaatgacaactcatttttttttaccaaaacaactcaaagttttacgtgtatagtagaattaaatttatatatagttgtgtaaatttctacattgtgaattaagggaaggtaattcaatgaagttgtcagtcaaatttctactacattggtttatggagacatagtatttttttataggcaatatggagatatggattgatagtgtaaatccaaaaatgccgcttgaagacatgacgtagagatacctacatttgtacacattatttaatgagtactacaccattcaccatctatatattttattatatatgaatgcatgatatactacatgatgcatgcatttgcaagaaaattcacattgaaagtatgggcaactcttacttcctaactgtacatgcacatccctatttatcacgaatagagtagatacatatgcacgaataaatatacagtgagatcacaggcgttactcgaactcttgtttcgaagggagcatggaaaaaccattttgaaattcccaattcttgtacctacttgttcatttacatcaggctcaatatttatttgaatttctaactgttgaggctaatggagaaaataccagtaaacaatatagaagtgatgcactgttgtgaccatagcaaagctcaaattcaactcccttttgggcccaattctaaaattaatctcccatgtgaaacgaaatgccaatcccggtcttgcccatacattaacttaagccggggcataataattggggtggttaacttaatttaatcaccaagattttttgcctaatcattaaaaaaaagggccacatggccatttattacctggaaagggagggattaacccacaacatgccaatgcatggccatttttatactcctctgcccctgaaccattggcacgcggataccaccaacgcggctgacatgacacgtgggcccatgcgcatgtgggccccacatgtcagtggcgtaagcgtgtgggccacctagtggggttgggtctgggagtgggggggtgttgggggggggggggggtccgcgttaatcgccgggcacgttctgcacctctttcgctctccggaagggcccacattacagctgttataatgtggtcttgtctgcctcctcctctcactcctactactactcctttaattattatttttttgtttttctccaattctcctaactaattttgttcccacatgtaaacttttttttttggttttttggggatttaattttgcctttgtaatgatttttttggctgttgctgatgctgctgcaaagtagtaaaaccaatcttggtgtaattgtttttctgctgccccttggatcctccaatggtccttggtttagtactggtcatcagtgcaaacaattgcttctaactcagatgaattttatatttttcatctcaaaagaaaaggtattgatgagagtagaaatggtgaggtaaaataaaaagggtaattttgaggataatttatgactaaatttccagtgtgaaaaatactcctccagcttagtacagtagatcatgaatcacagaatccaatatattcccccatggggattgaggtagaggagtttttgtagaggtatttgtgctcctctcccttttattacaagcctccacctttctctctcatcccacagtttcctacccctcctttcttcttcaccagtttgtctctctctctctctctctctctctctctctctctctctgtcctttcggttttaactagcattaggcaggtggttaggaggggaggtaaagctcaaagctccctcccctgacagcgcagcatcttgtttgttttatctcccacatcatctccctcatcatcatcatcatctcctcttcttgcaagcacccacaacaacacaaactctctttcttcatctttctctctcctcctcctctctttgttgtactctactcaacatttctcaactttcacttcttcttcttcttcttcctttctctcttcacagctatcatattctcctcctgcttgctgctgctgctgctggctgtttctctctcatccatccaccctattatttattcaaggctaagtgatggtatcttaattcttttttcctctctgcctcctcttcttcctcctcctctctctctcccttgctgttgcaggagtataatttttatttttgccaggcttcttcctgtactggtgtttccttgtttcctccctttcttgtgcttcttcttcttcctcatcttcttttttttttgggttttctctctcctgccatccttttcacctctactagctctcctgatgtactgatcattccatcacctccattccccagtggtaacactcgtgggggaggaggaggaggaggaggtagtagcatgcagcagcagcagccagggggaggagggggaggggtgcagcagttcggcgcggtggcgccggagatgtcgccattctcgccggcgggaggaggcggcggggggcggatctccatggcggaggccgcgtcgcccatcagcagccggccgccgccggcgcagcagcagttcgacgagctcggcgtaggcggcggaggcggaggcggaggtgggtttgacgccgaggcgctggcggcggcggcggtcggcgaggagggagccagcggcggcgcgggggggaaccggtggccgcggcaggagacgctggcgctgctcaagatccggtcggacatggacgccgcgttccgggacgccaccctcaagggcccgctctgggaggaggtctccaggtaaaaaattcaacgccatgagcccccctcaagaattgctccgccgtcgatctcgccgccatggctgaattctcgtcggcgaaatgctgcatgaaatctcggcggcctccagaagcagtagcctggtgtgatttttggttaggctcagttaattaattaccggctaaaataaacacctccttttcactttttttcccttaaccatcgttcacgagcacagtgactttttttccattttaaaataatacgggtatcactctccttcctcacctttccaaagaatttttttttcatggccatctcttatcaagatggtggtacaatacaacacacgcccatacgcttcagatccgaaaggcatcaattccaattttgcaagcagaattggccataaaaatgcattcttttgcacaagcacaggagaagaaaaaaagatggaatttttactccccccctgcagcattctctctagtctcttcttgggatttgattcatcctagtttagctagctattgctgcatgtatgcacacaccttcctttctttatcttttccgatgggtgcccaaatcgagtaaaattctactccatgcatgcaactttcctgtgagggttacagcttaatttccttcaaattttggctcgccattgacgagctcgagcttaagcttcttcttcttcgtgttgtttttaatggcggcgtggtggtgggttgggtgcaggaagctggcggaggagggttaccggaggagcgcgaagaagtgcaaggagaagttcgagaacgtgcacaagtattacaagcgcaccaaggagagccgcgcggggcgcaacgacggcaagacgtaccgcttcttcacgcagctcgaggcgctgcacggcaccgccgccggcgtcgtggcagcgccatcgccggtgacgtcgctggccccgccgccggcgacggctgtgggggtgtccggcggggtgcgcgcccccgccgagccgccgcccgcggtggtgatggggaacgtgatgagcttctcgacgtcgaacacggaggagtattccgacgaggaggactccgacgacgaggggaccgaggacatgggcggcggcggcggtgatgagagggggaagaggaagaggttgtcggagggtggcgccgccgcgggcgtcggtggcggcggcggaggaggaggagggagcggaaagatgatgaggttcttcgaggggttgatgaagcaggtgatggagcggcaggaggcgatgcagcagcggtttctggaggccatcgagaagcgggagcaggaccggatgatccgcgaggaggcgtggcggcggcaggagatggcgcgcctcgcccgcgagcaggagatcctcgcgcaggagcgcgccatggcggcgtcgcgcgacgccgccgtcgtgtccttcatacagaagatcaccgggcagaccatcccaatgccgcccatcatcgccgcccccgccatcaccgtcatgcccccaccggcgccatcccagcagcctcagccgccgccaccgccgtctcaccccacccccatcacctccgtcgcgccagctccgccgccgccgccaccagcagcagcagcagcagcagcatcccagccatcgccgcaggccaccaagtcgccattgccggcgacgccgcagacgcaaagcagcatggacattgtcatgacggccgccgaggcgcacgacgcggggtacgacgggtccggcggcggcggggggcagccgtcgtcgtcgcggtggcccaaggcggaggtgcacgcgctgatccagctgcggagcaacctggacaaccggtaccaggaggccgggccgaagggcccgctgtgggaggagatctccgccggcatgcggcggctgggctacagccggagctccaagaggtgcaaggagaagtgggagaacatcaacaagtacttcaagaaggtcaaggagagcaacaagaagcgccccgaggactccaagacctgcccctacttccaccagctcgacgccctctaccgcaacaaggcggctctcaactcctcctcctcctccgccgccgccgccgcaccggccctcccgccgccggagcacgcggagccggcggtgacagtcgccgcgccgatctcgcagacaccgccgccgccgccgccacagcccgtgacgacgaccaagaacggcaacggcaccagcagtacaaacggcgcgaacggcgaaggaggaggaggcggctccgggggcatgcaaatgcaggcgagcaacggcagcgtcgtcgccggcaacaagttcttcaccggcgcggcggcgaagaaggtaagctaagctacgtgcatccatccgtgtgcatttccccgtgtggccgtagcgaattggcgcgtacacatgtggtacgctgctgttcgtttttggtgatccaatgctgattgcgtaacgctgcgcatttaaagccagaggacattatgaaggagatgatggagcagaggccgcagcagccggcggcggcgaacaacgccttcaaccgaacggacggcggcggtggcggcggcggcgtggacagcgacaacatggacgaggacgacgaggatgactacgacgacgatgacgacgacgacgacgacgacgtcgacggcaacaagatgcagtacgagatccagttccagcatcagcaccaccaccagcagccgccgcagcaccgccaccagcagagcgtcgtcagaccgaacgccgccgcctccgcggccgccggcggcaacccgcccggcaccgccgcccccgccacggcggcggccgcaacgacgaccaccggatctttcttggcaatggtccagtgatccatccatccatccggtgactctctctccttcctacacatgcatacctccatgcgcgtcaatggcttcttcttcttcttcctcctccatctcttgtaccatttgtatctacctacctgtcgcctcctccatggctcgtccatatctcaacaccatcaaaaagctcaaaaacctaaaacctcaagaattctcttcctcctccggcatatttctccattgattcctcatgcaagctagcagctatacatctccatgccaagaaagaaaaattcgcccatttcaagctgcatgcatgcccatcgatcgttcgtcgctggatgttcctagcaagaaaaagctagtagcatcgatccatttcttgattcgttcttgtgttaattacagtggtctctcccatctcgcgtctcctcttagctagtgttaaaagcaaaaaaaaaggaattggtggcgtggtaatttattgatttgttgtggtaaatttaataaggaccctccattcgtgagggttcacggagagggtttaaaacttggtgcggtgaaaaacggcacagaggagcggtaataacacctcgctctcgcggttaaaaaaaaaggaagacaagggtatatatgcaaaatgttgcggtggttgtggttgttacaaattattacacctcggtaaaaatttgtttggctatgtgtactactgctcgatctactgtggcatgttgcaagggcgcggtgaaaaaaaaatcgaaggtgaaaaattaaagatgtgctcatcaagtgaagtggcagtgaaaaagcaagagagctggtgctggtgtatgccggaatttttcccatttctcttttttttctcttttctctccttcttttatatgttttgttttgttttttctaattacctaaactgtccattatgtattacctgagtttttttttcttcctttcccaaactgttgttaccgaagttttacagtgtatactcgcgacatattatatgttacattcttgctattcttataccagcattctttctaaataagtgtgatgctctttgtctactttatttatttttagagaaaagaaggattagaggcagatgcaacgatttaaattacatgtgcagctctggttatactctaggatccaatgcttaatttattgtaaactttttagttttagatcccataaggatcgatctcgatctttcaaatattaatataaattgctatgccacgattagtataagcatggggagatagccctcacatgccaaagattagtatagcacaaggaaggcttgatatatagggtataaaatttaaagcaagtaattatcaaattataaccgaggtaaactcattaaaataactaggtagcatccaagctagatgtcacggtatgttgtcatatgcatgcatgcatgtaaataaaaaaaatgcctgcaaaaatttaggtagatcaaaagataaaattcggtatgatcttgatcaacttaaattgccagcacaaaatcaactagtagaaggatcttgtgtagatcgccctatcatgacaacttcgagtgctagctaagagagcatgtgctacaaagtgacacttgattaattatcacttgcacaaattcttgctacttaaaccacacttttatacacactatgctactgtatactactcccagtagcactagtcctgtaattaaaattgtgctcctagtacgtgagataccctaccactgtagttttaggcttggatgcctcggagttagagccagcagggggggggggggggttgcctagctatagtgagtatggctgatcctttggcaagcatacaaaattagttttggggtcaggctggcttggctgtggctggggatccgtataaaaacggttgaagtgtggggtgatgtgtctgccataaaaggttaaaaagaatggagctgtgggattgatgcctcctgtttaaattatgggagaacgtggaggttgcagggcgcgcgctcgttcaccttgctgcccttcgtagctctagctctactccctcggtcccaaaacaaaaaataacttaaaagaaaatataactttttctcctaatacaacgaatttgaatagagggttgtccaaattcattgtaccaaaaagaatcacatctagactgagggttgtccaaattcgttgtatcagaaagggtcacatctcatactatgttaagttttttttggacggagggagtatgtagtagtagcagcatcatcagttctaaggttgtaccagaaagggtcacatctcatatgttaagtttttttttggacggagggagtatgtagtagtagcagcatcatcagttctaaggtgggaataataattttaggatttttgatatgaaatggaatagtttcatattctaaatacaggagttcgatctcaggattttaaagaatttttgttagagaggtaaaaattttcgtattctaagagggattcggagagggatggagctaattctaagatggtggctcgcgtacgtgccatgtacctaggagtacattatatttgtggatttgaatgcaacatttccactattttcttttgtgaagggaaacactaggagggccgtataatacactgtcaagatagtgcactatgcatacacgttgcaataatttagtgataaatctatccattatcttaaaagaagagtgataaatttattatataagtttatcgtgtttgataatgtttgctatcttatgacaatagatttacatgagctacatctacactctaattccctagtacacactattcatgcatcttttctcacactcttcatagcttcttgggcaattggcatgagaagggagagcttggctctacactctactttcttctggctgcaggctgaatgttgcacatgggatggtgagaaagttaaaaaagagggagagataggaaattaggaacagacatgtccaggaggagcccacacaatgccaccttgcttcctacttgtgctcccttagcttttgttcctttatttttttaccactggctttttatcttgtcatggtggtagtaactattaagtcatatgtccaatgcgtaggagggccaattcatcatctgccaacctgttgagatctgcgtgtgtaaattcagtgtacaatcatgtggcaatagcatccgcatatgtataactatctagaccagtaacaagtgtaacaaacagttagaaaatgctagacaaaccaaattctaaaggcattttgcacacaaacctcaaaatctgaaacaatattccaagtccaagaaaaatttccttttcttacctggatactagggtggtgtttggttggagggactaaagtggagctaaactttagtcccagggactaaatttaatccctagttcccaaacaccccctaggtaatctgcaacagggccatccactgagagtttgtgcatggaaaaggcaggccctcatgcagagaggtggctgcagaagattcttttggtgagagagaagagtgaaccaatgctacttcaacgtactaccagtagtacgttttattcaggtaaaagatggcaaagtgcacagggtaataaggtgaaaaagagagaaaaaaaagaagaaaatagtactggcttaggcacattgagaattcactggccccggcagcatgtgcggtgactccacggttcacgaggcggtgttacttgagggctggaaactgggcggtatactgaagggcgaaaaaaaaaaactggagaaactttcgctaagtcaacacccagcgttacacaggcttttcactaggtttggttttatgtgaaggtgtagtttcaacatagtccaggggaagagcgaggggtgttgtcaagcccgaacaataaagaatgtttactagcaatcggtaacttttagtacatgggttgccgataacagaacaataaaaataccgacggcagagctcgaacagctgtccaactatctcaggagccagctccgccactgacatagcctcttgccagcgaagaacatttgggtatataagatatattataggagtacgagtacctctggtttattgaaattattgcactgcaaagacaccccccccaaaaaaaagagaagacaatattagatgagcaattctacggtccttgaggaggtaccatgaggtaccaaaaatttagtgtagaatttggtacctcatggtacctcataatac

SEQ ID NO: 4660 - DNA, 2074 bp, Oryza sativa
tgctccatgcttgaacaggctgatattgccctgtataatctttttgctgtgtttttggagtttgtcttgtcaaaaaggcagtgctcaaatggttggttggaacggctaccatgatgtggggaacgatagaaatgggcttaaaaatttcatccatgagtgtgctgtcatttttcttttttcaccgagagagagaaggaagcattgcttttcagatagtaacatcttcttgtcttatttttggtagtgagggttcatgttcttctccatatgctaactgttggaatgagctggatctacaggaatatttaacttataaagattagggactgagtgcatgtgaccattattggccgttgacgtgctggatttattttttttttgttcatcattagtttcaaagattcctctccccgagtagctattggttatgcctttgtgttctctttccatgaattatgtgtgacatgtgagaaaagaatcagtgattcactctttcagaaattggatggacgtgtagaattaataaggcggcttgtcatgttccctttatcattctctctgtcaaaaaaaaaacggtgctactgatctttcgattgacgtatccttgtctgaattttacgcttttttttctcatgtggtccatgaaaaaaaaattattttggtgctaaacttagctatcaatgttttggccaactcactaaatttcttgcatatatatcctcttttgcatattgattcagattccttctttgacagaatggggagctcggagaagaacggaactgcttatggcgagtacacctatgctgaactggagagggagcagtactggccgtctgagaagctgaggatatcgatcaccggagctggtggtttcattggatcccacattgctcgccgtctgaagagcgaggggcattacatcatcgcctccgactggaagaagaatgagcacatgactgaggacatgttctgccatgagttccaccttgttgaccttagggtcatggacaactgcctcaaggtcaccaacggcgtcgaccatgtgttcaaccttgccgctgatatgggtggtatggggttcattcagtccaaccactctgtgatcatgtacaacaacaccatgatcagtttcaacatgctcgaggctgcacgtatcaatggtgtgaagaggtccggctctctcttttttttttacatatttttactgttatatctcagcttagcctgagcttgttttatccatatcaattcatttgttacaactaatggtcctacaggttcttctatgcctcaagtgcatgcatttaccctgaattcaagcagcttgaaactaacgttagcctgaaggaatctgatgcctggcctgctgaggtttgtccatcaaaataattttaggctttagtgttatgttttagtaaaaccagaagttgatttcctactgttttaactactgtccagcctcaagatgcctatggtttggagaagcttgcaactgaggagctctgcaagcactacaccaaggactttggcattgagtgccgtgttggccgcttccacaacatatatggcccctttggaacatggaaaggtagaagtttaaccaattctccaagttattgaactgtacttgtactggggcatccttaactcaatttgtcaatggataggtggccgtgagaaggcaccagctgcattctgcaggaaggctcagacttccactgacaggtttgagatgtggggtgatggcctccagacccggtccttcacattcatagatgagtgtgttgagggtgttctgaggtatgcagctacttgtcacattattatctagatagaacactaaaccacacctgattagatgagaagctggtctaatatgatacaaacaatttctaggttgacaaagtcggacttccgtgagccagtgaacattggaagcgatgaaatggtaagcatgaacgagatggctgaaatcattctcagcttcgaggatagggagctgcccatccaccacatccctggacccgagggtgtccgtggccgtaactccgacaacaccctcatcaaggag

SEQ ID NO: 4661 - DNA, 39173 bp, Oryza sativa
gcatagtggccatctttcctatggggggagggagatcaggatcaatacctttttgtccagtgtcccaatgtatgctatgggtttttttaagcttcctgaggagttccacaaaaatttagaaactataagggggagattctattggcaggggaatgggaagaagaagaaatatcaccttattaaattgcagggtctgtgcagacctaaagactttggtggcttgggtttcttggatactaggatcatgaatttttgccttttgagtaaatggatcatgaagttggaaggcgattctcaagacatgagctgtgttgttcttaggaacaagtacttagggagaggcagttttttcaggagttctgttgttggggggtcccagttttggaaaggccttcatgagtgcaaagtctggttaaacaaattggtagttaagaagattaataatggagaaaaaacctagttctgggaggatgtttgggtgggagatgttcccctaaaaattttgtttccttccttatatatggtgaataatcaacaacatctttcggttagggaggttatgggtgctcctaattgggctctgtcctttagaagaaatctagaccaatctgacaaggctcaattagatcttttgaaaagtttgttgcaggatgtgaggctagatgatttgcttgacagcttaatttggcctcatgagaagaataagaaattcactactaaatctatgtataggctgttaaagtttgggggtgttgtggacagagagatgcaagagatttgggggtgcaaagttcctttgaaagtcaagcatttcctgtttttggctgggagagggagaataccttgtgctgatatcttagttcagagaaattggaggggggtactaaattctgtaaattatgcttgggaactgaatctagtaaccatgtgctttttacttgtcctatcgcttgctttgtttggtgctctgtaacagaggtaattgaagggggtttaattccaaccaatttttgggatggtataaaagctggtaaggaaaaactgggggtgaatttaggtctttttctttgtgctagtctttgctggggtttgtggttgataagaaatgaccttgtttttgaaaataaattggtgaaatcacctttgcaggtagtgtacaaggcaatttctttgatgcagagatggaaggtgctgctgtcaaaagaaagagatcgcgaggccttgatcgtgctgcttgagaagctaaaggctaagctggagtctctacgactagtggacgtgctaccggacaatattagtgtttaagtcagtttgtttgcttttggggttgaggtctcctagccgtttggatgtcttccttgatagggtctgtaagtcttttggggtttagctatctagcgcatgatgggcactggcagccccagttttactctgttttcctttaagtttctgtattcagaccttgtcatgtttggctttctcccaaaagccgggtaatcaaattacctattataaaaaaaacaattgaacaaagaattgagaaaaaacttagtagttggaatggtaaactaggtgggagattggttttgattaactgtgtgttatcaagtttagttatgcttatgatttcgttttttagattcctaaagagttcttgaaaaaagtgattattatagatcccatttcttttggcaaggtgatgaaaaaaaagaaatatagattgacaatatgagatattatttgtcatcctaaatatcaaggaggaataggtgttcataacttagaaatccaaaaccaatgtttattaattaagtggttgtttaaattaataaatgaacaaggtgtgtggtaagatcttttgaaaagaaaatatcctggtactaaatctattactcaagtcgagaggaaacatgggtattcctatttttttttgtctagtttcatgaaggctaaaagttcttttctaaatatgggctactggattattaataatggtgaacaagttagattctgggaggataagtggttagttatggttccgcttaatgtctgttttaggagagcattagttggtcagaacttgattatatggtattattttgtgtgttttaattgtgcatgttaatttaacagaggaggatgatatatttagttggaatcttcatcaaagtggtcaattttcagttcgatctatgtatttggctctaattaataatgggtatatagagagaaataagtttatttggaaacttaagataccacttaagattaaaagttttatgtggtatctctttatggggattgttttaaaaaaaagacaacttggctagaaggaattggaatggtaatttgagatgttgttttttataaaaaataaatcgatttaccatcttttcctggattatcattttgccaaatttctttcgaaatctatacaattcgcgtttggattatatcctccatataatatatctcatatatttaggaattggtttgtgggtgttaataaaaagaccaatgaacttaatcttgttggagattccgctgtatgttgagctctctggcttactagaaataaaattatttttgatatatcaccttcaaaatcttatttggttcttttctgggcaatatattggctccgggaaagggctcaattataaaagcatgatgatcatatcaaactaataagagatatgtgtcgtaaacttgagtcgacaatcatgcagctttttatcaacttcgggtggagattcaccaagagaattcaatagttgtggggtctttaccttgtttgatttttattagtttgcttttacttttgtttttgttactttagttatatactcattgggtgagttcatttttgtgtaaatcttataataattggctatagttcttgcgcaaatgccaggatgtcattccattattataaaaaaaaacaattaatccgagtccgacttgattccggagcccgatcgatcgatgtccgaactgtctcttctaatcgagacgttatatatatcatgctaatcctgcctgccacgacacccttcgtctacataagtgagcaagatagattagccagaagctaatcccactctaatcggtggcatgcatatatatcgattattgcatcactatatatatataggcgcctcaccgtccggagcgcgcaccgcggcgctgccggcgtcgtccgcccatgccgccgccgcccgccgcgtcgtgcggcctacacggccaccaccgccgccgccgcagaacttctccgtctccaccggcgtcgccactcgccgcgtcgtgccttcacggccaccacctccaccgcctcctcagaactgctccgtctccaccgccgtcgccgcccgccgcgtcgtgcctacacggccaccaccaccacctccgccgccgccgccgccgccgcagatcaactactccgtctcgaccgccgccgccgccaggtcgagcgggcaccacgtgttccggatccgcgactactccctcctcgaggcgatcacccccaacggcaagagcatcaagtccacctcgttcgcggtgggcggccatagctggcacgtcgagtactaccccaacggctacgacgccgatcacaccgactacgtctccgtcttcctcgtcctcgaagacgacatcgccgccgccggcggcgcgggcgagccggtgaacgtgcagcttcgcttccgcttcgtcgacgcgtcgtccaaccccggtcggccgtggacgccgccgccgccgccgccgccgtctgaattagccgacatgcgtggcgagaaggtgcgcgacttcgacggacaagggaatggatggggcaccgtggcgttcaagaagaaggagaagctggagagggaagggctcatcgtggaggatgggctggccatcaggtgcgacatcgttgtcatcacgcaatcctgcacggcgacgacgacgacagaggcctcgctggccgccgccgccgcggcatcgtcgtccagcgaggaaatggtttcccccaccaccatcgaggacaaggtggtgaacccggtgtatacaaaatggtgcttaccgccactgtttcagtaaaaacatagtctgcataagatcaagccgcctgacgtgatgttccaggtcggcacaagcggaagttcacggctaaccggcggttcgtcgccggccggtcgccgtcaccggccttcgcggcggagcaatttggcggcggccagacggagcaatgcaacgaccaccaccatcgtgtcatacaaatcgacggcatgaagcccccaagttgttcgacgcgctcagcttcatgtatggcggctcgttaccgatgagtaggccagattatcggcggtcactgctgtgcctctgctcgtcgcgagaagttaagcaagtactccctccgtattaaatgtacgacgccgttgactttttaacaaacgtttgacctttcatcttatttaaaaaatttatgtaattatcagttattttattgtgacttgatttatcatcaaatgttctttaagcatgatataagtatttttgtatttgcataaaaaaattaaataagacgaatggtcaaacattagttaaaaagtcaacagcgtcatacattaaaatattaaaatatggagggagtactacaagagaagcgtgtggtaagcttgttggtgttcgttgatctgtggcctagctgcaaggtgttcaagaaggcatgctttgagttcatcatcaaatcgtcgcactgtctgatgttgattgttcaaaaacaaaaaaaatgggaagtatggccgtgtttagttcgtatgccaaattttttttaagtacacggacacgcatttgaagtattaaacttagactaatacaaaacaaactacagattccgcatataaactgcgagacgaatttattaagcctaattaatctgtcattaagaaatgtttactgtagcatcacattgtcaaattatggcgtagttaggctcaaaagattcgtctcgcaatttacatgcaaactgtgcaattgatttttttttcgtccacatttaatgttctatgtgtctaataatttgggtagttccatgccaaaattagaagtttgactaaaattggaagtttgaagaaaaaagttaaaagtttatgtgtaggaaagttttgatgtgatgaaaaaattgaaagtttgaagaaaaagttgaaaactaaaccaggccttgatgtgaaggaatatttggaagtttgaagggactaaacactgcctatatcatcatctgtctgaactctgaactgtcgtactccctccatactcataaagaaagtcgtttaggacaatgtttaagttaaaccttgggaatataaatcatgaataactatcaagttgttgagtttgaaaatgtaaaaattagagtaaactgcactttaggccacctctttttaccaaagatgcaatttgggctaggtgtaagacatgtttttcacattagactagataactttgcataattgtttcaatttggacctccttttctatatgctcccctctttcttctcaagttgatgaagaagccaagctcaagcatagacttctggagtgccgcctaccgctgccttgtaatgcagccactatcctcgagcagctcctacgcaaccatcatcgtgcaactctcgctactatggccatggagtgccactggccgccacagtccttgagtagttccaacgtgggggccaagagctgcttcgctgccgtggcccttgagcgctgctcaattgctcattgctgtcatcctttatctgccatccgagagctttgattcgacccgttttgtcccaagctctagcttggtgagcttgaccatcattacgacgactgtacaggggccacggtctcaaggttgatgatctccacggggcattggggcttgctgaattgctgaaagttcaagcgttggggcttgccgaaagttcaagcttgacctcaacatgtctatactcacagtcacataaggtcaacgagagagagcgagctagagcctggagtttggagaggcaaaaaggaggttgaaggtgaaaccttttgcaaacttatctagcccaaagtgaaaaagtcatcttatccctagtccaaactgaaacattggttaagaaagatagcccaaagtgcaatttactctaaaaataaaaattatatgtatagatttgtcttgaaaaatactttcataaaagtatacatatatcactttttaataaatatttttatagaaataagaagtgaaatttgtgttttggagaccgtgtcgctgtcctaaacgacttcctttacgagtatggagagagtacgtgcggagtgaatggtcctatagcaaactctggacaagccaaatttttatatatgctgggccgtttccctaccatccattagggccttcgcccaccaatacgcttggtcgtgccccaccacaatacgctgggcctacaattgtttatgatgtcagaaatttgtcaagatacttttcccacaactcataaaaatttgatcactatttccgttcaaaacaaaattgatcacagattccatttgagtgtctgtatatatatagtacgtcaaccacgatcaggatctatatatatcagtgaccaagttatggtgactttgaacatatatatagaagaacctgatccatagtgtttaccgccatgatatttcaacatctggaattgggaatattttcttcgtgaaactatggtcgaaactcaaaattcatacttagagcaaggggcaaggctaatagccatatcaccttgctgcatgcaggcctgcagctagtttcaaaacttagtaaatatagcaattaagttatatatttttctctacaatctcccacacacaccttttgtttttctagtattaaattgggttgtttgaaggatggtagcaaggcacacgcatgtatgagaaaagaattgggcccacaacatggggagtagtgtgtagcccgacggcaaaacaatccttctctctttcacctaaaaaatctaatgtgtacatcactataggctgctgatatagttttatatatatctgtttttatattgtacatgtatacggacgtcatgagttaatttatttttataacaaacaggtcctattaccatcgctgttcgttgatcatatcggttttaagacgaggaattactttatctggtttaaggttcagagaagaaattaaataaaacaagagagttaagtgaactcgaaacagatatatgtctgtcactaattcatagattggagaaatagcatatatgttgaagaaacttatttatattctgtagatatatataatatccatctcactgcatatatacgcaataagtattagaacaccatgcgtgcccagaactgtactgggcaaatatatccgcttattcagtcattcattcataccaaatccaaccacagcgatatctcgaccgtccgatcagcgatcagtggttggcgatgatctcctgagccttgatctcgtactcaaagccatagctgctgacctttgagctgtccgccgaccagatgaacaatcccggcagcttcccctgccgctgcaactccttcgctccggcgatcccctgctccggccagagcagcccggcgacgtcgccggtcttgaagctggcgagcaccttgccgcccgggtagttcgccgcctgctcgtcgtagaacatcacgtacgtcggcacgtcggtgttgtcgccgtagccgtagaactggaagttgacgaggtcgatcacgccggcgtagcgccgccacagcggctggtagtagcgctgcaccacggcgtcctcgaacggcgcgatggaggtggtgatgttcgggtgccgcgccttgagctcggtgaggaggcggccgatgcactccacgaacgtgtcgacgccggcgccgccgtcgtcgttgaagtgctcgtagtcgacgtcgacgccgtcgaggccgtaggcgtcgatgatgccggagacggaggcgacggcgttggccacccacgagtcgacggaggtcggggagaagaagaccttggcggtgtcctgcacgctgtcgccgccgaggccgaccatgacgctgacgttggggtgcgccgccttgacggcggcgacgtcggccggggacaggttggccgtgtcccagtacggcgagaacacgccgttggtcggcgccggcgtggcgccgccggccgggctcgtgtagtcgatggcgaaggagaggatgaagttgaagctgaggtttgggttgatgggcacgtcggagaagcggactccggtgaactgcgcgccgatgtactcccggaacaggtacccgttcgtcatggctacgaccttgttgctcgagttagctgctatctgtctagctatctatttatacacgtgagcaaccggtttaattaattgttgattaatttagctttgactacacctatatgttgggggagatgagcaagcaaaagatcaggttctgatctacttactgttggatgcatcacatcagctgttgtttattaatgagaatataacaagttggtcatggtagataagcgaccaaggccgtgtttagttcctttcataataattttttttaagtatacggacacacattcgaagtattaaatgtatactaataacaaaacaaattacagatttcgcctataaattgcgggacaaatctattaagcctaattaatccatcattagcaaatatttactgtagcaccatattatcaaattatggtataattaggctaaaaagattcgtctcgcaatttacatgcaaactgtgtaattggtttttttctatatttaatgctttatacatatatttaaatatttaatatgacgaaatttttaaaagttcgaagggaactaaatacaatccaagtaaccacccgagcgcggctcgaaaaagagtgacatatagctagaacctagagttagacatgtgcacgccacgaaattggagagctagctaaggttaccatcttacgtacggtaaccatttgtgatttgtgcacatcggggattcatttatgaagccatgcagatcagcacgactcaaaattgtcttggattgggaattcgatcggacatatataagtataggagtgaagtgcaccagcggtctctaaacttgtgcgggtgtgtcatctaggtccttaaactcttaaaatgtatttttgagtcctcgaacttgtcttcggtatcatataggtccaaacaggctccgatccgctccatccgctaacgtggcatccacggtagcgtctacgggtcagtggggacccacatgtcagctctgtgcatcatctccaccgccctgggagccgagagagagagagagcgagagcaggaaagagagacaccggcggtgctcgacgcgtcacgcgtggccgggacgtggcaacgctgagctcctcccttttattcctcatacgtgtcgccttctcttctacattcttctggagccgaactactcggacgagagagagccctatgcctctccgtcgcccacattctcgtcgtcgatcgcgaagaagatgacgctcgctgttgccgacgagttgtctccatcgccaaatctttcccgttccaaacttcccacatcatgccgagcaaatctccttttgaccccatctcgttttatccactgcagcaacggaaacgcgaccttgcccacgagagctccggaactcgcaccaggcgtcgccgccatgaagtcgtcgctgttccaaccgacatggtccatctcaagccaagccatcgtgccaaagtcatcgcctcaccatcatggccaaaatccctcaagaaattttaagaatcatgcacagacgagggagatcgccgtcatcttctccaactccggtcaccgagtgccatcgccaatccctctctccccggtgagccacggactaattaatcgtgcatgcaactctttagggacctcactaaccacccatgcaccttctctaagcattccaccgctcaagcgagccgtcgccgtgaagccgacgttatccaccaccgccgggctgtcttttccattgccgctattacccagacctcgccatgccgcaatcaagttccagtgagcacctagggacctgctagactcgtatgcatgcatctttttgcactaaatcgagctgggactctacatgcacaggcgtattgaagaccaccgccgctcgtgacaccactggcatcgattccggccacctccggcgacgagaccaccttcaacaggatcgcaaggaagtcctcagcatttcttcttgtggttgtgtcggccgaagaatcgccgttcgccaacggcatcgtcgtgaaggaacgccggccggcgaactctgcggctgctgctgtgttctccctgtgcctatgataggtgggctccgctccattagcacgtatagaatttgattagagtaagtttaaaacatgtaaggttctttctgtaaatattgttatcatatcatatatttataaatatgactgacatgtgagtccccactgacacgtaggcgctaccgtggcatgccacgtcagcggatggagtgggtcggtacccgtttggacctatatgacacctaagacaagtttagagacataaaaatacattttaagaatttagatacctagatgatacattcgcacaagcttagagaccactgaagcacttcactctaagtatagctaaaggaaaaacaagaccgacttccagaccgtccatgcatgctggcacatgcatgcgtacacgcggaactaactgtgactagattgttcactactcggcgacacgttcacgttaattaattactcccaactaccacggagaaaaggtcatccgtaccggatggaaacccacaaagagtgccggtttttccaaacgacaccatgaagaagacacatattagaacacttaaaggtggcggttttagaactggcatctttaagttatacaatttgcaaagacaaatttacccgagccgatgcatcaaagcaacccaaaaaatcatccaaaaatctaaaaaagactacacatcagcatcacacaatcaataattgatggatcacacaatcaacaactacacatgggagctcgccggaactgtcggatctggcggatgggagcctgtcgccgctgccgctgcctcccctcccaccggatctggcggaggggagggcgccgcccgccgttgccgcctctcctcccgccgccacccgtggggcgccgccgctgccgttgcctcccctcctgccagatctagcggaggggagggcgccacccgccgctgctaccaccgcctccctcccaccgctgcacgctgttgcatgctaccaccgcgtgctagcgaccgagacactgcggtagagaaggagagagagccggcacagaggggagagggtgtgagaaagagagagcggtgggtgagaggacgagaggggagcaagtggataaggacgctcccttacctcccactcggcgttttattcctcgcctccccgtgcgataaaagaaaaaaagaggctgtctctcaattcggcttggctcgtttgatagggtgtcgtttttaattaaccgacacctataatatattaaagatactagtatctttataaaaagaatcggcacctatagtataggtggcggttcttctatagaaccgacaactatagcgtattaaaggtgccgttttattttttttcatcttttgaaggggaaaagcactatatgtttcggttttagctgatctgacacctatagtgccgacttgtatatgtcttttttaacagtgtcccaccatcccaatcatccctaacaaagaacatcaagaccaagaacaccaacacataatttattctaaaattaatcctcatcgataaggtgttttgtcgcttcgagtccaataagaattatctcatacttaaatgttgcatgggttgaactaataaaaattaatcttgattagtcgtatgcagggtatttcataatgcatatgtactctttgcacgaataaacaaaataaacattttgttagatgacgattatttttggagaaaacctcaagactcttaggcgataattacattgggatacagggaggagctactattgcacgttatgtcactattacccggacaaccttcgtatacagccagctgctagatataatctccgattgacctccatgttcaactctaccgacaccgtcgtcgtcatcgtggtggtggcagggtttcccttaccgccggtaaccgcgcgggcttatcgcgggggtacggtaatataaataccgcggtaacctccttaaattcaaataaatttaaaaaataatttgaatttttgataaattttacacggttttgtatggtttttcacggttaccgtggttaccgcgcggtaaccgtgcttactattggggcgcggtaaccccggcaccggcggtttaggaaaccctaccgtggtggtggtgatgttcaccaacaagctggctcccatgcaaaaaagaaaagctggaaagtttttctttttaaaaacacagtaaaaaaaacagatatttataatacgtaccctgcacacttacacctgtaaatgcacgtacgcatatattatcgagcaacttttaaaaaactgggccggtcaaaaaaaaaagtttaattctacatgaagggtctggtcctccatcatccccttgatctgatcgacctagctgggcttggtaatcggccagtactaaaaggaaaaaagtacaccgaacgtccttcaacttgtcatcgagttacaaaatcgtcccctaaccataaaactagatattcagcgtcccttaactaatcaaaactaaataggtccttcggtagttttgaccctggttttatcttacgtggcagttgagttagtgtgggacccacgtgggccctacatgtcaggatgccacgtcatctctctcccttcctcctctctctctcttctcttctcgtctcttctcctctctgggcaaagggtgcgggctgcagcgactagcggcgccgtggaggtgggcgtcggcggcggcgcagaggagatgggcaccggcaccggcaaagatgtcacacccaaatctggcactgccgtacaacggcacctgataggagcgtgtcgtaggaaaaacggcgcaaaccgtttcctacgaaaccgcgatcatagtaccagtcccaggacatagcgctggtacccacggtgacaaatatgaatcattgtaatccttaaattaaatagaggacttatttaccttaacttaggttgcagctcaggatagcccgagaatacaatcgacgacgcggacgaggaaacaccaacagcagcagcagcagcagtagcggaaccaacggtctaacacccaacaccacaggcgacggctgggaaccaggacaaaaccctaatcttcgcttaacttcatcttctcttcaagacggaggaactatatatatatatttatatagagcaagggtgagtattttcgtactcagcaagccatgggaattaagtgtttaatgcaggcttcaaaggaaaggctgttgtttttgcaattgattttatttaaactcctttttgaaacaactaagtgagtgcttctcaaacgacacggatgagacagtgcgtctcgtccggtcggagtatgtgtaatgtatcagtctttgattgaatcaggattggcacccggccacaactttaaaacggccacccgggcctagctgatcccgtcagccacagatgttccaaacatcgaacccaagtccacaacagcaatttcacaaatcagtagtcaaacaaaactacgctaaggaatcaccttacatccgcccatgaccatgggcacgactgttcgaacagtttaataacctctgcagagggggcacactttacccacacgacattactaacccggatcactcagcccgtgcagaacagccacgtctggtgaccttgaggctttcatgacaaggcatttcgagagccgacacaggtttaccatatgccgacgagaggggtcccagaccaacaacaggttaggtcccagaccatactgtgtcaggaagcccaggggtccttcccgacaccaccctggcgaatccacttgtcccccggcatcaaggctcccctgattagctaattactcagtcaggggtgtcccattccacccatgtggtcgtacttgatatatgtccggatgaaattccaaaggaatcggtccttaagtgcaagaataggagaccgtgctcccggcacgtcccctggtctgcgattttggaaattcatttagttcgcaagcaccgacctaggcgtcgggtttttccgagtcttttgcaaaacccaagttttacccatcgttagatattttaaatttgaggggaggactccgacgtgcgtacccgaaggcccgtacatcgaagtacaacagttgacaaaggaggtttaagtgttcaataatttaaggagggtaattgcagcaattaggattggggccggtaggctatctcgcaagccgcggccaatttacttgtgttaatcctatccatgcattatttgtggaaaagaaatacttagatttaaattataggtgcaagatggtcaaaagtgacttgccttgctcaaggtcttcacggagcttcacaaatctttgagaaaacccgcaatcgacgaaaatccggtaaccgcaactatacgcaaacaatcgaaaacctacacaagacccaaaagaaagatcctatttagcctaattattagtgccattaaatagatctcaactttagagaattactggaagtggaacggagtcaatcggagttacagatcaggagatatgaattttggaagcttaacttgattttctggacgaggaaaagatttatcggaattttccggaatacgagaaatggtctatggaatttatagaaataatattctcaagaatattattgaatttcactgacaagcaggaccaaggaaaaatgattcatagaattttggaataaggaattgatttgtggaacaagggaaaaaggatctattaaatcctttttggaaaggaaatcaaggagggatgtatattagacttgtttcgggtggcattggtgcggcccaaagggttgaaggaggctcggccgagccatttggccggtgtgggcacaaggaggcggcccaagaggcgtgcggagagagagagaggggttgggggggaggagtagggcagctgactgggtgccggcttgacccggtcaagcggggccgacggctgaggtggctgccacgcaagcgcgagagagggaggccgagctcgcccggatcggatggctcacggcggccgagaggcgccggcgaacggcggcgaaccggagtgggcggcgggcaccggaggcaggaggaggagaaggggaactcattccacggctcggatcgggaagacgtcgcgcaacgacggccggcggcggcggccaatctcgccagcacgccgacgtggccgcgcgcgagaagagcgaagggcgcgcgggctcgggcttagccgaaccggtatggtgttgcgacgcgcacgcggtgaagcgggacccgatggtcgccgcgtttgaactcggcggcggcgctatgcggcggcggaaggggcggcatggcgcgggagcgggttgggaggccggcgactggggcggcagcctgggaaggttcaaggggacacggggagggtcgcggcgcaaggaatcggcgagagaagggccgacggcggtggattgcggcggcagccatcgccggcggagaaaaggggaaaactcgccggggcaacgggagtccaattcaccggggaaggagcttctacacggctccgggaactcgtttcaagcaacgggcggcgacgagctagcctaggggatcatggcgacggcgagtgatgcccgggacatggcgagggcgcgcggcgagctgtggcgaacggcggcggcatggcgcggcgtgcgacagggggaagtggttcggtggggagctcaccgacgagagaaacagcgtcggcggcgcggatggagtcgcggcgaggtggacgcgacggcggggcggcgcggcaccgagggtgcgcggccggggaaggagggagggagaggtggcgatggggcagcccggagctccccgtcacgcgtccacgcacgcaccggctcctccggtgctcggcggcggacggcgacggcgagagcggggcgagcagcaacaatggcgcggcggtgatggaagtgaaacgagaggaggattcgatgggaggggcttgggtttttatagcggaggcgaggtcggtttggggaggtggaaaccgacttggcagtcgagcgctcggctggcggtcacgggcgacgcaagagcggcggacgacgaggatgcaaagagcggcgaaggcggtggatcggacggcgtgacttgaatcaagggagcgcgaggggcaatgcggcgagctagtgcgtggtcaaggtggggcgtcgagctgctgcggcagcgtcagcggcgctctgaccgcggcgcaagcgacagaggtagggcgccggtctgggagggaaaaaggaaaaaaggagagggggaaggggacttggtcccttgccgctttgggtgagggaggaagcagaggcgcaagctctggctcccgtctttttggtggttagcagtgtggagcggcttgggatgatggcggtggtggcggcaaaagcgggcggggccgggcggcacgcggtcacgggcggcgtcagggctgacgcggcggcgaccgagcggctggccacgagcgagcgcgcgcacgtgggaaaccgatgggcggcggcgaaaatcaaatggcggcggcgggaaggttcaaaccccggcggcgggaatcggcaaggcggcggtggtcgactggcgagagagagaggaagagagacgacgctctctcgggcggcacacatgcacagcacgtgcgaggaggaaggaggagataggcagaggggagatgggccgaggggaacatgatcggcccacaaaacttgaggaaggcgatttagactttcacagaggaggctgatttggagagaattggagtttggatttggattcaaatttgatatccgaactcgagggttcagggaggaatcaaggaatggattcgaggtggactcggatatttgtggaattaggacaagtatttggtggggattcaaaggatgcgattgaatttcggagtttgatttcggagacttgagtcggaattggaatcttgaggtgggcgattttgatggcgatgagagggaacaaagatggagattgaattgagatccatggcacgacttagactctcactcaaagaacgaaatttttgaaattaggattttgccgaaatagtttttaacgcctcacgaaaagcggagcgttacaaaagaggagatggtcgtcgttgtcggtgaggtgggggaggcggaggaggggaaggggaaggatggttgcggcggcatggtgcgaggcgacgacgaaggaggctgggccccattggccagctcagagcgatgcatcggaggggccaccgacgcagaagagggaagccctgccccggccatggcagcggcggcggcgcaaccgccgcaaaggaggctaccggcgcaccgcctctaccgatcgcacccgcacttccgtcatcgacagcctttgcaagaactccacaactcctgcaacacacgatctagatggccgcgacgaggtgctcggcgtggtggccgagatccaagagtggcacgacgcgcctccgcctccagatgctcgacgtcgaccgccgtccgccgcttccgtcgcctctgcatccgcggctccacccccaccaccgtgtgcatcctcgctcacctcgtcgccgcctgggcccacgccggtgagctcgaggaccacttccatgtcagcgtcggcgtccagcggccgcggcgatgacggcgacgagtgtccgttggccaccatatgctgaacgggatgctaaatctaatgggccgatcgaaatattaggaccttatacgccatcagaagaaaatgggttaggttgggttgggttgggtttggatggacctcttgaaaaagggttagaatggactaggtagagagacttgttgctgcggctagcgtgcggtactgtgttctcctgcatcaaagatggtttcttcctcaccatgaggaacatgctcggccacggcagtaactggtgcaaacaggcagacccaccaattcacttatagtacaaataaacaggtaacacgtcaggttaccagcttaattgtagtacaagtgggttaacgggcctgtccgtttgcacccttagcggtaagcgatgccttcacccacctcctcattggagcttgtttgtcactgctaggcatcaggttcgcgctttctcaatcttggtcaacaacatgcgaactcgtgcagatatcacaaacacacgtcacgaaacggtctacttctgccaatcccttcgaaacgtgtatattcctataaaaccggtgataaaatggtatatttctaaacctttttttcgtttgtgaaatgaagcagttaccatacattttgcctctcgcagtaaaagctgcctgaactgtcagttcagtgtttgatcatttcatataggagaaggattcatacgcaggggcagagctatagtagaggggtgcccaggaacctgatcaagaaaacattttagctacacaccacctgtttccaccatgtgtgtatcccctaatacaaacttagacactggcatcagcttaaactcgacctaaagtaaagtaaattaaacaagtggcacccttcttcatttcgttctatatccgctcctgtttatacggagtcggagtcacagaccaacgaagatcttgtcttgattctatcctggagctctatcgtattgtcatgataaaaaaaaaaaagcttcaattccggttgtgagtgtgagggagtgaattgtgtgcatgtgaaatcgccgaataaatcaattgcctgaatttcctttttcacggaatacagtacaatgtatccttgaaaatgaacttcggtgtcaagagaaatgtaaaacgaagtgacgtaacattaaattggatttcggcattgcaaaattcgatttcagcagatgataagaaggaaatatatatagttcttctgcagggagtgatagctgaagcctgacctatatctctttgactaccattgattaagttgcgaacgttccaattctttttccattttattcgacggttccacttgcaatcttcttattttgtcgcttgctctatccacgggctcttatttattcggcgcgaggggcccccttcacaccggtgcttgggagcggcaagaacagcgccgcccctccccactggcttctttcatggtggatccggtggcggcaacttttctcgcggcagatccttcaacggcggcttctcccgcggcggatcctttcaatgatgataatgttgttgttctcctttcatttttgtttttagatgttgttgttgttgttgtatcgattttatgacttgtgatctgtaatggcgatgatgctgattgttggaagttcgttggattgatttcgaagggcaaggcttagggatgacgcagggtggatgcgctcagtgaaccgatgcaacgagcctccttttttttcatcctaggaatcttataaaggtacctgtttctaaaccgacaccgtttactaggtgccggtttgaaaatctgacatccatatatcgccgattaccaatcggcacataagtccatttcttatttagcacgtaagtcgtgcataatgacgctcgatatataatacgaccattatttcgcaatttatttgctcttatttcataagtattatcacgaccgttcgatggacgatcagtggttggcgacgatctcctgagccttggtctcgtactcaaacttgtagctgctgaccatggagctatccgctgaccagatgaacaaccccggcagcttcccctgccgctgcaactccttcgcgccggcgatcccctgctccggcgagagcagcccggtgacgttcccggtcttgaagctggcgagcagcttgctgccggggtagttcgccgcctgctcgtcgtagaacatcacgtacgtcgccacgtcggtgttggcgccgtagccgtagaactggaagttgacgtagtcgatcacgccggcgtagcgccgccacagcggctggtagtagcgctgcaccacggggtgctcgaacggcgcgatggaggtggcgatgttcgggtgccgcgccttgagctcggtgaggaggcgaccgatgcactccacgaacgtgtccacgccggcggcgaagtgctcgtagtcgacgtcgacgccgtcgaggccgtaggcgtcgatgaggccggagacggagtcggcggcgttgcgcacccacgcgtcgacggacgacgtcggcgcgaacgtggcgttgacgccggtgttctggacggtgtcgccgccgagggcgaggatgacgctgaggttggggtgcgccgccttggccgcggcgacggcggccggggacaggttggccgtgtcccagtacggggcgaacacgccgttggctggcgccggcttggaggactgcgtcgccatgaagtagtcgatggcgaaggcgaggatgaagtggaagctgaggcccgggttgacgggcacgtcggagaagcgcacgccggtgaactgcgcgccgatgtactcccggaacaagtagccgttcaccatggccgccgatctagctagcgagtagggctagcgatcgagctgtggacgcggcgcatggcggctatgttttggtggctgccgaaatttatagcggcgactcggccacttgactccgatcaagttgggcggctcgcccggatgcatggaagcttggtgaaagaaggaaagaatttttaggttgtgtttggcgaagagcactgctatacatactaaaattttcttacaaaagtcttactaacaaatttctcaaccgtttgatttaactagatgaaagtgaggtgggattggaaaagcgaaatggatgaatggctagtattaaataaggtacaggtgtatttacaccttaagctattagatacttctattggtatccatgcttctacaaagaaagatataatattatttagagcactgctacacgtattaattctttcttattaaatttttactaacaattatctcaactgtttgatttaggtagataaaagttataaaaaaaattagatccacctatagcatgacactgatacatcaatgtaagtaaaaaattagtaaaaatataagtactccatccgttttttaatataagtaaaatatcagtgtcatgctataagtggatctaagtaaaaatacctcggtggatggtagaatttctgataaatactccctccgtttttaaatgtttgacaccgttgactttttagcacatattttaccgttcgtcttattaaaaaaatttgtgaaatatctaaaactatatatatatatatatatatatatatatatatatatatatatatatgaaagtatatttaacaattagtcaaatgataggaaaaaaaattaataattacttaatttttttaataagacgaatagttaaatatatttaaaaaagttaatagcgttaaatatttagaaacggatgtagtatatacgttagaatcttctgatctgtcaagcagacgtaattgtttgactatgaaagcatagtgtccaaatgcctccagaatggaccggcaagtctcagctatactcgcttcgtcccaaaaggataaacctgggtttccgtgtcaaacgtttaactgtccgttttatatgaatttttttataattagtatttttattgttgtgagatgataaaacatgattactccttccattacataatataaggcacaaccactttttctagatgttccatatataaggcatgcatgcatgtaggcaattaactattaccccttctccattaaattattacttttttaaatcctatatactcatgttctctaattctattggatgcatgcattgtatttattaggataatccaaactacaagatgatactccctccagtttcatattaattgatattttggacaagggtgaggtcaaacttttataactttaaccatcaataactttaaaaatatttagtttaaaggaactagaacaacatatatagatttatcttttaaagcactataataaaagtaaacatgcatttatttattatatatattataatagaaaaaataaggtcaaagatatatcttgtggaccgtgtcattgtccaaaacgtcaattaaaatgaaaccggaggaagtaataattattttcttgttatttgggttaggggtggttatgccttatattttgaaatggagaaagtaatactttatgcgtgacttgtctttttaatttttttcataatttttttcaaataaaacggacggtcaaacgttggatacggaaactcagggtttgtcctttttttagacggagggagtactcccttggtgggtgcacacactgacctgtccgtgaatacttttgatctattgtagtacgactaaatgaattatttttctttttcaaacataaattccatttttatgtttaaaagtgaaatttcattaaaagtactcgttcattgaaagcgtccatatatatatccctactgcttccccaagtcctaattaacgtggacgttggatggctttggaataattacactaggtccgaaccacttgatcactagcataagaaggattgaaaacggaacagaaaacttctccaccggtgtctcctcttttcacgattggttgtgctctagccacctcaaggtccgaaaggaacagcatcgaggcttcgacatgatggtgacccttaggacttggtccatttggaaggagaggtacaacccgatcttcaatcaatgcaatcaaactcggcccgaagtggtcacggcaatggcataggaagccgccctttggaagcttgcttggtctttgtcgccggcgctgctagcctggacctttaggtggcctgctcgatcgatgtcgtgagattaggcttaagcttcccctgttttttttcttgttttctcctctttttttttcttccttccctttttccttttattccctctcctttctcttgttatctatctcgtctctataagttttattcctcttaatataaatgtgtgtaatcagtattcctcaataagggatggaaaatcctaactgtatcggttgtcattttcattttatactgactgtttcaactagtaatggaaattcttggtaattgctaggtatgaacatggtagtcttttcgaaaacggtagctaaaacaggaatgatgtgttttcggatgctttgttgaaatctgtgttttcccagcaattttcggtaatctacagtcctttgtccagcccaataacctattggctaaggaagcctttgaggccataagtgactaaacctatacataacgctccacgctccacgctcgtgaactggtccgtcgcgtcctccatgttgcctcttgctcacgcaccgtatcatcggttgtctaatttgctctacaatggttctggtcttacttgataaggcactttcatccagaaccagcaaaattccatcataagtcatgttctatgacgaccttgtgatgtgatggaaggctgccattgtagaagtttcattaaggattacctactatgattaaaaaggacatccttaccaaaatggatgtcatttttttgtcgtcgtcataacttaatgatgttccaaatcgtcattgattcagtgaaaatcgtcacaaaccggctgccccagtactgccatgtggacaacctgatgacatggatccgacgtgggatgaattatggtttgacacgcggctaacctagcgaaccgttcttgttctattattgtttgacacatgactagctgagttattgacaatgcacgttttcttctgcattactcaaacgcaaaagaaaaaaacaattttacatggaactattatatggaccattaattttattatcagtgcttattgacatactaaacttttttagtgcattaggtagttgactttttccttgtgaacttcaactaacaatattttataattatttatcattatagaaagtgaaaagaacaccactagatttatcatcaaaagtactttaaaatatgtctaatatactacctccataaatgtatgacgccgttgactttttatctaatgccgttgactccataaatgtgatttgattcatcatcaaatgttctttaagcatgatataaatattttcatgtttgcacaaaaaatttgaataaaatgaatggtcaaacgttgatagaaaagttaacggcgtcatatattaaaatacggagggagtatatgtttgtctatgcacactaatatttatagagaatacgaatataaccaaacgaattaaaaaatcaactacataatatgttaaaaaaaattaggtaggctgagctgactatgagtagaaaaggaaaatggcacggctacccagccagagcccaaatttagcccatctcagcccaactcaccgttggtctgggcttaagcctggtcatgcttcaatatttttgggcctaggcattcgtgtgatatatttttccgctccccagataactacctcggtccaataccgaaaggccgaacgttgagctattcacaatacaaaggtcccgtttgataagtatccaaactccaactctcaacactaaactctaatttcattgagagctgactcctataggagctggaagtgggtatgaaagagttcggctagatttatcatctccacatcaccacgtcctgcgtcgccatttcgtcgaaattctagttggcgtcccgcgatcctaccaacacggtcgtcgtgcgctgctgcttagcccgcgcgcttccctatcgacactggcatccccacgcacagcgttgccaatgtcgctaacactcaagccgcgagtcgccacccgctgcaccgctgccctcgcgcgccgaccagccgcaccacccaaccgatgtcgccacgcactgccctatagatgttgaggccgacacccccgcgcgccaccttgctgatgccgccaatgctcggcccgcgcaccaccgctcgtcaccctgctgcccttgcgggccacatagcagccgcgccacgtaacggctgccaccaccggagagacataacaggaggagaggggtgtgaaagggtagtttagtggcatattgcataaatacatgaaaaaaataaagggtagtgaggggtgtgaaagggtagtttagtggcatattgcataaatacatgaaaaaaataaagggtagtgggtcttttgggatggagtggagcggtggactggcaaaaacctagctccacaatttagtgaagcaactctgcttattccgctaaaaaaaacgataaaaaaaaagaatctatactgtttggcataactccatgtcagtgttatggataaggcatacccaagttttgggttaagctcggtggggcctactatataccaggtcctatacgaaatcatgcctcgtatacgaaaggtgttctagataaggaagaagaagcagagttcaagttgaaaactacaaggactaagcggattgtatccatacttatcttcctagttatatttgggaaaggggatatctgtgggtataaatacaagaccccttagggagagacaaggacacgcacaatcataatagacacaatacatgccgccagacatcgacatcggagatgagaatcctagacataccccatttggtgccacagaggccgacaagaggaatctagcgttatctcttatctcaccgagttcatattcgagggagaatagtaccctgtcgtcgactacgtgtggtgttccatgccgctaagtcgataacgactagataggttatcccaaatattagacttgtgtgaatctgatgaataagagcaacaccggcttcggtcaacaggagtagggctattaccttacagataagaggcccggacctatataaaaatctatgtctcccgtctttttacctcaatctcgcgtatatcctggtacgaacgatctcccatactcgcaaataccgtagtcacgatctactccgtcgacactccagttctaggtaagttaaagttgggagctagagcagtgtcaaacgttctcgtatggctccactctttaattcgttctatatatccgcacatatacaggcacgtggatatagattagccccaatcgttttctctattcagcatcagctaataccaaaatttgaattttaaaacttaactttgaagttaactttgaagttaattttgaaggtttttcatcgaagtttatttttcagcattagcgcttaagtcgctaaaaatataaagttttatctataaattattattattttgccaatacgccgtatgacatattatccatgtttggccaagatggacttgtacataactacgtaccgaatcagtatcctctactttcaaagtcacattttatcactgacatatgagctgacaaatcctttatctacatatcaatgataaataaacggtaaggtcttaggtggtgtttacatccagggacttaactttagtccctgtctttagacactaatttagagtattaaatatagactacttacaaaactaattacataaataaaagctaattcacgagacaaattttttaagcctaattaatctataattagagaatgtttactgtagcatcacataggctaatcatggattaattaggctcattagattcgtctcgcaaattagtccaagattatggatgggttttattaatagtctacgtttaatatttataattaattttcaaacatccgatgtgatagggacttaaaagttttattcccatctaaacagggccttaaccatctacacatctgcatctcagcatctgcatgcgtctgaattactgtaattcattcaggcatcgccggcctgggacgacgatcgactcacgcacaactcacgagtcagaatgccagacacgaggcagatcatcgcagctggtccctagacacgtactccctctgtatgacgccgttgacttttcgatcaacgtttgaccattcgttttatttaaattttttgtgcaaacatgaaaatatttatgttattcttaaataacatttgatgatgaatcaaatcacaataaaataaatgataattatataaattttttgaataagacgaatggtcaaacgttagataaaaagttaacggcgccatacattaaaatagaggtagtacgtacgtacactcatatgcgggtacagatacgatcgagatcgatcgaattgatgccgtcgtacgtcgtcgccatcgccgtggtcgtcgtcgtcgtcgtcgctgtactcgtcgtggcggtggcgcatgaaaagacagcacgcgcaggggcgccgccctgagccggcacatgtgcgttcccggccggccctggtcgacggcacatgcacggccggcgccgcgcggccgcgccttcaattcgatcgactgatgccgatagccagcttaattaattaagctgatccccctttcctctcctcctcgaaatgggaatatatatggtgcaaatcacatatatacagtgcaaagttaaaaactatcgtatgataaaaataatgaacacttaagatttgttcacatcacctcgagtaaaatttttactcacagtaaaacttctactctgataaaatataggagtaaaatttttactcgagggtaatgtggacgtatctgatgtgtctatttttcgatcctacgtacttaggggtgatgtggatgtatctcaaacgtccattttttatatttatattagatatatggtttgcattgcatagaggcaatgcaatacatattttttcggatggtcatcaatgcctgcatcgctcatgttgacctagcccgccgagcgggccaccggcgactataaggagaaaattacgggcctattgagagatgagcgatgagattgggatagggatcaggatatgaaagtaaatagtgtttttttacagtcaatgaatagtgctacaatgagataaaatatgaaagatgttgagatatcatttcccaatcacaattgctaaacggatactttaatttagatggggtttgaaattcggttcgagatttccagaatttctgactacctattctcgccccccccccccaacccccttccctcgggccacgaaattattttgccctgaaagtttttttttcttttgacgaagactgcaccttcgcatcattgactccttagttgtagcttgatgtggtgaaaaatccttatcatccacatcatccatggatgccatgccttactacaattttagcttttagcttttgaatttttctgataaagagtatctttttagctgtaaggttcattagacttcttaaatatcattttttttccttctcgacttagccatctaactattagtgctcgattttccttctcattttctctctgcattaataagtggtataatattcttttagccttcttctttatatacctctgattttctaaaaatacattacttttaagacggagggaatactattagtcaaaacggtcaacaacaccttagccatcacaattggagtggtgtttggattcagagactaaattttagtcgctgtcacaacggatgtttggacactaattagaagtattaaacgtagactaatgacaaaatccatttcataaccctggactaattcgcgagacgaatctcttgagcctatttaatccatgattagcctacgtgattctatagtaaatatgtgctaattatggattaattaggcttaaaaatttatctcgcgaattagttctcatttaagaaattagttttattattagtctacgtttaatatttctaataagtgtccaaacattcgatgtgacatgtactaaaatttaatctcacctagatccaaacaccacattagactactccctccatttcatattataggtcgttttgattttttctaaacaaatcttttaaaattaatcaaatttatagaaaaatatataacatttttaatacaaaacaaatatattattcaatgttagatttaatgcaactaaagtgttcttactaaattcttctattaatttagtgaaacttataaaagtttgataaaaaattccgaaaggacttatgttataaaacgaatgaagtagctaataaggacacaatgaactgttagcggtgacacttgaatttgatgtttcctaccaggaacagtgcctatcctgtggacgtccgtaatgttgctatccagcaaacgtatatgtttgcaattttttttcccagagtattgctgttgtccgaggtttctagtagtattttgcttttccttttcttaatgacaatgacaaagacattaaagatatattagagaggttcctatattattcactgcgcaagcaattggttatgagatgttgattaatacgagatgatattaagggcagtcccaaaccaataacttagctagtttccgtactattattaaatatattgctagataagaaaaaactgatatagtaagagagttaataaagaagagagagaaaagataaataaatcatttctcatgtaacaaaccagctgcacaagaacaaagaattaaaacgataggatagatggatgaaaggaaagataagagtgctgattggatggaaatttattttaagaaatcaccaattgggtatataatttctatacgtaatgtctattttacatatataataagtacggaaactatagttgatactttttctaaagattgcccttacacacccacaaactggccagccaaaatctccagtcctagctagactaaaactcttgctagcttagccttttttttttgcaaacttacttgttttcgcgtgcacactttctgaactgttaaatagtgtgttttttaaaagaaagtttactttaaaaatcatatcaatttatttttaagtttcaaataattaatacttaattaataatatgcactaatggcttaccccgtttggcgtatgttctcaatcttctcaaatcctctcctctcaaacactttgaaaattatgccctctttaaaggtgcttctaatagctctggcttcttcgagaatctctggttttgtgaaaatctatgtttttcatattctcgctagatagatcctcaatagctatttctcagtatctcgggctccttacatagaattgtaatctaaggccatgtttatatctctcacgatccaagattctttgaagctcgacatttatagcaccacaaatttatatatctcgatatgcgattagattgataatatttttgggtgaaacattttattcctattttagataaaacatataattttaaataactataatgttatattaaaaatcaaatttagcatggatctagctaggatctgaaagtgtgccaatcaaggtttaaatttatagactttcagctccaaaccatagctagcctagggttgaccaggggtacgtccagggcctgagtccaccctgggtaagtggcacaggcagctaattaatggacagcattttcacagtaagcatatcaaatggtgctaactcatgaactatttttgttagtacacgtactccctctgtccctaaatatttgacaccgatgactttttaaaacatgtttgaccgttcgtcttattaaaaacttttgtgaaatatgtaaaactatatgtatacataaaaggatatttaacaatgaatcaaatgataagaaaagaattaataattacttaaattgtttgaataagacgaacagttaaacatgtttaaaaaattcaacggcgttaaatatttaggaacggagggagtgcatttcaacatctcctcgtccacaactccagaatgtgcttcgccgccgcgcgcctggaccatacgtgcaataagctaagcaaatgggcactcattagcagcaagaaccccacacactacgtacgagtagtcgagtaacagtgtccagtacagatcaggacgatcagatcatgtaccctaactgatgaagaacagtgtaacagatcaacgaataataaatggagagaaattccaatcaagatcgagatggcattcgtccgtactgttagctgctgtttgctatagatatatcatgacagcgcgcgcatccggttcgtaggtccggccggcatgcaaaagagagatcatgatcgatatcgatcgatcgatgattagtgtgcaaatggagtggaatgtacgttggcagtagttagacgacagcatatggcttgatatgatggcaaatttgtaggtgggtgctattggcaacttttttttttcaagaagacaatcacggtcaagacagcaaaatgccttatggtgatatggagtcaccaaccaccccgatctagccaaaggccaaatcaagatgtgttttgtagaaaaaaaggctaaaccggctagcgaagctgatttagatatcaaaatcagcctctaagccgatttagatcgatgtgaggataactacccatctcgtgggtaaacggaagatttacgagacaaacctacaaaaagataatcgcactctcacagcgatggtggatgacttacggcacaaatcgacaaagatggactaaaatagggtacgacagaaaacatggctgaaaagtaaagggaaaaagaacgattcgattgcagagattcagatattgggaattgggaagattaatcaaaccggccttggcccttatatagaggttggtcttgcctcctacagagattcagatattgggaattgggaagattaatcaaaccggccttggcccttatataggggttggtcttgcctcctacaagtcctccacgtccaactcggaatataaaccaatggaaacctggaacattccttcccaagcaaagaaacccaagacccgacgaaattcgcttcggactcagactctgatggtcagaccggccacatgcctgccataagaccagccctactagccggtcagactggccacataccggtggtctgaccggccctgtgaaggaaacccgacactttacaaacttttgcaattttcctctatttcatccatacgtgccaaatttaagtgtaaacacacatgctcccttgtctttttggtaaactttgtgaacctaaaagcatagaacacgtggtcttagaacgataatctaattaccagccatatcacttctcaagcatcttttggaccaattgaaagttgtgcaattccgacctcatccatggcacgaaattctataggcaatgcaaacactatgttgatatccatgctctcccttggcggcaaatcatagtattgattatgattcagaagcacaaatataagagagaatttgtatagtatgtcagattcttgcaagatgccgctgccgcttttccaccgcaacatctctttgctgccactcgcggcaaacttttccgtaataaaaagtggggtgcaacctcgctgcacgcactgcagcttagctcacccccacagtccacgaccacactgcctcactgcagcagcagcagctacgatgccattgccgagctcgtggctgttccacaagctgcggcggaggagaagcgcggcgagaggagaacccgacgtcgtaataaccggtgaatcacttgtatccaagttgtcctcatcttcatcttgagtaatcaccggcttctcaacttcaattggtttaggcctccactcttgtcttggcggcggccgcaactcgttgaaccttctatctctcaattcttcggctttcttctctttcaacttttgagcacaaagacattgcaaccttctctttcgagtagcggtcaagtttgcaggcattcacctttactttggctctgttacaggagcaatataatgtcccttgttaatgtatttgatcaaaatggaagctcttgtggtaccgttgaatttcttgatcgcctttggtccaccccccccccccccccccgttggaccggtcagaccggctacaagctgtcggtccaacggttggtatttcttaacgacattactggaaatataaattcccagcaatggcgcagaaatagtcctggtatatttatagttacaaaaataattcgcaagcgcatggatgtaccattatagcatttcacccgaaagtattccaaggtattgtatttatttaatcccaagggaatatttataagagagaactatactaataatttatatattacttatatacatcaaagtctaagcagtggttaattcatttatactgggtagagtgacacaaagtaagaagaacccagattatctcactaaataaatctaggctgtgtggaagaagaataagaaaagaaatcattcctatacttctaatatacacttatctttagtttacacttgctagtatacagtcatgtaaccaatacccctaacagtgcccttctgatgtttcgagagaccattcctgattgtcgagttccttactacagcccatcatggccatccaactgagatcaaatacggaggagtacccaccctaggaaagtgtcaaaggaatatatactaacgtggagaaatactcatacggaactgtcaccatcagcggcccacctctactgtcccgcagcatatatgccgaaataatgatacttaataatctaagcattacgcttacattattaaaatactattccctccgtttccggttataagacattttgactttggtcaaaatcaaagtttaactaagtttatagacaaatatagtaatatttataatagtaaatttatttcatcaaatcaataattgaatatattttcataataaatttgtcttgggttgaaaatattgctactttttttctacaaacttagtcaaacttaaagcagtttaaatttgaccaaagtcaaaacgtcttataacctgaaacggagggagtactctatatcctgtagaatgacatagagtaatcattcgcacgaacattattaaacccacaccattgcacctctctagtaagctagtcacacaactatatcgggacaaatataaaataaagccggtactttgataaagtaaagtaccgaaggtatataaagaagaatattatattaatttgatcagtcttacaaaagaagggagaaaagctgctagagccatacccgaaatttcctgaagactcgaggactaagaaaactattatattctactccactggcaccagagtactaaactaaacttaaaagagagattaagagcagcttcttacttgagtgtgtgttgaagtggagggagtgaatcctatttatagcttgagtatgatggttttgatagttggaatatgtaaaagaatatcttagattttcacaggcgatcagcttaacctagtcgcttacaaagatcaattttcacaagcggtgaaagttcgcctatgaagattgttgattttcacttgcctttgatcgcaggtggggtgttgggctttttgtgaaaactctttttgtttgccacttatttgtggttttgtagtagtgtgtactgcttaaagcacttattttaatcaatttatttttgaaaatattttaatttatcattaagacaatacgaggaaatagtaggtttagtgatctatttctctctgagatattcttttacgtattctagaaagagataatcatgatccatgaaaagtagtagcatgttctttcagcattccaaaatggttggccactactgtacatgatgaaatttcaaggataacgaaatactagtagccagcgcgtccgcaagtggttgtgttctcgttacatcattttctgcgcattcaagatatactccatatatatctgacggtgggcatttattttccctctagtcctcctaattagtttaggagataatagaaagtataatatttttccttttatatattaatttataatatttcttaacatatacacatatgataccttacaataatttgtgacaataggaaagtatatgtggccgtttagtattaattaatttgtttctaccggccatacatatattcatattatcatgtactatctccatcccaaaatataaaaagttatatagttaaacacgattattaagaaaataaatcgaattatatggtaaaaaaaatgtgatgggttgagaactggaggtagctaggtaagaaaattgaatggtggaagactagagtctgaagagttatgattggttgagaggggaatattagtcgagatattattatgttttgagataaattaaatgctaaagttgttatattctggcaccgaagaggtggtacagtatcatgcgtgcatgcatgggctcatctgaagaacctatagctaatgacagatgaatacaagccggtacacacatcaaacatgtacagttattcttttttttttttgccgggaaaacatgtacagttattcgtaggtacgctctacatggatccatattatttgcatggagatggcatccatttacttctccttgtcaacttgtggccagatcgatcagaacagtgacacacacctgctatagatagcgtgcagcgatttggccctgcatgtgtgttcgcgtgtgtgttcaggcctcgatcggagcagatctgtgcgccactgtttcaatcagttgctgaagacttcaagttactgcctacccctgcgtgatgagaaaagaaattgttgcgtgtgcaaccaacacgtacgccttctgtacacgtacatatagggtacagacacagacacgtacgtacaatttatagagtactcccttcatatttcaaatgtacgacgccgttgacttttcgaccaacgtttgaccattcgtttcattcaaaatttttgtgtaaatatgaaaatatttatgtcatgctcaaagaatatttgatgacgaaacaagtcataataaaataaatgataattacataaattttttgaataagatgaatggtcaaacgttggataaaaagtcaacggcgtcatgcattaaaattaaaatattatggaggtagtatatacacaagtctgtcatgtgtcgtccatcttttcttttttttttatttcaataattgtagattgtgcattctaactatacaaaagccgaggaattcacggctcccatggttaaacgaaaaataatttgtaaataaagcttttatatacgtgttcttagcgatttaaaaacaaagtctgaaaaataaattttgatgaaaaaaaaaccctaaaatcaactcaattttggctgataagtataagcataagcgaaaagatggggctcaccgtagccaaaagatgtgagtcatctgagccaattgtgctatatctgaatctctttcagatttctggttgtaaggaagatgtagttttgtcccagaattagcttgtgaggactctttggttaaagtacctagccagctatcaagaaaattcaccgtagccaaagccgtgtgtgagtcatctgagccaattgggctagatctgaatctctttcagatttctggttggaaggaagttgtaattttgtctcacggttagcttgtgaggactctttggttgaagtacctagcctgctaggtcatttaactcatcagcaaactgattgatcgatcgatttctttcttccaaaaaaaaaactatataaaagccggaagtgtattagttgtatcatcttattgataataattgtctctcactaccttaaaaaaatattatgtataaagaagagtttacatgtgcatcctacgaaagattaagaggtaactccgttcagtcataaatatttaatatttaggataacattcggtcacacttttaactttgaattaaaataattttgtgaaatcttagtaataatacttttcaagtcaaatatatgctcatgccaattttaaagtgcagtattcgatttgatagacaaaatttcaaaaaaattaccaaaaaatttacaatatttatgagcaaagagagtactatatattgagatatagggagaatcccagtgatctaatctatccttagtgccttagtggtgtttagatgtaggggtgtaaagttttggcgtgtcacatcggatattatatagggtgtcgcatggggtgatcgagtacttaataaaaaaaactaattacagaatccatcagtaaactgcgagacaaatttattaagcataattaatccgtcattagcaaatgtttactgtagcaccatattattaaatcatggagcaattaggcttaaaagattcgcctcgtaaattagtcgcaatctatgcaattagttatttttttagcctatatttaatgcttcatgaaggtgttaaaatgttcgatgtgacataatgtaaaatttttggcagggctctaaacaggcccttagttcttattcggttagtccccatgaaaaaggaactgaagggaatcaaaagggaataactcatccaaatcccgatctagatcctctagctttattcgatttaaagaggattgaaggtcattggagaaatcgcagggaacaattctacaccacaatagatatgaaataaatctgctcgaattctttcatcctgtgaactaaccgaatatggattggatggaggattaaaagaacaaagctttattggatccgggcatccgcgctgagcatgatgaactgtatctcttgaatgcgtttgccggccatgaggctaaatgctcaacacgtttttgttgcattgctgtctgagtttgtaaaaatgttctcccagttgttttggtagtgagctaggctggatgttttctcatagattaatcagctttgacaatttgtttgtcatgctttttgctatccagatttgtcctagtgtgttttctttgtgacaagcacttggtacactatggccgagtttagttccaaattttttcttcgaactttcaacttttctatcacatcaaaattttcctacacacaaactttcaacttttccgttacatcattccaatttcaaccaaactttcaattttaacgtgaactaaacacatcctaatgcttgtgctcactcttttagttggttggttggtaataagttcgtcactttccttatttgaaagtacgtactgaagtacctagccagctcggtcatttaactcatcagcaaactgattgatcgatcgatcgatctcccaatcagagcggcggccagtgtccagtgtacagtattcagtcttaagtcttccgccagttaatataaccaacaaaactggccttattcggtttggaggttacttgattccataggaaatcttgattcctatgaaataaaaactattcatacattcggttcatcggattcaaatgaaaaaattccatagaaaatcttatgccaatcctccaaaatgtactgattccatagaaatgaaaacatccgctcatcatcttttgctcagctcattgaaggaaaaaatagttgtactccaacactttgttttgtacatatatagattcctttattatttctgcatttcgtattacggcgatttggaaattcccatgaaccgaagaggccctcaatgtgaaaggccgtagtaaatactactccctaactataaattagatcattcaattaactcggtggcagtgatgagctaataacagaagtgcagatagagatagagaaagagagagaaaggagaagagctaggtcagtcagttacaaagtctgaattctgaaagcacattgaaggcctggcaagcaatgcatgtgccactgtactactccataaacagcggaacacaccagcctgagaatgcagcatagcagcatagctagctacctctcgatctcttccctctgaataatggctttcgatgtgttagtccgtaagagtgtactactccatgtgaaggcattgtgctatccctgtgtacaattaaatggatctctagatgtg

SEQ ID NO: 4662 - DNA, 27226 bp, Oryza sativa
aattcctgcagccctgagcactgcctttttgacaagacaaactccaaaaacacagcaaaaagattatacagggcaatatcagcctgttcaagcatggagcaaccaataatcttcttgccaccatgatctctgatggaaatattacaagcagaccatctcaactactcctaagagtaacaagtaacagtagcagcaagtgcagagctcatccggaaacaccatctcaactactcctaacagcgcggggcaaggcaagctagagaccccccgcatatttcgtattcagacaacacaatagcaggcaggcatgcatgcatgtgggtttcagcacttgagctccaatcctctgaataaaatctaccggaaacaaacctctaatcgccccccggaaggatggacccgtcccgaggagaaaaaaacaagaagaagaaaaacccaggatttacggattggattttcttcccccctaacaacaaacagaggatgaacaccatcaccaccaccaccaccaccaccaagcacggaggaggatcaggagagggaaataccttggaggcggcgcttggtcggtcggagagggatcggaagcggccgccgcgcggggtggagagagagagagaggggggagaaggggatagggaggaggaggatgatgatgatgatgagagggagagatctcctcctccaatggtgcgttatttatactggtctccgttgggacggaggaggagaggagcggctttattttcttttcttctcttttgggaggacccacacaaatctcaagattttgatctccctttgttgcttgaaaaggcaaaaagtttgtactactaaattgtttatcattatcatatccttggttttttataaagggtttatcatttccttgttgataagagatttattagcttccttgtttagctatgttagaggtgtttcggttttagtatgcatgtgttggctagtgaatatttttagtgtcagttttatgtttacattttataaagtggtcatggctataaatttttgctacgaccaaaatttttgaacgtgatagtactgtgtagtattacgattctggtttaccctatacgatagtgcagcttggattagcttcatcaccaacgccttcagtatggtgacgtctataaatttaaatttgttgaccatggggaagtcgctcgcgtttgatgatattgtttgctccgtatagttatgccatctatataattctaacggaaaatttataaagggttagcctatatttatatggtacgtcaatattctctagaacatatgatttaataatagaaaatctacgctagtataagagaagtgtaaaaccacatcttagctcttacataatgggtgtgttcggtggacatagctgcggctgtacagccacagcatttacaacaaatgcagtaaaatttgtaaagataatattgtactgcatccagccacattcacgactagttgcaatttagcccaagccaacaagcccaacatctatcacacgtcctagtgatatgtgaaaaaaaaggagacgctaaaaattgcgaaaaaaaaatcggatgagtaccgaaagtttttcttgaaaaagaattatggttaagagctttaattattttccgaaacggaaggagccagctaggctcctccaatcaaccgtggacatatgtcgtccgtccaaatatcattaatccctttctcgaccaaaaaaaaaagcattcgtcacagtgccaacactcccatccagctgagtagaaaagaaaataaaacaattcgtgagtctccggaaaagaataaagaattaattgtccggaaaaatgagagagaattcgtgagcaaccacccctctggttgactttccctcagagcctcctcgggagacgagccaggcaggcagggtcagacaggcgcgtgcgagcgagcggtggagacgggccgggctgggccgggcccacggggcggaagtaacgtgacacgaggtgggcctcacgtcggccggcggcggtcaaacgtgaggaagcccgtgcgcgtgcggcggcggtgggtaggtggcgctggctggtgcctggtgcctgcctgatggagtggtgggtgtgggtcagctcacgtactcattttgagttgacgcgggtattcaggttacagagaagtttaatagtatagtccactactggctccaagtcatctagacaacgtaataaccaatttatacaatagatgcttactatactattaatatctagtcccacctgtcatacttacattacgtcttggagtccgtgctgcagctggttacaaatctgtagcccgctgctcttctctcttcctttatatctttaaaatatgcttatagctggcttatagcctgctattgtacctgctcttaatgtatcacgtcgctgttaacttttcacgtaacgtttaattattatattagttaaatatttagtgtaaatatttaaaagtataagttaagagtatagtttctttcatgataaaaaaccataacaaatagatgatatttatataatctttttaataagacaaatgataaaaaatcacattgtgaaaggggctgtagcctagtggttacaagagactcagtagcacctgaggtcctgggtttgacttcttatgggagcgaattttccaagatttaatggcattgtgcttttaatagtaggtgacatatcctcaaggatttgccggcccggtccagttttcaaaagatgcttatatgggtagggttaaatggcttcattaaaatgaaaaactagattgataacaacattaactccgaaggcaattagttactatctacaggagcgagcagaggttgacaaagctactccctccatcccaaaatatgaggcacaaccacttttttctgtctcataatataaggcgtgcgtgtatacatgcatacattaattattccaatcacattgcttgaatatatagatatgattcaatcaaggaggtgattaaattctttcttggtctttgtgttaggagtagttgtaccttaggacacccacaatggtaaaataaggtgctctctataaaatatgtacatctcagcaatagactagattaatagtaaaccacctcaatagtatgtctacatgggtatctatagctctctaatccattgcctcgtttttctctatagactatctccaggttagtagatagctttgcgcgctctctctcttcatttaatctcttccaagtagaaaaatatgctgacatagatctcttgtagatagcctatagataatcattgcgggtgcccttatattttaggatggatggagtaataaaaataggaagaaaagaccaccgaaactgaggtaggatgaagagcattggcattggcaccgattagattatcgtgcttggtggcgaagaacctcatagagtctgcggtgcaaggacgctctgagctcgcattcatcgtcacgggcattggaagaattgttttcagggaatagggaagtgatcatcgcgaagattcagcgaaatcaaaataatgttagccatactctagctaatagaacccggtgtgaatctcttactgagttctggccggatgataaatgtaatttcatctcacattttgtttgtgaggacttatttgccacgtctaaagttttttttactagttttgggacgtgctacctccattccatatgaattgggacccaccttgttgattcctagtaaagtttttgtcaaatatatgtactacaacttataaattggagttataatactccctctttcccaaacataattatttctctattttcgtaactaaaaatcattatattttaggatagaggtagtatgtgtttaataaaattagagtcaaacactattcttgctctcttttaaaacatacacacatgttataaatgtgtggtgacggtagcatatgtgcgggtacgattggtcaacggcctagccggtcgaggatcatgacacttcgtcgattggtcaacggcctatattaagagaggagcttccataatcaatgcttcgaggatgtggggatgttggcttcaactaaaacctcgttaataaatattgtgtctaagtatcgtcatgtttagattttttatgatgctctttcacgttttgatctcaatgtaggttttttttttaacaattcaatgccacaaatgtacactgtaggagaaaaattttgagtgctaaaactgcacttaatataggacagatatggtatttaagtatatatcactggaatataatgcatttactacttcatggagatgaattactaactgtaagttcgtgggaaacttgttttcacagttgctgccgactgggttaaattagcccatctggggtttatatttagtactactaccagcccagaatctcgcatgccatagagccacttgtcatttttgttcatcctaagtctcaactctcaaccacggatactttgcgtcttgtctttcaaaagtggtacttaaccgagttagtaattaactaattattagggggtaggagtacagaggaaacaaagcccctgaccagatctaccttcttcaaaacgtcaacgttgaattttaatgtattacgttgggcgaagttttttaattcaattttgcatggtatctaagtaaccctttgtcctaggatggtttttagggaaattaagaaagtacagtaaaagattatgattgtttaagaatgaaattatgtgaaaaaactataaaagaaaaatagtggtaattggttgagacgatggataggtgaataaatagatactccctctgttaggagaaaaaaaaccatagttttagcctaatgtacacttcttcctcgtattatctctcttatcattttttttcaattttatgatggacactatagttttttaacctattgtttatatttttttagacggatggagtatttactatctccattggtttaagagtaccattttaaccgtcacaatccacgtagtaatatctaattctcgatccagatcactgatcggtgaagtgacctgtcaacgtagctagcttctctccacatgcattcagtttctacacgaatcatatcaaaactaacgaacgtgcacactgctgaagtataccgccttgaaaacctggttattggttgaacaaaacgaaacagggtgtacatgcgaatcttgattgaattaattaacaatatataccgagaattattagagtgcagtggaagtgcatgatcccatgtatcattatttgtcttggagttggttgatgcattgactgcacatgtattcagattatttcagagctgcaacacacagcaactttgattgtagcagtggtagattccagctgcagaggcaagcgttgaatgattgcaaagcagcttgttgacatgtactgtagaagcagtccctatcgtagcatgcacgatcattgaacaagccaaaagtataattagtatagcgcaatgcaattaattagttaattaattaatggctagctctgttcctgtgttccatgtggaagtttctcaagcaagttcttcgttcctgggtaattagtttgttaattaatttcatggtgacgaacacctttgccaagatacgaggcatgcttcttctgaatgttttctagaacaagggatatatacttgttctcctcctgaaaaataacaatcaattggtgttcgggaatgatggatcacttccgataagaaatctagtgattctcttctaaaggcatggttggttcaatggggcgatgagagctgtaacgtgtaatggactaatggtcacaagatgaggaattgagaaatcagaatgtattcttgtgatcccttttccctaatcttgttgggccagtgactcggctgttgcatcaaccataagaaacttggggagtaagtccacttcaactccttaaatatatgttcaatctgattcatgtcactcaatcatatcttgactccccaccattaaaataggtataaaacgatctcctcaatgattttaagggtggttttcattgaagtgactcgctgacttagtctaatcattgagtcagcatatggggcccacatgccatccccctttctctcctccacccctctctctccctcaatcccttgtcttctggctaggggtgggtgttcggtcagaccgaaaaattcggtctcggtcttccgttattcggttagttcggtcattggaaactcaggaccgaatttcatccaaaaaaatctcaggaccgataaattctgtctcggtctcgatctgaccgatttttttcacagccgctggagagtggagacggaggcgacgccgaggcggaggcggaggcggcaccggcgccggtgctggaggcggaggcggcggagggcggaggcggctagggatgaaaacggagcggatagtttccgtccgctccggacaaaaacggatacggataccttttggatcggataattctcggatatttcggatacggatacgaatacggatattttctctcggatacgaatacgaatatggtatcagggtttccgtcggatatagataataattcggatatccggtgaacagtgctattcggatatccgcagtacccatgagacataccccatttctttctaactctataaccttcaatatacctttatagattttaatagtagtttatctcttaacactagtccatactattaatattatttaaattttaaaaaatatttataaattataccacattttatataaaatgagctaattatatatgttgatatttatttctattagacgttgagttggttttcgtgttccgagaaaaatttgtttccgtattcgtgtctgattatattcgattcttattcgtattcgagataatccatatttgtttccgtattcgagctatccgtattcgttttcatatccggtaaaaaaatatgaaaacgaatatggtatgagcattatccgtccgtatccgctccgttttcatccctagaggcggcgcacacggcggggccctagaggcggagacgacgcacagggcagctgcgcggaggtgacagactgcgggagctccaccgtcgccgtcggtgtcaccagcacgggggagaaggggatggggatgggaagggctcgatggatggaggaggatactggtggtggttggttggataaggttgtgggtggataaggttggttttgctgaggaggtattgggcctaataggccaatgctatatttcggttttttcggtcaattcggttaactgagccctaaaaccgaattgctcgaactaaattcggttagtagaaagtgctgaccgaatttttcggtctcggtctcagtcatttcggttcggtctttttctgcccacccctacttctggctttggcggcaccagtaatggccagcgcgatgcttgggtggagggaggttgaggagaaggcaacggctaatgggcagggagggggatgtaaaagcaggcggtgctagagcctgttgtcgtgagcctcagtgaggaggagaccaaggtcactgccgccttgtctccgcctctccatctaggaaggctagtgtcatccacctcaaggctggcggggacacgttcaccttttcctccttggtcgctccacttcgaggctgcatccctgccgtccaagccgctaaatgtcatccccgattttgctacaccctcggttagggccgtcccgtcaaatttgggggccatgtgcgaagtcataaagaaggataaaaacttaattgataattgatgatataatatgacaataatttatactccataatatatttgatagcaatgtaaaatggtctaaaataatatacctgtgcataatattcacttgaaaagcgacattcttttagtgtttcttgaaataaaatcttcaatgatagctttatattgattctccccagcataccaccctcaagtgctatgatagccaaaccattaagtctttcttgtgacattgtagatcgcaagtatgacttcaatagcttcaatttagaaaaactccattctgccgatgcaatagtcacaggaatggtcaataaaattctatatgcaatagttgcattgggaaaacaatcatgccgcttcaaaaacttcaaaatttcaacagggcccaacttttcttgggaaatgaaactttggagaaaaatcaactcgacatgcaattcagtagcatcaatatcaaattttccatcctttttaagtgcagcctcgagacgatcacaggaagatttcaagtcattgctatcctttgatagcaatgtgtcagaagtaaacaagaagccaaaaatcttttgataaccttgatattgttcaaatctcctggtgagagaggaaatagcttgatcaataacatgaataaaatagttgattctaaatgaatcctctgcagtttgtgaggcaacactttcttcacctcggttctcatcaaaatgtctctttcttttaatttcacgctttttatgaaatgttgtaccaatattcatttcaagtgcaatttctttagacatcttcaatgcatttaagaagccagtttctctataacctttgaagaaagaaatcagcccctgcactttctcaactgcaacatcaataagcatatcctttccttgcaagctcttacttactaaattaactgcatataaaacttcataccagataactatcgccaccaaaaattcatactctccaagttcattatttgccaaacctttagcttcactactagttaatggttcattatcactttcagatacttggagtagagcctcacgtatctttgcacattgaaatctaatagcttttacactttcaacacgactctcccaccgagtagttgacactgacttgagaatcaatcctgtcatattatcttttagaatatgccatttcttagtagaattagcaaaagtagtatagatccattatatgattgcaaaaaggtctttagccttaccacgagtctttgacatatcacagagtgccaagttgaggctatggcaaccgcaagaagaatagaaagctctaggatttatatccaaaagattcttttgtaccccttgatgttttcctttcatatttgacccattgtcatagccttgtcctctcatatcatcaatatctagatcaagatcctttagttatctctctagcacatcaaaaattccttgcccaattgtatcatttatattcaaaaaacctaggaaggattcctcaatggaaacattaccttaagataaatcaacatatattataattaaagacatttgttctcggtggcttgcatctggagtacaatctagtatgaccgagaaatattttgcgctctttattttcttcataatttcaaccttaacatcacaagcaagcaaatgtatcaactcattttgaatcctaggtccgagaaaatgaacatgagtttcctcatttgtaatacgccgaatatgttcttgaataaccgagtcaaactcagccaacatttctaccatgcccaagaaatttccattgctatcttcatacagtttgctattagaaccacggaatgctaaattatgcttagctaggaattttacaattacaagaattcttaacaaaacctttctccaatgatccttttctttctcaagttgtcgttgtgcagctttatcaatagtttgatccttctgcaatctattacacaattcataccaattggtcatatttgaaacatgatttggacttgtttcatgttctctaagtctagaactcaaatgtgaccagtcattgaacccctcatttgccaactgacctttgatagcgatgctctcttccttttgtaaataatttgcaacagaaacagaatactctatcaagttccttggaataaacaagccaatctctatcatacttctctctgtttgataggattctggtgtataataatgcagatctcctaaacaatctatctttaggacctttctgaattgataagtcccttttaggacctaattgagcaagaatgtcaagttgtttagcatcaagagaatcccaacaccttggatcaaaaatttcaggctgaaaagcagtgtctgaactgtccaaatcgatatggacactactgtcatcaacattatcaccatcaccatgattttccacttgttcatgtgtgctctcactaagaacatcgtcaacagtggtttctatctctgtttcaccatcattaggttcattggcaacatcactatcaagtgtctgatcaccggatggaccttgtgattcttttgtaatatacctaaacatagcccctctctgagattgagttagatcttctattcttttttttcttattacgcttttcatagtcggagtcatatttcctattccgatttttcaagacatgtcttcaaaattaaaatacaggatgtaactatgtaaagaaaaaaattgatttaatgtatacagtagatgaacctaaaagcctaataatctatacatgatacactaaaattagagaatagggattagtggattacattaccagattgctgattagagtaggcgaccagccagtagccgactaggcataggggacaggggcgtcggcactcaggccgtcaggcgctgcagccggcaaggacttactccctccgtcccaaaaaaaggcaaaccctgggtttcgtgccaacgtttgactgtctgtcttatatgaaatttttttataattagtattttcattgttgttagatgacaaaacatgattaatactttatgcgtgacttatctttttaattttttcataattttttcaaataagacggacggtcaaacgttggacacggaaaccagggtttgtcttttttttgggacggagggagtaggcaggcataggcaggtaggctcgccgacgatgggtcacaggcgacaggcgtcagtttctcagttctatcctccaggcggcgacgacgacatggcgtcaggacttagcgatgacaccgcggcaatgtgcaggatgtgaacggagagagagagagaggcgaggcgtcatttcgttttctgtgcgatgccgcgatcgaaggcggaacaacgtaaacaaaagaagaaacaaataacagattttcagggctaattgggctaccaaattacttattgggctacatctatatacatatatagtgttggagttttgggccaaggaggccctgaaaattgggggccctatgcaggcgtgctggccgcaaagccccagggacatgcctgccctgggttgggagagagatagagagagcgggggagggggagtgctcgtcaccagccgccgctacccccctcgcccctcgtgacttgccagttgccatcaccaccaccagtgtggagaagagaaacatgatgagccgagcagggaggaaggcccgaattggaaagagaaaggggagagagataaggggagaaagagaggaggaagaagggaatgagagagaggatgatatttgggtcccacatgctgacttagccggttggactaggtcaacaagccacatcagtgaaaaccaccgagaaagttattttgcaccagttttaatatttggggatcgagaaatatgaatcagatcggacctatatttgaagggagttagagggcctatttgggagagcttctagcagctgcaactttccgcagaatcttcaagtcccccaaacagttcaagactacgtttgttggaattcctaacagctgcagtttcttacataatctctagctcccccaaagagtccaggttgtcatccagattttgaatagtacaatagtaaatccttaacttgcctagatatcataagcgagaaagattttctactacaaaactagttgtactgatcgaccgttcccagagtttggaatttcgtttcgaaatttctgaaatttcggttatttcgccccccaccggcaagtttatatctcgcccgaaatttttgtttttttttttgcaattttttatgaatttggtcaaattttattcaaattcatttcaaatttcaaataattacggccaaaaaaattcaaaatttccgaaatttcaatgcctccgatagaaatagcaattttgaattttaaaaccctgatcgttccccactttgagagcgttacgtacatgggcgcctactcctcatccgccagaccgaacggcacggcgtggtcgtgattgtcgccgtcgtcgtcatcatccgccaccaccagtcgctacgctggtgagggctccggctccggctcggcagccgtcgctgtaaggtcgagcgggcaccacgtgttcgagatacgcgactactccatcctcaaggcgatcacccccaacaccaagtgcgtcaagtccggctcgtcaacgccgaggagcgtgtccggccgctcccgtcgctagccgttggggtgagagaggtgttgggggagaggggaggtgaaaatgcggacgagaggtggtgggggagaggagatggtgagagatgagtgaggaagtaaagagagggagatgagtagaggacttgacgttgggagggaggagacaaaaggagagggatatgacgtctccttatcttgtgcgggccaaaatctaccgccggcaaaaatcccttcttcgcatgtagatctcttatgaattttcacaaacgatctttactactccctccgttttaggttataagacgttttgactttggacaaagtcaaactattctaagtttgactaattttatataaaaaatagtaatatttttaaccaaagacaatatattatgaaaatttattcaattatatatttaatgaaacttatactggtgttgtaaatattactacttttttctacagagttaggcaaacttagagtagtttgactttaaccaaaatcaaaacgtcttataacctgaaacggagagagtagacattatctaaatctttttacatacaatattttttttaacccaactagtctaggaaaaacaaaaggggaaatgttcgcaaaaaatgttttttaagtaatgccacacataccatgtacaccaagtcaatcaatgatacgtagtgcatttcatctttaacacgcccacagctaaagagtgtgggtggccggacgcaaagactaattgaaccgaaacaactgaacaggaaatctggatataggacggcctttggtcattgattcattgctgcaaaactgatgcgatgaagagacggggtaaaaacggtattgaaatttcccgaccgtaccgataccgtttccgcaaaactaatataataataatatttttaccgatgttaccgttttcaaaatttagtttttttaatttctatcagcgtagcattgaagttgacattaaatagatgaatttataaatatggaaatttcccgatcttttccgttcgttttcgaaaaaataataaaataatataccgtttccgaccatttccgaccgttttcatccctagatgaagtcacgttgtgaaatcatgtgtgatgaataattagtaaaagtaattattgtttggttcaagttgggagaaatcattactaatgttaaatttagggccttcttgatcacttctattacccagagctcgatcttttctcataacagcttagagaacaagtaaatatctatctattatatactaaaagtccattaaacttcctacaaacgctcctaattcgccacgtgtcatcttataaacgttcctaagtcgccacgtggcactataataaattagagaaatttctaaaagttccctagcaattgattttcattaaattaggtggacccattatttaccaccattagatttatcaaaaaaaaaattgcctaaccccagaccaggtccaccttgggcatgtacttatattactactagcaaaagtacccgtgcgttgcaccgggtgattacggagtgtgtatattgaccaaaagtgttgtttggtttagcaaaagtgtccgtccgttgcaccgggaagcgtacagatcagaaaaatatgcaattaattaaaatacagattcgctgaaatatttggtatttttaagtaggtatgtgtataattaaataaatttacaagtaaagcaagtgtgagaaataaaatgatatggttaaatttaattttattaaattctccatgattagttgcgctctttgaaattttattggaattttgagagctaaattgctaattttaataatacaaacatcatttaacaattatttaattagaaaaagaaagaaaatacttccttttaggtttgcttcaaaataaacacataataactatatttgtaatgcttctgaaaaaaataaattactaaaaatgaacttcttctctttttcttcggcccgagggacctgaaatagacttatttccgtccgttgccggtcggcccacgaccttatgaaaaccctaaccgtaaccctaactctccccctcccccccaagccgagtcggccgcctcccccactcccgacgccgcctctcgccctccccctttccccaccggcgccgcttcccctcccctcgcctccggcggcgctgctacctctccccatctcccgcctctccctctccccccagccggccgcctctcccaccaccggctcccatcctccacgctagctgtggtggcggtggcggcgcccttttcccatgctagcggccacggcttcccccacggcgagcggcggcggcgcccttcaccacgctagcggcagtggcggcggtggctctccttcccatctcgccgacacgacgcagcgacggcggggtgcggcggagacggcggcgacggccgtccctctccctctccccgtcggcgtcaacagcgacgtcggcttcgtccgaaggtggatccatcagcggtggcggccaccgcgggcggatccgacagcggcgctcccttcggcggcggtggtggcgtcggcggccgccctttttttttgcaatttttttccatggctattgctaaccgaatcagattgagcacgtggacgaatgggacgaaaatagatgtgacgaaaggaaaaatatgaatatttatattagttatagattatagaaaaaatgccagtgcgttgcaacgagtaaactaaaattatattaaatataaaaatattagatgattaggatttagttttacatgatatgagctctttaagaaaatctattcctaatgaaataaaaaaaagttcaatttaagggacctcaagtgaacttattccatgcggagtagaacaaattcgggacagctttagggacattaagtaaacttattctgtgacaagcggcccaatagtgtgggcggcctgggaaggcccgacgagggagaagctgagcggttcgatctgatggatggtactgattgatcgcgccctatatataaaagttgaaagatcaaaccctaaccctaaaaacattccccaccccctccctctctctcagtggcaccgcctctctccctccgccgctcctccaccccccccccggcggcgccgctccccctccccctccacggcggcgcctctcccctccccctccacagtggcgccgctccccctccccctcgccctccacagcggcgcctctaccccctctttctcgcctccctcgtgcgacggatccggcgtcggcggtgaccgtgggtggatccggccgtggtggtggcggccgaggacagatccggcggcggcggctcccttcaacccctctcgcctccctcccgcggtggatctgacggaagtggtggcgtcgacgccgaccgcatgtgggctcggcggctgctgctccccctccccggtgtggcgacgcggctgggagcggcggtgggctcgagagccggtcgcggcggaaggcggcgatatcgacgacgacgacggacgacggcgacaatggcagcgacgacggcgaccatgaggagggcggctccggtaggcagctagggttagggtttggattttatttttgatttgggatattgattttgtcgagattgatggttttgatttgggattgcaattgagtgattttgtgattcatatagtttgagaattgggggcaaaaggtttgggaacaatcatgaatttttttttatctgactgggattttttgggggtgggggagggacaaaaaatcccctggcggacgatgtgatgaccggaaaaatacgaatatttatattagttatagatatgtatgtacgaaccgttttttttccaccttaagccggcctgtacgtattatgtatgcacgtttgttttaaggataatacgtacgtacgttactttcacctcttcttctctcaatttcttcatatttttacacatatttcttctcctattatcatactttattagttagaaaatatttttttctgttaaacaattcaacagctataacatctaaattatgggtatgtttagatcccaaaaatttttagccaaaaatgttacatcaaatatttggacacatgtatggagcattaaatatggatgaaaagaactaattgtacagtttgcatgtaaattgcgagacgaatctttcgagcctggttgcgccatgatttgagaatgtgatgctacagtaaacatttgctaatggcagattaattacgcttaataaattcgtctcgcagtttacatgcggaatctataatttgttttttattagtctacgtttaatacttcaaatgtgtgcccgtatacttcaaaaaagttttggccaaagaactaaacacggcctatactactaattttcaatccgctcatatctttcaatttatttatgactaaatttatagctaactataacatataaataaacactataaaatgtataaaacataattatatgtgtgcgtactttctcttcttcttttctctcgctcaactcttccgtcttataatttttaactaattaacaacataatataaaaataatcaataattacaaaagctaaataattatgattcttacgtcatatatgatttttaaaagtttatttgaattgttaatgtattcataattaaataaataatttaagatctatattattcatatttcactgtataaaaataaacaccacctgagcttgcacacctatcctttatgcatcataaccaaatagaagaaacaaagcattatgaaaaattaaataagtaatatatcacctcaaatcattgtatatcctctgtagcgcacttaagacgtacatcacatgtacatcataattaaaaacaaaaccttagaaactgtaagaaaagatatctactcgtaagtttcatttaataggtggatccattatttttaaccaatagatataattttagaatcttaagccatcatgtgttgcatcttaaaatttagaaaaatcagaaatcagaaatttgataaaataaggaccaacatgcatattttttaagttgcacatataatttctaatctaactattgctctattcataactaaaccaataatttaaagatccataacccctatattttgagctggtataaaataaaactaaaaaaataacatatcaataggcactaaattgaactatttggagaaaaataaaataagtttgtactttgcactaaaattggaccaaccattacatgtttcatttttataataatttttaaatgcttacatattaatggccttgcatctatcctatacatattaatgcttacatatttgctactattaaatttaattttttggacccatattgactatattttcttatagatatagatcataaatattacaaggaagcgatgatctttgatatgtgtttgttaatttatatgtaagtatgtaacaacttgcgtaaatctgaaccaactaaaaacagaaataacttgatggtacaaatagttttatttactaacaacaatagttctttaggatttgtggaaaaataccactaaacattcaattaaacaagacaaaacattgtacttttaatttacgtttaatttgtagattgttttctaaacaaattaaaaatagatacttttgaaacatggcaggtttttatatggaccatagataattatttatacgaatgaattaaatattatatattttaaaaggtaacaaaaagtttgaataaattatctaagaaatgccgatgagaaaaattatagagaaatagtacttttgaaacatggtagttttatcccgttgatatttcgtttatataagtttttcaaacgcagtataaaatacatgcccacgcaatgcgcgggttctaaagacaatttcgaacttgctggtatgaaacagtagttatatacataaaaatcggagaagcatctcagcccatgtttcattcattgatttcagctatcaaatctcaaaaatgaataaaagaatggagtgtacatatatacacttcacagaatcaaattcaatcccctctgtgtcaaaattgttcccggacaaaatcaaatcctctccgagcagaagctactatacatacgatcgatcgaaactcctcctcacacggcggcgacgtcgtcgtagacgacgacggcctgcgcggtgtcaaactcgaagtcgaaccccgacggcgcggtggcgcggaagccgcggtcctcccatgccgccgccgccgccatggcgccggcggacgacgacgacaccgcctcgaacctgaagccggccgccaccacctgcttgcctgctgcagcgccgccgtgatccgccgtggtctgcggcggcttgtagtacatgcgcgccgtgtgcgggcagtgggagtggaacctcgccgcgatgcgcacccccatgtccagcatctccacgtaccgcgacgacatctcctgatcgatcgatatgatttccttccaaagcaagcaagcaaacgcggctctgttcagctcgctcttgatctaagcaattccgttcttttttttgctccgagcgctgggatcgatcgaggaagcgggcggcggctgggttatatatatggttggaagatcgatcgatcggagagcttgagttggcggaggcggtggggtgtgttcgtcgtgggttttgtgcatggtgtggttcctggcttttcttggcgtgggtgtgggagaagaagaagaagaagaagaagagactcagtttaaacgtgcccctttgtgttgcgcctcggccagcactcagaaggaggctatggaggcggttgggtagcggtggttgcgcttgcgcatgcgcggaacgagcgtatgtgttgtgttggaatgaattattgtagatacaaagctttcactaatagagttttgaatggacatgcaggtgcagtaatagtactattggttaattattttcaatttttctatatatttgtcgacagatgttattacagtacaattgtggtgtaattacactgtaacttacatgtaattacactataagtataatgtaacttttaaaatctctccgtaacatgttgttccagtaaaatagagatcgtgggaacaaatcctttcacatatatgtgtgctgtgattttttttttcttcctcaccagaacaaatcttgtaatatatctaacgattcaaaattatgtgaaacttacatacaagttacactatagttacatgcaaattacagtataattacatacaagttacagtgtaattacattacgattgtactataattacatctgtcaaatttttaggagaaaatttatcgacaaatgtataggtggtcccatttttttccttggattttcctcttttttggtttaactgactgcaattctaagctcaacgcttttaataatggtgtctgatcgtgaattaatcaagaaattccatggagtattgtttttgttataaaattgtcgacgggtgatacccgtagaccggatatagagggtattggggtacgttggtacaaggatctacgtagtacgacatcaagcaatcaaaagacaagaattatactggttcaggccccttgataggtaatagccctaatccagttgatatgggattatatggtggaaaacacaggttacaaagaggacaatggaacttatcggatccgacgagatcgtagtcgagttgattcgactagctctcgatgacttggctcctcgcagattccgacttcgtaggctgtgttggttgtgttggctctgagattcgatcccttgagccctccccggggggtcctttttatatcgcggatctggaggtctccaagtagaactcggaggtatcagaccctatacgatacgtcaacgacccagttctgtccgagtaggattctttccttttgtaaatcccgtgaaaggtttccttagaacatacaggaaatatccgcatgcacgtggatatgccatatcgatatgtaacgtatatcgaagggtagagggtatgcctaacccgtaaccctgacaaaaatactccctccgtttcgaaatgtttgatgccgttgacattttagcacatgtttgaccgttcgtcttattcaaaaaatttaagtaattattaattcttttcctatcatttgattcattgttaaatatatttttatgtaggcatataattttacatatttcacaaaagtttttgaataagacgaacggtcaaacatgtgctaaaaagtcaacggtgtcaaacatttcgaaacggagggagtataaacatagcccttttacggtaatccatcttccatcttacctctagaaattaatcgttgcaacggagcaacctcgtgagctctggagaaatggacggaacgaccgcctgccacccgatgctggtagaaatgttgattatggcaggcggacaatgcaaccaaataaaacattatttttggcagacaaacatgttaaaatgccttcttgtaaaagaattttagcaaaacaagaacacaaatttccaaaagaaaacaagtacataaatcctagcacgatccctaagctagatcgatcagccaccacaccccgctacgaccgctacagtggccaccggctgtggatccactcgtcttggggcagcccccatctgatctagccgtcgaaaggctgtctgcggtggaggaggaggagctgagggagaagacgttgagaggttgccgatagtggaggtggagctgagggagaggaagttacaggatgccgatggtggaggaggaggagccgacagaggctccccaatatctggccgtcgcgaggctaccatctcagttgttgcgaagctactggcagtggaggaggtggagctgagggagatcatgtcgcgaggttgctagcaatgaaggaggaggagcctatggagcctctaccagatccgatcatcgcaaggccaccggctggtggacaaggagctgaggcgcacgtcggccgctctcatcgctagccgctgggtgagagaggtgatgggggagagaagaagggtgaaaatacggaggagaggtggtaggggagaggaaatgtgtgagagaggaatgatgaattgaagttaggagagggagaggagtaaaggacttaacgctggggacggagcagagaaaaggagagggaaatgacgtatccttgtcatgtgcgggctaaaatcgatcgtctgcgaaaatcctatttttcattctaacctcctatgagtttttgtagccgggtatttagtgaacaccatccaaatttttttatatacagattttagagctatacgcataatcggagctagtgcgttaccttgaaaagtactacctccgtcccaaaaagccagtcattctgtgttgaagaaatgtcccgtaaaatttgtcgctctagcatctgcccactgaacttagcatctagtctattccatggaatcattctaaccctcctgattttagctagtaataattactctttccctgtgtaacagtgccactactagtaccatgcatgtaccatgcgatagatagcagtacaagtactagggacaaggattttctacacctaggtgccatagcacctatcatttgcatgcgactcaaataaaatcagatagtgaatagtacccatacagtgcagataaaatttgttattttttttcttcatatatcgatcgaatttagacttgcatgtttgcatactgtcttatattatcatggactatcttatcaaattttatgaattttttatacaactgtttaaattatatgcatacacctagttgccatggcacttaggtgtagacaatatttctgctagtactagtgattacttaattacttgttgtatttttttcttacaatatgaagtgacaaatgcaaccactaaatagggacaatatggtaaattttacttccggttaatttatccggccaacttttttttcttacaatatgaagtgacaaatgcaaccactaaataggagcaatatggtaaattttacttccggttaatttatccggccaaccttaaaacgactggctttcccgaacagagggagtatcttcatataagattttttttttgagatttatcaaaatccacgtcatttctatacaatcgtagatgccaacgcaaatatgctggtaagtatgagacagtagttgtatacgtcaaaatcggagaagcatcaaccaatgtttcttccattaatttcagctatcaaatctcaaaaataacaataaaacggagtgtacataggtacattacattcacataatcaaattcaatccctttgtgtcaaaattgtttccgggagaaaatcaaatcctctccggccaaagctactatatatacgatcgatcgaaactcctcctcacacgacggcgacgtggtcgtagacgacgacggcctgcgcggtgtcaaactcgaagtcgaaccccgacggcgcggtggcgccgaagccgcggtcctcccatgccgccgccgccgccaccgccatggcgccggcggacgacgacgtcaccgcctcgaacctgaagccggccgccacctgcttgcctgctgcagcgccgccgtccccgcggccgccgtgatccgccgtggtctgcggcggcttgtagtacatgcgcgccgtgtgcgggcagtgggagtggaacctcgccgcgacgcgcacccccatgtccagcatctccacgtaccgcgacatctcctgatacgatttccggctcactctgatcttgaattgattttcttcttctccgagcagctgcgaggaggcaaggccgcaggggcggcggggaaagatggatttcgaaggggaatcgggcgatggctgggttatatatggttggaagatcgttcggagagcttgacatgacggaggtggtggtgtacgtgtttggcgtgtgcttcgtgcatggtgtggttgactggttgctggcttttcttggcgttggtgggggaagaagaagaagaagaaggcgagactcagtttaaacgtgcaccttgtgtctctctcggtcagcgcgacgatggaggcggttgccggttgggtagtggtggttacgcttgagattgaacgagctcagggtgtgggtgggatttgttggaggccaacacatatattagcagattatcgaatccgttcctttcaaaaaaacagtagaggtgcgagaagatgtatgtagtttcgagtcgacagtaatagagatgtgagaacatgtaaaacacccgtgcactttcctttaccctcgacaatatcacacaagcaaaaatggacagagataaagggtgtaactctctctctattagatctattgtcgttcgttgagtataagcaacctcaaaccctaccccaatataaatataggagataaatcttatttcttgcctgattcggattgaccaacaagaaatttatcttttaaaaaaaaacttttctccaagggatttgttttataataggattaactcaacaaagtcttaaaacgacacccacatattcaacaatagcctaagtgcaaatagcctctaaaaattcaacaatatcggcctatttgtttacttaatgtcagtttcaaaatttttactaaaattgctacaaataaaatttctggagtggctcagaaggttttttagtcccacacagatagcttttatacctgggagaaatgttatggagggggttgttatttttcatgaaacgtacatgagttgtgccggaaaaaagagtggtgtacgttttaaggttgattttaagaaagcttatgataaagtaaaatgttcttttgttcaacaaacgttgagaattaagggtttctcgcaaaaaaaaggtgtgattggatttcttcttttatccaaagtggacttgttcacattaaagtgaatgatcatgtgggatcaaattttcaaacatatacgggtttaaggcaaggggacccattatctccaattctttttaatatagttgctaatatgttagctatattaataaagagagcaaaaggtaatggtcaaatttctggagtggtccctcatctggttgatgatggttcatctatcttacaatatgctgatgatactatcatttttaagcatgatttgcaaaaagctaaaaatatgaaattgattttaactgcttttgaaaaattttctagtctgaagataaattttctagtctgaaaatttaaggaaaggaatgtcatgagcaatatttaaatatttttgggtgcaaactaggaaattttcctgttagatatattagcattcctatgcattttagaaagcttagtaataaagattagttaacaattgaaggtgttggtccagaagtatgttagcatggcggaaagcaaggcgacgagcacggcggcgctagggcgtgcgtgcttgccggagagacgacctccctcgccagcgacgccgaagaggggaggtaatcgagacgtttcgataggtgggaaatggtgttggaatacccatgggttagcccaagggcccgacactattcacgcgggctggagtggtggggctcgtggaatccgccatggatggtccatgcgtgatctgctcccgagcccgattaaggaggtttttttgtctgcgagctgggtgtgggtgccgaaagggggttctctgagtcctcatctagggtttccagccaccaggcgagaggtcgtgcgttttggggcgacgacgaggcggatctggagagctccggcgagactcactgacgggagatccttcctcgaggtagcgaagggaagtatggatcgtaaacctcaattccaacgtcctgatcaatgggttcccaataagagaagagcgttcgaagaggaggggggaggtgggaattgggggaatcgaaatttgcaggaaagggaggaacgtgaacttcggaatcggttgatggggcaacaacaacagcgcgaggaagggaggtggcagcaagttgagagaaggggggccaacaaacagtggcaaggagacagaaacagggagggtggtgcttgggagggaggggatcggcgtccgactcgtggaaaggagaagctgggggaggaagggagatcaggtccttcccagaaggaagagatcaagtgtttcaactgtggagaaagtggttatcatcaggtgaactgtcagaaacctcctctgtgctatgtctgtaagaatcctggacacatctcatctcattgccctgttcatgttggggggagtagctctaatttgagcaaactagaagtaaagctaaaaggttatggcatacctgagcagggttttttcagcctaaatgtagataatttaggtgtggctgagaaaggggcacaattcagaggaatcctaactgtggagaaaggggctggttcagtgcaaaaggtggccaatgagatgtctcatctatttagggagaaaaattgggattggaatgtgaagcaaatcagcagtaataatttcttgattgatttcccgagtgaagatgctagaagacaagttactaagtcagggggtttgtgtttaagacctcatccatcaaagctagtgtaatagaatctaagatgactgacaatgctgtggatgagctctttgtgatctgggtaaaagtttttggtcttccaggtttcgccaaaaagcaggaaatcattagagcaatatctgatattgtgggtgaatttaaagaagtggatgagaaatctttgaagggggaaggagctgttaggataaaagtgggatgcttggaccctagtgctatcaactattctgtcataatatatattaatgacattggatataagataaaatgggaggcagaggttgatacagaggggacagggtctattgattggggggggacaatgatgatgatgatgctgatgatctggatgatgattaccctccaggaggaaagaaaggtgggggtcaggatgccaaagggagtccaaagaaaaaggaacctgctaaggatgcagatagcaaaggaaggattgtcagtaagactcaatctgccccccagttgttaaaaggaactctaaaaacttgcaaaacgccataattctgtaggtggagaatgaggtgggggtcactgctaagggtgaggatcctattgaatcaattaccgtggagaaaaaggcagacaaggcagtggtgttatggaagtcagaggaattttcacaaccagaattgtttgagcaagtttcacaggaggaggacaaaagtggtgaccttctcaaaagaatggatgtggatttaaaattggggggtgttagattattcacagatgaagagggggagaaatgtgctatccccgctgactcagacattgagttgatgagggcagaggaagatgatgacagtgaacaactagatctggaaagtgaagcagagatacagctcaaggaggttaacttccagaaagtcaggcacaagaaaaagcaagttagtttggtcaagagacagagttctagggtgaaggataaagaggtatcagttcatctaaaagctgagctcaggaagtccaaaatgaacatgacctcaggtatgtcatcaaaaaattcttatgcaatctttcattctgttagtcaggattatcttatcaacattgctagggctaggggaatctctttgggtgacaattctgtggaagtgagatgcaacttagatgctatttgtgctagggaattggcacaggctactatttttgatgcagataagagtttacaacagatggctgaaaaagcaagtttggaggaagaaggggggcaggaagtccccccaaatgg

SEQ ID NO: 4663 - DNA, 1472 bp, Oryza sativa
tcctgcagcccacccatgtcaatattatgcaaatgaaacatcctactgaaatagctattattcggttttaaatttttgaagaggactttactaaattgttctttcatctaggacagcgatgatatctgatcattctcaattgttcttgatcttcagacaagtgaaaaatcgtaggtcagttttgaaggacatatttcctcttgcaaaatacctattcctgtctagagggccaatccactatcctcagctcaggaaaacataatggatgaagctgtcaattgttccactgagaaacaaacacaagataagataatagggaacattcatactgcattgatctctgctctgagttctgagcaagaggtaatccttatgaactttcttatttgatttatttctgagatgtgcttattaaatttttgcatggtggtattggtaatgttatattgactatcaggtcaatcttgacgcttcttgaattgaatcaatgcaaaaagaggatatttatttttgctctttgtatcatggagaattagtagacatttcatgttcagatattatagtcatatctttggaatggcaagacaaacctataccctttttaagtgctaagctatacataattatttttatgttacctcaaagatgcgattcagaatatttttaggttttgcaaattggacatactacagagtgctgaggatgcagtaacatacaaaaccttcgttagccgcacatgatatataatataattgtgttttcagatgtgccaaatgacatgcatttgtagctcatctcctgatgaaggtgatcatcccagagcttcagtattgtgcgagctattctgagatacactgccactagagtcgctccaatgtaagttatttcaagcagttatgttctacttgtgtggttatttgtttaaacaagaactgactgcccattcactttagatttggggctcccatgtaatattatcccacctaccatactgtcttaaatctagcaatgctcatggtttggtcggtctttgttttgtggtgggaagataagaacaaggatatgtttttctgtgttggccttgggatcaaccaactgatgttccagctattgccaactcaccgacctaaatgaatttgtatcgccgattcgtaatattgagcttctaaaaattatccctacaaggattgtgcatattcaatcaatggtgcttgccatttctgaaatcaggttcactaaatggcacaaaatgcccctttgtgttatttgatatagttgcaaccgttgtgatcgaagatgttttgccatatagttactacatgcattgattcttccatgccaaatatcccagcatgacacatcactctgccaggatataatgcatctccaacagactatgtaatccaagcatgaaaacatgctaacttcctgaatctaactggaagtgtacattcttaaaccatagcagtacg

SEQ ID NO: 4664 - DNA, 3853 bp, Oryza sativa
ttgatcttaaccctcttttcattgatcaaaagctaatttattatcctatttctcatcgcctttgtttgttattcttctcttgtttgtttggcttttgtgaagccatcccttccttccgtctttaaaggcatcgctgccgggcggctgttagctgaatcgatcgcaaggaaagacaaaggaggagagttcagtcgacttgggatcgagtagaatcgccggcttctgctgctattgcggtactcttccttccttgaatgtcgtttacttctccaggtgcatagcatagcttttttttttttttttggggggggacggagaccgacgagattaattgttgtttctgttttgaagctgaccattatatccaatcccaatccaatcgacgatgggcctctctcgtcggtttctgaacctgatcgtggacaaccgcatccctggagccaaatcgctgcgctgcatcgacctcaccctcgcgcgctacaagttgttcaacactacaacacctgctgcactgacactgaatgggaacggaaacggattgaagaaaaggatggagaagatttgtcttcccagcccaatcttcaacttgggagcaccaggcgaacggatacacatgttccctgctttggagcgcagggctttctctttggaccagtcggggcgtggcctccttctggaggcagacacatcccgtctggtggtgatgccaaatctccacaagcccaagttggaacccattgccctctacatccccggcgctgagatagatctggatgaccttgatggcggcggtggcggtactctttttatcatggatagaattgcgaaaccacaggaggctgactatttgttcgaggctttggtgtaccgcatgttctgttccagctacttatcaaagtcctgggactgccaactcctcccaccaccgccgccatacgtcgtcaaatgtggcgttgactttctaaagatcatctcatatggtttggttaaaggtggctctgagatctgcatatccatcgacggggttggtacttattgctttgacactgtgaaacacacttggattgaagtgggcaagtggatgctacccttccaaggcaagtttgagtatgtccacgagctcaagctctggtttggcttcactcccaacgatggccactttgctgttgctgacctctctgccatggacgagtacctgcaaccacagatacgccactgctggaacgaacttgatgagtcactcatccaaggatggaagcagatacgggaccctcagcttgtcaacctggggtctgccaagttctgcattgcaaggttctttcacactggtgactttggcgatggattgagtggccagaatgtttctgtcctgactggtgtagagtttacccatgccaatgttgaccatgagaatattggattgatcaagcacaaatcgagatgtcacaagtctagctgcggtgaggagaccatcacggcagttttctgattaatttaagggctgactccccatcctttgaataattttctgtctctctctttaagagaacttgtgtctcgtcctaattttactttagcataataaaaatgatacttcctccgtttcataatgtaagactttctagcattgtccacatttatatatatgctaatgaatctaagcacacatatatgtttagatttattgacatctatatgaatacaggtaatgctagaaagtcttacattatgaaacagaggttatgaaacagaggtagtaccttcgttgtccgcatgttgtaattgtctcctgcacttaagtaactgtaccatttactactactagtaactactataaacttactcttaatttatgtgttgtctactgcaatggtaaaattcgtttcaaatgctttcttggttttggttggagcggaaaccaagaaggaatggtaatcttgtgtgcttcctctgtcccaaaataagttaaccgtgcgggacttttccagaggaagagaggatgatacgtgatgcggtgtatattccttttctgaaaaaagtctaagttatactacggttaatttcaactttttcatattctatcttgatcttaaaaaatatatttggaaattatcgtgacctcagttttcatcttctttcatagactttgattttctaaagaaaattggtttcttaattctaaagatgccagtacgtcactgttcattttgtagttaactctggtacatgtttatgtgaaattttgattattcagcagttgaaaggaatggaggattgctttgtgatttataatcacctgtgctgctacttgtgctgcagtcaatagtctgatgggaaaaatggaattgaaccactgcaagtgcaagatatactgaaatcaaatcagtgggtaaagtctgacaagttatctgctgcactgaaatctcctcatgcgtttgtgagcaaggtatccagtagcattattatctctgtatattttcagagtatatattagttgcaacagatagtcgtcacatatataatctatagatggccataaggctcgcccggcacggcccggcctaggatcgggctaggcacggcccaccagcgatcgggctggaacggctcagtcggcacttcgtgttgggccgtgctggcccatgggctgcacctccggcctaggcatggcctactagcaatcgggccatgcagtgctagcctgaaggcacgggtggtccatcgtgccttctttgaaataagtctatttctcctctctcctctttgggctgtgacatatatgtagctaaaataagtctattttatgtccctattctttgggccttgttatataatacgtctatttttgctccctcgtgccctacatatggttgaaattaagtctgttatgcatccccacactctcgtacagggcctagtcgtgctgggccggcccagtgtgtcggtggggaagcccaggcacggctcggcggtaaggccgtgccgtgcttgggctaggccaaaatgccgtgccttgggccgggccatcgagcctcgggtctatggctatctataataggaaaaagtacaccgaaggtccctcaacttgtcatcgacttacaaaatcgtcctccaattgcaaaaccagatatatgacatccctcaacttacaaaactgttcactttaggtccttccgtggttttaaccccggttttgtccgatgggacagctgagtcagcgtgggacctatgtgggctccacatgtcagggtgtccaactcagcaccttctctctttcccctcttctctacctttctccttcactttcctttcctctctcgtgtctccgacgagcaatccggcgaggtgtgccatgaactcggtgttggtaacgcacgcagcgaggtgcggcggtgtccgccgggagaatgccgggattgtgccgacaagggtcgggttcaggcagacgcatcgcggcggctgcaacggcggcggcaggagggacgacttgagcgcagctggagtcgctggataggttcaattgggcggggtatagagccgtcgtcgacatggcccgcgacgaggggctcagcctccgcgtcacgctccactctggcgaccccgacatcctcttcaccgactgctccagcggccgtgactgccacttcttcgccgtcgacgagctccccgttatccacggcaaggcgccgctcgactgctacgacgccttcttcctgttaacgatgaaatttggtaagtccaaagtcatcatcagctgaaagtcactatcggcttccgagttctagaagcagccgatgggagttgtcaagtcgccatgctatcatgttcttagtggagtcgaatcaattgaagg

SEQ ID NO: 4665 - DNA, 10141 bp, Oryza sativa
gaccacggaatgaggaattttggggatagggttgaggggcattttgaccagtttgagctataaaatactccctctgtttccaaatatttggtatagttgacatttttagtatatgtttgaccattcgtcttattcaaaaatttttgtcaaatatataaaactatatgtatacgtataagtatatttaacaatgaaccaaatgatacgaaaagaattaataattacttaaattttttaataatacaaacggtcaaacatatttaaaaaaagtcaacggcgtcaaaaatttagaaactgatgaaatattttattattattattttttaagtgaaatcctaacggtgtacaccctccgtcccataaaaaaccaacttctgtagataaacctggacaagcatgtgtccaagtacatctcagaagttatctttttttttgggacggagggagtagggagatataggtcaaacggtagcttcgattttaaaaagtagggtgaaatagtcaaagttaaaaaaataagtatgaaatagtcaaaattaaaaaagtaagtcagattagtagttaagatctagaacatgatcaaataagcaattgtccctaaaatttttagctacgtatctcaatatattgtgatagaattataacgtatagttatataaataactagctgggtggcccgcgcaattgcgcggctagcacccaaacaaaatcatatatttttagtatgattttacttaaatattattaaatagataccttgttgtcttaagattttgaaagaccaaaccttatcacccccgtatttctaattaaatagtttttaaaaatcacaccagttactatcccttacttttgtcatatcttacttttgtcatatccttctttatttgtttgctcaatctatcccgggcgggggagtgatgtgggctgaagagaagggagagggagggggaggagaagaggacttgggaggacttgggaggaagaagggaggactttggaccacatttgacctaaagagagggagaggattatttttgcgttttttattttaataaatatggaattggtttttgttgttttaaaataatttcttatgctcttatacatgtttgattatgtcttctagtatttaacagtaacttttacccgtagggaagtatgggcattttgctattgagttaataaattaaaacccgttagataattacgagaagaagctagcttgatttagggctgaaaaattctttccgtcgaagaattcagggacgttcttacttatgttgtcaatgctcaggcctacactcgcttaatttatggcctgatacatctccatgtagagactgaattcagttcccatcatcgaaaaaaaaaagaaaagaaagaggtcaacgtcttgtgagcaaaccaaaatgattttcttgtgagcaaaccaaaaagaaaacagagagtatacctgtcaagccttgttatctagctaattaaggatacattacacatttattataaccagtagcctattgacattgctaagtattcaaccatgaatataacttaggtctctcacggtccggttaatcttatcgcacgcaataaagaacaatttttcgggaacgcgtaaaaaaaaaacagttcggttcattactttaattactgcccctttcgtactaaaataaacaaacacatctcacggcgagcaccgactcactcaacccttttatcggcaaggcgctcctggtctgaactgatatgacagtgtgacactgacatactctagtaaacgcttgtttattttagtactgtccagaagaaacattataccattctcatgcaacatgtcaaatcatctagctgaaaaccatagcaaaacaggctttttactagtagaaatactagaaaccatcgtaaaattgcttcctggttatctgcaatggaaatccaggacttcttcagagctgcactccaatgaactgggagacactgacttgaatcaagtctggaggagtgcatatgcatatgcacgagagtcttacttgtatgatgtcactagtagctacgctttctaacttttaactgcagagaaatgtctctttcttttctaccttgtgttgtgtgattcaatgtagcatagatactagcacagaagcttcattttaggccgataattccttctctcgaagaattcagggctctttaacgttgtcaacgttcaggtcacaatcagcctcgcaagttcaggtctacagtcttgcaacctaaacaagctggttttcttcattctgattctggaagtaagaaaaacagagggcatacttgtcaagcctacccggatttaatgtgttggcaacttttttgacaagtcgacaagcacaattgcaacacctaaacaccttgcggtgatatagagtctctaaccacctcgatctagccaaagggccaaatcaagatgggttttgcaaaaagaaaagctaaaccggctagcggagccgatttagagatcaaaatcagcctctaggccgatttagatcgatatgaggataactacccgtcttgtgggcaaaacggaaggttttcaggacaaacctacaaagaggtgtcacactctcgcagcggcggcggatggtttacggcgcaaaccgataaagatggactaaaactagggtaaaatagaaaacatagtaaaagaacgattcaagtagattgtattcgggggttttacaatgaaccggccttatcctttaaataggggttggtcttaccctctacaggctcttctccacgtccaactcgggatagaaaccaaaggaaatacgaaacatgccttcccgagcaaggaaacccgagacccgatgaaaacagactcggactcggaccctgacggtctgactgcccacatatctgcggtcagaacggccctactagccggtcagaccgcccacacacctgtggtctgaccggtcctatgaaggaaacccgtcactttccaaactttgtcaatttttccctatttcgtccataggtgccaaatttgggtgtaaacataatgttcaacaataaaagacgataacatctgctttaacatctagggcgtgtttagttcacaccgaaattggaaatttgattgaaattggaacgatgtgatggaaaagttagaagtttgtgtacgtaggaaaattttgatatgatagaaaagttggaagtttgaagaaatattttggaactaaatagtagaggtgaaaacggtacggaaacggacagaaacgacctttatcgtttcgttttcatatttttttcggaattgaaatcggaatcggaaacccccggaaacaaaaacggaaacgaatattatcgaaaccgaaaacggagcgaaaacgaaccggcgcggatacggtaacaaaaatttatcggaatacacaaacccctcaaactgagggtcaaactttgtcaagtccaaatctcaagtctcaacattcaacaatacatcacaaaacacaaccatatcaaatccaattgtttctctcagcagtaccatcataaacacaatctatgcagtctgtaacttcatatttgcataacaaatattgcatggagttgcataacttcaacaagcaacaacagcaagtcagccatagtacatagttcatcacaaaacattgctgagaattacatagttcagcaatagtagaagtataaagtcagccactatataaacatatgttagtaaaacaagcacaaaccagggacaccaaggcacaaaaatttcgctccaggttctccattcaccagtcaccaccactccaccagtggggcttgagtcggcggcggtgacgaggacggcgcgagacggtggtgcccgggacgacgcaagacgtcgggggcggggacggggacggcgagcgactacacgagacgcggtggccgggacggcgcgagacgttgggggcggggatggcgagcaacggcggggtcgaggacggcgcgagacggcggtggcgactggcgaggacgaagcgtagggggcgatggccgggacggcgcgagacgagctgacggcggtggcacgagacggcgacggcgtgaggggacggcggccggcagcgccagatctggcgcgtggtgtcgctgccgccactgcaaatcctcacccggcggctgtgtctctcactctctcggctagttagtggccggctagacagtggagtagtacactagttactagtgtgttgcagtgttgggctgggctagtgactactgctagtactagtgtgttgggctggccggttggacacaggaggttttatggactttgtaatgtcggaaattccgagaaagttttcggaaagtttccgaccgattccgagtaccgtcgaaaactgctattattattttcgattccgttttcgaaaaattccgaaaaaattccgaccggctgattccgttttcgaaaaccagtccggaatccggaaatattccgtaccgttttcacccctactaaacagggccctagtaaaaccatctgaattgatatcaacttgtatctgcattggtgaatctatctgacactgacaagtttcaaagttcactgtcggtccagttctctgtctcactaaggctgtgtttagttggatccaatgtttggattttggttaaaattgaagatgatgtgattgaaaaattgtgtgtgtatgacatgttgatgtgatggaaaaagactgaaatttggattcaaactttggatctaaacacagcctaagatcatttacaatgcaagacgaggcgtgtggcaatgtagagccacgtaggcggagtgcatacgtggaagagaggaaggggtggggctcccatgacttgagctggttcgcgtagcctcgtttggctccgataacctcatcgaaagaaaccagcttttgtcagaagaatcgtgggaaaaacaagagaggaagggtagagactcgaaggaggaggacgaggcggcggcagcagggttcatcgccagagacggcgaggaagcggcggccagggcgtcggcgaggaaaccacgaccacggccatcctcacgccgcgccccgacgagccgcaccgttgtccacgtcgccgcagtgaaggatgagatggcgcaacaaaagctccggtacagagcaatttcagataataaatgcattcactaattaaaatatctacataactagtacataccaaaccaaattaatgccctatttggactgcaaaaaaaattcagatacagctattcaggccctgcaaaaatcagttcctagctgcatcccaaacaaggccgaaatgctctctgtttttgcaatttcaaaggggtactgtacataagtatatatcatccagtgttcatgagttcatctgcatctgatatgatgttcaggcatagggccattgtgcatgccattctgcattattggatgaggcctttcatcaccaccctgaaacccatcgtttccaactttttggacagcttgatcaggtgcagggttgctgtcaatgacaatatgaagtggccttgattcttcagtggcagtgctactagtactgcctccatgctccacatcatgaacatgagcttcgatcaattttacggtccttgagatgagaaagtatcttgaggtatctaaattttacagtaaaatttttggtatcttgagatactttggtacctagaggtatcaaattttgcactagaaaatataataactctaggtactttctcaaggatggtaaaattaccctactaattacacaaaaacttgttgaattcctccatggatgcaccgtgcacatctgaaaattttcagttgagtggtgtacagtaattcccagaagaaaaaagtgaggtgattagtactactggttgctaaatccatggggttacaccggctaatagttactgttgacagtacaaacatcaaaagtttaataacatgttaaatacattggtttctagcaaaatatatgttggttattttcaaagcatataggtttaggttaaaaaaagagtctagtcagttataactgctaaccaagttagtttcaaaaatcattagtaacttctatgaacgagggagtacatcctaactgctgagaaatttctctcttgctacgtagcttgtgtgatccgatgcgtcatagataattacgcagaaggttgattttgggtttgaaaattccttccctcgaagaattcagggttctgcacatttcgctatttagagctgtcaatgtttaggtctacaatcagtatatcttccaagcgaagcaacctgactttcttgcaagcagaaaagagtggacacacgtactgattccctgattcaggctgtgtttagttcacgcgaaaattgaaagtttggttgaaattggaacaatgtgacggaaaagtttgaagtttatgtgtgtagaaaagttttgatgtgatggaaaagttggaagttcgaagaaaaactttggatctaaacacggtgtcaaatgatcaacaagaaaagttagcattgcttcaacttatcacagcctgtatctgcattggggaatctcatctgacaagtcacaaagttcatcatcggttcatgtttttatctcagtaactggtaatttacacaatattttacatatttacatcgacgcaataaaaccgtcaaaacagaacaactctagatggtgaataaacccactaaaatatctactcctacataactatatccaaccaaattaaggccctaatttggattgcaaaaacattcagatacaactattcagaccctgcaaaatcaggaaaaattcccgggtcccaaaacaaagcccaaatgctatctgattttttgcaatttcaaaggggtactgtacataaccacgctgacacatatcatccagtgttcatctccatctgaggatgatgttcaggtaccgggccattgatgcaattctgcactggatgatgcctttcattgccaacacttgcctgcatcagttgggcatcctgacacccatcatttgcaacttcttggacagcttgatcaggttcagggttgctgtcaacaacaatctgaagtggtcttgattgttcagtggaactgctactagtactgcctccatgctccacatcatgaacacgagcttcctttgcgcatttggcgcaaattaccctattcacaacgcttatcaggagcatcagagcagagatgcagccactgatgatgaagaggccagagaaactttggagtgtgagagggtttgagtcactgctgctgctgctgctgctagggtttgcatcacctcctgtggactgttcagatgagccaaaccacttctcttcaatttttgaaccttcagtctctcctgtaaggttcaagatagctgtagagagatcatgcaccagtggagaacctagaggaaatacctgaatacaaaaacatgatgcaaactaattagacaaaaaaaataacttgttgaatttcttcatgtaagcaccacacatctgaatgttttccgagaacacgcaaaaacttttcgcgatatactaattgcaaaaagaaaagaaaattgaagaattctgaatctaccaaagtgaacaagattgagaagcttacaaatccaaatccgggggtcttgtagaaccgattaaccatctgaaattctttctgatattgggggttggataaaaaagaagttaaataagggatctcgtcgacgatcgccgacactcctccattcatggacccctttctcagagcttcagcatactccttttgtgttccataagaccttaacctggatggcatgaaccctcgttttttcaggagtgagccaacaaatgatccattttgatatccaacatagtcaccggtaaggaggagctgatccaagcttttcaccgatggtcggagcctctttgcagttagcatggatgacaagcttgccgtgtagctctgcactaggatcagcactacaaagcaccatatcaccacaacaatttttgacaaagggctcttgataatttgacctgtttgaacattgaaagaaaccaagtaaacctctaatgatgcaattacaaaggagcaattttatgatctttggtgaggtaccacaatttccggtatgaaataaccatacccttttatactaaaatactaaaaatatacctaaaggagaccaaaatttacactataaatgtcatacgtctcgttacctttttcaaagtaaaaaaagatctcgttataataactatgtgctttatttatgtttggaaaaaatgtacaacaagctgtactctctccattcatgaataactagcactattgactatacaactgtcttaccttgaccataaattatttttaaatgatcatattgtaatgaatgaaaagttatatggttatatttacgatgcaacacagtccgataatataactcgttttcaagtatttattaagacaagatcagcgatccaaataaaacatgaatactaccggcgtcaaatatttaggaactggaggagtaaaagtagtaactatattaccatgagaaaacgtcagggtggagaaagcaaagtaggaagcagtgctgagctgcctcacacttgatccttggtactccgggtttcttggctgctcaatcatccacacgacgaagccggtgtagaagaagaagccgatggtggcaagccagagatccctggtcagtggcttcacgaaaatccattggattggcttggagtcgttctcctccggcaccagcagcgacacaccggacgacgtgtatggcatcgtgaattccacgaggttttctcggtcggctgtgatggtcacgtcgcccactgctgcgctgaacttctgaagataccataagacagaagatgtatgtcagcacaatttcttagaaatgtcgtcattcaaagggacttggcttaaattattaggccctttttgacaattgacacaaatataatttgtttaaaaaaactagctatttctagttccagaaatctttatatctaaatatgccaatgtatttgtagcaattgaatgagttattctgtttgtgttttataaaaaatatacaatttcaattcattataatttaactttacaaactctagttttaaactgatttgttttacatttttatggtcttattttgaggctgcgatattatacgatacttcttacttagatttcccaaggaacatacggactttactaattattttatataaaattttcggtaaaattcctcaattccaaatgatatataacactgctaaatctgatatctcccatataaaagtgaaaaatataaagtgctcttttcgtggtaaattggtgaagcttatgcctttgatttgttttagttttcttatatttaatataatcagccttgttaggaaaaaacaaatgttttcgaaacataaaaagtattttttactactatctcaattttaaattaattattgttttagttttgtcttaagtccaaatatgtttatctttgaacatcaactaatttatggaaaatcgtaataatttaccacacatgttgacagagctcggggctcctcaccgggagaccgcgcaggcccccctttgccagttcggccgggggcttagggtgagatctcaagctctcgctgtgtgtggaaagatcgcgtgccaggaagaaacgcgagacacggacgatgtatacaggttcgggccgctgggaagcgtaataccctactcctgtgtttttggtggatctgtgtaagagcaagttacaaaaaatcaaccagccctctcctctctcgggaaaatccagccccctctctttgtgggcatggtcctccttttatatcttaaggggataccacatgtaccctttcctttccaaactggacttttcttctctttatggacggagattggtatggttgccgtccgaatgacatttcgatgggacaacccacacctaccttcactcccggcggagacaggcgcaacgtgggatcgtggctgtctgttgctgacgcgaccagtgtcagaccggtcacagatcggtcattcttgtcctctatgcgtcagttcagcgatctggatgatcacccttctttttgtagcatcttggctgtaatggttgggatgaagcctgg

SEQ ID NO: 4666 - DNA, 6533 bp, Oryza sativa
gtcccttgtcacccattctatttaatttagtaggggatgcattgacggctattttggataaagctaaggaaagtggaacttttgaggggttagttcctgatttaattgatgggggtattacacacttgcagtatactgatgataccattctttttgttaaagctggtgatcataacatcctggtgctcaaatttcttctattctattttaaggaaatgtcagggatgaaaataaacttattagaagtgtgaggtctatgggtttgggatggataagagtaccgaactaaggtttgctgatatgctgaactacaaagtgggtgatttgcctctcacctacttgggcttgcctatgcatgttgagaagattggtatgagggaattatgttgtatcactcagaaagtgaaaaaaggctccagtaattacttgacatatgggggtagggagataaaaatctcatgtctatccagtgtcccaatgtatctatggttttttatttacttcttgatggttttcaccacaagattggtgctttaagaagtagattctattggcaaggtttggtaagagaaaatatcatatggtgaaatgggaggcactgtgaagactaaaagattatggtggaatggggttcttggatactaaggtcatgaacatatgtttcctaagtaagtggattcttaaattagaaaatgggtgtcctgacatgtgctttgagatacttaggaagtctcttcatccggtagattggtgatgagtggggagtcatctggcaccggatgtgcagcaagaaattccgccaaggcttggcccttaattgctttctgcggtacaaaagtgatatcatattccatcatgagcagggcccatttactcgatgcctggggaatcgacgtcatcggcctcatcgatccaccttcttcaagggggcatcgcttcatcctcgttgcaacaggaagaagtatttgagtaatgacagtttctttgagagctcagctataccgttgtctcaattttggaaagggatgcactattttaagaaatggctggaaaggttgattgagaaaaagttttacaatggggtttccgtgttcttttggaaaggtgtgtggtgtgggacaaactctctgagggttcagttgatttgtatgagattagttaccagcagggggctagtgtgagtgatgtttttgatgagggaattggaagtatgagtgatgtttttgataagggaattttagaaggaacctgaatgagcagaaagatagagatttatctcggaatatggatccgattgtttggcctcataataagaaaaaccttttcaccaccaaatcaatgtatagaatcctgacttttggtggggtgaaagatgccgggatgtgtgagatctgaaagagtaggctgcctcttaagattaagcattttctttatctggtgggtaggggtagacttccctgtgcaaatcagttagttaagagaaaatggagaggggagactgaattttgtaagttgtatgacaaaactgaaaccactgctcatattatttttggttgtcctttagcactttttacatggtgtattgtcaaggaggccctggacctttctggctatcctaacagtttttgggtctgtgttgatttgtagaaagataaaaaggagactaaactttggatttttcttctggggtgtctttgcagggctttgtggttaactaggaatgggtgagtgtttgaaaacattctagtaaaatctccaatgcaggtggttcaagtctttgtcctttgcacagaaatggagcatcttgctaagagagaaggagcgtgcgctgctgcaaagttggcgtgaagcaatcctgtagaaattgaagcaagtcaggcctcaaacgctgccaggagatctgtggtgctgcttcttaagtaaaaaattgcttttgctgtgttgtttcctctatgctcacggtgtaagctggcgtccccagcaaaaacctaaagctgtttctttttcaaattttattttctgtaaaagactctgttatctctttgggctttctttaaaaagccggctccatgcttgatctgtcatcaaaagaaaaaaaattctgggagaaatggtgaactcctgaactcgtcatttgttcggttcagatttcagtgttgttctatgtcatgtccagttttcagtgcatcctgttggctgcaatagctttgctggttgaaacgagtccatgaaagggttatgttgctgttcagcattggatggcttccttacctgctagtccatcctactccctctgtcaaaaaaaaaagctaatctagtattagatgtgacgttttctaatataataaatctagacgtgtctagattcgttgcgctaggaaacgtctaatccaatactccctccatcctatgatatagcaacaattggatgtgacactttatagtataacgaatctggacaagaagcatgtccggattcattgtactatgaaatgtctcgtcctatactatgttgctatattatgggacggagggagtactagattaggttttttttacggagggagtaacatagtccaaatacctgaacattaaacgacaagacatgtaacagtaatgcgtagttattattggactataagggaatgaattcgtcagccgagacgcaatacatcacaaatttgcaccccgtagcaatacatcacaaatttgcaccgcattacaggggacgcgcctgttcggtgctaaaaactccatcgagtcaaaccatgcagtcccaatgatttggtcatcaccaaaaataaataaccttagcctgtagtaagaaaactgactgctcgatctactcgtattcgtatacaagaacagttctatatacttatgttgttacgataggtttcattaagtctctcattggatggcgtaatcagtcaaagaaaaagctaaattttaaattttcaaatttaattttaagattgtttttaagatattttctacgcagtttctttttcagtattagcttttaagtcaccaagatttacgtataaatttaattttattccctaataagccgttttgatttattaagtaataagccaaatgatgggaccttaattcttttctgaaaacttatgcttgtccagctcctaaacattacaatttttttttattttctgaaaactttttccatcaacttttatcagagaactttttaaactaatgtattcaactttctaacatttaattcatttattcgtactttcgaataactatcatgaacttattagtttcatatcgaccgtacgtatgtcaactataaagaacgcatgtacagtatagttaggagtaggtagatatagtacagccttgagtacttctgaatagtataactgaataactgagactttctcttgacagtttgtacttgatctatatatataatatacttgggaaacactctgaatttctgactggtttcatatatacaccaaacacacacatataaagtaattaaaaactgtcaactagctagctatcttaacagtgtattggtcgcgtaggagtatatatcctagctctagtttctacttaattatttaattaattagttcctgtatacatgtactactgcttatatatacacatgcagtacgttcgtctcgagatgtccatgcactgcgagcacttgttaattagctagctcgactaagctcttgcttaatttgcagtacattaatttgttgcacgtacgtaatacggcaatggaggagcaccgtcggttggctatggcggcggcgttcgtcatcctgctcacggtttggagttcgccggcgatggcaatggcggcggcggcggcgacggaggtgcacagcttgggccttaattgcaatggtaatgctaatatgagtgaagaaatatgatctaaacttatttgtatttttcaactttactagtacacattgcatatcgctgcatgcacgaattcaatatagttttatattatccccggatacttcggtgagcatttctatggaagtacgaattacactttgaattatttatataactacgttaaaattctatcccaatatatcgagataagtagctaaaaattttagggacaatttgcttatttgatcccattctagatattaactactaatctgactctatttttttttaactttgcctatttaaccatattttttaaaatcgaagctaccgtctgactaagttctccctacaccattagggtttcacttaaaaaataataaaaaaatacttcatccgtttctaaatatttgatgccgttgacttttttaaatatgtttgaccgtttgtattattcaaaaaatttaagtaattattaattcttttcgtatcatttatatattgttaaatatattaatatatttatatgtatacatatggctttacatatttcacaaaagtttttaaataagacaacggtcaaatatgtgcttaaaaagtcagcggtgttaaatatttagaaacgaaaggagtattttgtagctcaaacgggtcaaaatgcccctcaaccctatccccaaaattcctcatcccgtggtccacactcatctcggccttctcggcggcgcggctagctagctgcaagcgcgctttcggcggaggcggcgcgcagagggcgcacggctacggtctcggccgtccgtcgcggagggacgacggaggctggcgcgcggcggagggagggacgacgacgcgccatacctgcctgcccctgccgcctccatcacgtacgcccctgtgccgtgccatgtcttgccctccggtatggttagcctctgctgcttcatttcatcctctcctgcgcgcccatcatctccatgcgccggctggatggatgtgttgctaatctcgtttgaaagaattaattattttctgaaccttcttatccaacgagattttctgaattatgcgacaatgctatgtccttgcgattaactctctgtatggtgagatatctgtttatctggtttacgtacgtgaagtgcaaattaaagctttgccaagttcctgttaattcactagcttgtgtctcacatttgtctgcaagtttcctttaatttacgtttgtcaaacctttaattatcaaaattcgtcaaatctaagacaaattaatttgtcaaacctttgtcaaaatcgggtaaataaataaaaacttttgataaagtagggtcaaatgagcaagggcataaacgatatttttattacaggttaacaccattatgttgccttctcgtaatagggtcaagtgtgatcttcatttttaaaaaagagggtcaaatgagcaaacttaagaaaacagggttaaattgggagttaggctttaaaacagggtcaaaaacgcaattgccccaaaattttatgcataatgaaggtatattttgacaatgttggctatgaatttattgtctagcactctacatacttacttacaaatggtagtagcatatttgttgcgataacactcatctggtagaaggatatatttatgatcgtggataattccacctgcacggaatttgagtagtattttttttatgttgggctaaaatttgacatgcaaagtcatccccgcctccccacaccaactacaccgtctgaatcagagctaccttcctgtaggtgtctcctcggcacccaacccctaaaggccgtggatcccatatccatccgtccatctaagttgaggaggttcgctcttcatcttaattcttttttgagaattttttttattattaaaagtttgcggggagttcatcttgacttgttcactccacgaattcttagttttttttatttaaaattttcttatcttatgtgggccaagtttgtgaatggttattgcaatggcagtatcgtagaatcaaacaagcagtacacggaattttacaagtatccataaaaatatagtggaggagggaaaaatggaaatgttttaatttgccatatgtacttgacttctatgaaatgcgcctaacagaaatgtgcaaatatatgcaaagaattattgttgttattgtgcagtgaagttcatttttgctcataggacatgagaatattggattgacaattgacacgaactaagtctgtgtttagttccacgccaaaattggaagtttgaagaaattggaacgatgtgacggaaaagttggaagtttgtgtgtgtagaaaagttcgatgtgacggaaaagttgaaagggaaaaagttggaatttaaacagggcctaaccttttttctttgtccctgattcagaaaccaagaggataaatgctggagtgaggaggaacttaggatgtttgcctgaagtttatcataagaaactcaagattgctgtgccactgaaacatggctttagagcttttgtgaatgtaactgaccaaggtgtcactggctactgcattgatctcttcgaggctgccgtgaataagttaccataccgtctgatttatgagtttgttgtcttcgaccgttcttatgacgagct

SEQ ID NO: 4667 - DNA, 16440 bp, Oryza sativa
attcccatgtaggccacgaaaaccacagagcatagcataagatttgtaaattataatatacctctgaaaaagatagccctgcatttctatctgtgtaccaatagaacattccttcttgaatgtccacgctcaaagcaagagacatgtacatgtaaacacatggtcgccatacttcaggacattttaaggttgccatcattgttctacttgcttctacaaacttcatatgggcctaattttttaacagtagacaggaaaatgtcaatccaggaaaacaaaatagtacttatatctgacatgaaaaagcaaaattgtttaccagctcatatggaaagttgggcatatggacgtcctttatcatcattccagctaggattaccagggcagaaggtattgccaacatgccaagggcacccttgagaaacacaagattaatctatgatgagacaccgtcacaagaaaaactgaaaaagcagcagtggataaaagagagaagcaccaccaccaccacttcacttatatttatgcagaaacaggatctttcagtggagaataatttaaatttaaattgattgccaggactatagtaaagtggtataaccattgtgattctcatttagaagtacaaagtactaacaaacaagtaaaaccaacgatactcacttgagagcctattgcatggacaaggaaaccacttattgagaatccaataagccctcccacagatgcacagaatccgtttaagcttatcatgtcagcagcaagatgagggtgcactatactgttttcagcaacacaggcatctatagttacatcggctattgccacactagcacttccggccatcaatgccaacaacgcgaacaatacatgaagcttgctgtggagagataatacaagcatcgcgactactcccatgaagcctgcaattcctcagcaaacagggaggcataatcaataaaaataattccataacctgtaactgaataacagtcgcacttaatcaaaggaacattatgttgaggaaataacagtagaaaaaaacatatcatcagacttgtcagtactaaataagtcaccgggaacatgaaactatgccacgttcctcgtcccgggaacgccgttcccgttctgggaacacgggaataacctcgtttccccccatgttaaaacataaaaaatgtagcgtcccatgttccttgacccatcgatccgggaacttttatgacataggtactaatgctaccgtgctacggcaacagctgatatatttgagttagacagcaaggctgtttatagtaatgcacctacataactgcattgatccatccaaattaggtaatggacaaaatttgctccttcaacccttttatgtagttcaatgatccaaaatattaataactcaatggaaaactgttctatgaacttcggcctaaataattaacactcctcagctaaagcctagtaatgaaaagagatagtgtcccaaggagcatatcgaaactcgatacgcttccttgctacaatttcagcatctaatcatcagacatcactactctcaggtcctaaaatttcagtttgcgattcatgattaaccagtaactcgtttttttttaacaaaagatgattaaccagaagttttccattgcaatcatcatcagcagcagcaaaatgggaagcgtgaagtactgttaccacctgcgatgacgaagtaagggcggcggcggtagccggcgatggggaggacgtcggtgaggaggccccagagcggcttgaccatccacgggatggaggtcaccccctggtacacctgcgccgccgacggctgcacccgctgcacgtccttccagtagtagtccgacgccacccgcatgacgccgccgccgagcccctggctggcgccgtacgtcgccaccacgcccgccacgaagctccagtgcagctccctccccagcatcctgaaccaccccaccggcgaccacgcgccgccgccctccgccgcatcgacggcgaggaggacattggcctcctcttgcctgctgctgctcctcccccccttcccctcctcctcggcgcggaggtcgtcggcggcggcggtggccggcgacatcttcttgcgcaaagatctctcgcctggttttacccgaattgctccggcttgaatctggagctcggattccagcaccagatttgggtttcttgaatccaaagctcggagctgcgaggtaggtgcatcagtaatcgaatcgatccccaaaaagtcttaaagaatcaagagaaaatgtcggggtcttggcaagaacatcaaatccaactgctgcttcaacctctcagctcctttcacatgcttactactccacacagatagaaaacaatcgccaaaaacagaacagaaaaaaaaaactatatgctaaatttgccgcagaatgctgcctaattgcatccaaaaacaccactcgagtatataaacagcagagatttggtgcctgaaaacaagaaagaaaacgggggaaagaagtggagccgaggagttattaaatttgcacgctagaagtgaggaagtccaaagaaattgagagatcccttctggttggtgtgcaggtgtagtagaggtatagatggccatatggcccgaggcccacggcccggcacaaagcccgcaattttggcccggcccaagcacggcccggcccgattagggtcgtgcccgtgccggcctggcccgacagccgggccgtgcctgggctgcaccctcggcacggtgggccggcccggcacggcccgatcaaataaaaaaaatatagggacaaaaaatagacttatataatcgtataaggcatggcccaagaaaataggtatacaaaatagacttattttccagccatttaaacacaacccacagagttgagggaccaaaaatagacttatttccagccatttaaacacagcccacagagttgagggatcaaaaatagacttatttccagccatttaaacacagccacagagttgagggaccaaatataaactctttctgtgaggcagcacaatagcccatcgtgccttcgggccggcccggcacggcccgactagtattgggccgtgcctgggccgtgtatgccgcccgtgggctggcacggcacggcccggtgcatcggtcgggccgtgccggcccgacaagcctcggcccaggcacggccgggcttgggccgtgccgtgccgggcggcccagatggccatctataagtagaggagaggatagccgtttgtcttattaaaattttaaaattttaagagaaaattcgatctttagtataggaaataaagcggtaccaacaaataacacaaaaaaaaagtttccactttcgatccatagcataggccaccgattttttttcgtcctgtagcacttccgtcgcattttgaagtaatagcgttagatcgggagtagagaaaatttttgtcggactcatttgcccttccttccccacattccccaccaggtctcctcttccgctccctcctggatggcggcgcggcaaccatcggcgtgctgggagaacgcctcgtctccccgccaccgccgagcgagctgcggcgctcgtccggcgcatttcttccccgccggcgactacttctcctcctccaccggcggtggcggctgaacagatgatgatgatggcgccggcggagtccgtggcgcacttcgactctgcgctcagctcgctcgtgtcgtctccgcagggcggcggtgatgagatggcggccatcggcgacctgatcggccggctcgggagcatctgcaaccacggcagcgccagcgccaacaactcgtgctacagcacgccgcgaacgcgagcccgaagctgtccaaggtcgccggagccggagacgacagcgactcggcggcggcggcggaggataagctggagccagccacaaagactacatccatgtgaggatgaggaggggacaagccgccgatagccatagcctcgccgagagggtaattaattaattacctaattaatcaactaattaattagatcctaattagctttttgctggtgcactaatccgcgcggctcagcttcgccaagtaggagcagcatctccgtgaagccgtcgccatcgtcgtcgaagatggccatgctctcgctgtagcagcagcgagcacgctgctcgacagcccgaaccccgtccacgaagtcggagagcgggacggtgggtgctcgctggaggaaacggcggaggaagcgccacttgtgctgctccatggcgtggagctcgtcccggccgcggtggtagggcccaatggacaccagccggggctcgtacagctgctgctgttgtcacgacgggagccggcgggaacacggaatggtgtgcggctggtgacggagacggcggcgacgcgactggggacggggatcgtcgccgcgtcgctgtttggcgacggcgccatcgtcgtgggcaccgaccggagagaacgagatgacacaggaagacgaagggcaaatgggtccaaaattttttttctatacttcaatgtaacgctgttagctccaaacctgatggaagtgctatggagcgaagaaaaaccggtggcctgtgtttctaatcgaaagcgaaaaatttttatgctattttttggtaccgctttttttcctatgctgttgatcgaattttctcaaattttaactgtaattctgcgcgctcgctaactgaaacctacccctatgcaatctcacagcttctgacaggtgggacatgctggttgggaccacagagcagtgagggtaatgcgtgcctgtacgacgagtgactagcttaaaaaaattatacgagttgcttcgaaaaatcatattaatcatttttcagaaaaaaaaaatattagctaatacttaattaatcacatgataataagccacctcattttacgtgataatacgtgttttacgacctctaacataccgaacacagcattagacgggtacagttaccgaaaattggcccttttacaaaatttactgtaagagtgaaccatgtcgaaaactaattgtaaaagtgagtctgacctcagcgcatgtagatgtaacatcttaacactagggttggcactgtgctactccctccgtcctaggaaacccaacctagtatgtaataggtgagttttttttttttttgacagatgaagtattctccaacgtgactcgaattttccaaattagcatagttcagcaccatgagagctccggatcgaatgaacctgttcatggtactaccatgtatggtgaagtggctctagcctagtggtagagcacctttcactctcatgtcttggtggctgtggttgtggttgtgggttttttctttaaaatatcacatgttttgttccaattttattttataaatatcacaataaaaaatgagaacttaaattataatattaatattaatacaatatttagctcaataactataaatttgtattttttgtacatcttaataaataaaagttacatctttctgtttaaatttaaaaataaacttaagaacccatttgaatcgcaggattgaaaaaggtgatgaatagaaaaaatacaggattctaatagaaatgtaagtgtataataaaagattgcaaaacacggaaaaaatacatgaatgatcgtttaattgtaccacaggaaaaacgtatgaatcggatgagatagattcaaaggaaatttttcaagaggttgggctcttgctaaatttcctccaaaatctacacacaacgagtcatttcataggattttaataggatttagaaagtttcaattctttaaatcaaagggccaaatagaaaaattttctataggatttaagtcctacgagattcctatataaattctttgattcgaagggactctaaaacatagtatgaactatcagtagaaactagttttcacttttcagaacttgatggtaagcctcccgtgaaaagaaatggaaaagatgaagtgcatgggggttcaaatctatgatgcaaggataggagccacagacccgaactaaatttgaaaatatattgtctatttattttttctcagaaatattcgggattcaattttttttgcacaaatataccgtcggtatcgctcaacggatatgcgaaaatgacgtgggcgtgacaacgctgacaatgtcgcacgacgacggcgcaaaaccactcgttctcgcgcagcgctggcgtgagaccgagcggtctcgcacaacaaaacagattatcatttcaaaatggcttaattagtgattaattagcctgattagcgaattaataaattattaatcaatcactatctattattaattaatcaataatcatgacaattaatcactaatcaatcaattctcaaaacggtttcgctgtttggccgtgcgagacctctagcattgtcacgtccacgtcattctcgcgcagtggttaagtgatatcgatagtatatttgtgctaaataatttgaatcccgaatatttctgagaaaaaacaaatgaacaatatatttcaaatttaattcccactaaccctacaactgagctaagaacgttcaaacaaatatggcttccagcatatttggaggcagcagaggtcggcgccaagccgccaactgtgttggcactgagatctcatgacgtaccgaaagttgccacctcggacacaatctcagcgtcaagaaagcttaagtgattcagacacgatgccactacatctaattcgtttcccgaaagttgccaccttggacaatacaccaatagattgaactaggagtgtttttcccttaccccaaaattcttcttctcaatgtatgtcaccgcgaactaaaagcgcacaacgcgaactcaactggagcttccgacggcagtagaatccagcaccagccagagctcacccaccacgcaagccgcacaattaggaatatctgattgaaaataagaatcaatttgcacaattaggaatatctgattgaaaataagaatcaatttgccacaatggcagtgtttggtttggttcataaataattctttcgtgtttggttcataaataattctttcgattttacatgcgtactggtctcctcctggagcagagtgtagacgcggctcaacacctgttgtgctcgtgacttcgtaacaaacgtagcctaaactgcagtttgttcagctcaatcacaacattttagtgcttacctttttaacggaccacacaatctcatcagtaacgaaagatattagcaaaaacacatagcagccaccaacaacacatactcaacacatagggcatactcctgtgttcttggtggctgctatgtgttcttagcactacgaaagatattagcaaaaaacacatacgaaagactgctccaaaccgggatgaagacaagatacattcaattcttaaatctagctacagcactaacacaatttactgcacccacagagcaatgtttgtcagggtaagtcatcttacgcttacccctattcatctagaagaccaatgggtatccataatgaaccgtaaaaccaacccaaccgtaaagtctgtaaccaatatcccactaagactgcatggcatcatctcctgcttcacccggcacttcattgaacatgtactggctctgatactccatcaagtactgcgtcgatctcttgacgtccaggaacagctggtagaccctgcttatatcctccatctccacaaccttacccttgcgtttctggcaagctaatgcagccgaagtgatcaggtggatagcatacctcagggacgtctccactcctatctttgtgagcaaaaccttagcatctgcagacatttccacatcttcttcatcgcacctgatgtctaggatcttccggatatcatcctcggtgtaaggctgtgtcgtgatgattaacagacgatcaaggaaatcaggtggtatcccatgtggtgatcggtagtttgtcccacgtatggatgtgatccctcggttagttgcaatgactagaattggagccatgtcattttccaatgcacggtttaggaaggagaagcattcgatatctagcatgtggacttcatcaataaacagaacaccagggacaatctcagccttcccttcctccctccactcagcaacttttgtatcaatctgctctcgaacctctgcacgaatttcaccagtgtcaccagtgaaaagtgcaagaaaaccttgtgtcctggacagcaataacaaaaaacaaaaatgagtttgtgcaaagatagtctcacttaatttttatggtaggtagaaaaccacatctgaaagccaataatcttggtctaatgaccaaaaaactaccaagccagttataagttagatttttggtgattaaaaaatggaatgttcaaaaagattcaccaaagaatactatttagaacacatcagatagttgtttggctgataacatacttagagagagagagagagaggagagggagacagaacacatcacaatcacgatcagttcatgatttcaaactagttgaagcatattcatgtaccttgtcttggaacatggttcatttatgtgcacatgatactccctctgggctgataatacttgtcgttttagacaagggtgatgtcaaactttagaatctttgattatgaatcatttttaaaatatttttctttcaaatatggtgaccaccacatggatagattagtcttaaaaagcactttaataaaatcatatatttgttaacacttttatacatattataatgaaaaataatggtcaaagttgttttttgtacactgtgcccttgtccaaaatgacaagtattatcaacccggagggagtaattgctaagctatccaaagtaccattaggcttgactaattttcatcacattatgtcctctagcaacatcgtgcaggtcctttctttcacaagagttacaacaggaggctgctctctattgttatttctctacgggccaaaagaaaaattagatctgatttgggcagctgaattgtatttcagctccaagcccaacaagatcatatatgccatccagtagtcagtagaccatattttcttagtattggctaactgtgtggatgcggcacttagtagggagaaactgatccaactagggctgtccaaatccagtttaaccgagttctgtcaacccgcattttacatgtctgcaggtgaatgaatgagatgactaggtgcgacgtagtcactggaacactatggttagctatggtttggccaattttgctaatgcaggaatgctcaaccctttgatctagttccagcgtcattcaataggatttgggtggtgctgagaatgggacaggggttgtacagtataatgcagggacttccgtgcaaagagcatggtcacagtgtaaggcagctaagcaagattaaccgatttcaaatttattatgtgattctgatcactgcagatacacgacacagaaattattttccattcaggctcagaagcaaaatacaagattgtaaggcagtccttaatttggaatttggagcgacaagctgacaagtgatcctttgtgtgcaaacgctggaacagatttttcaagactgaaaaagaaactttggtggctaagctatcacctggataattaacatacaagcaagcacacagcacatatgtccagggtaactgaaagtcaatgtgaaataccagagctgatagaatttgaaatacttcagttggttatttcacttgtatctatttttcagttgagtgataccaaagctgacagagacttcacttttgtccgcttactcgttgcagtaagatgtgataacaaacgccctttaatatgtagttctctactatgccaaaatgattaaatacttcaatgtagatttcttgtcaggtagtatgaaatatctactccagtaatggacgaatttttgggaagggaatgtgaaattaccggctattgatgacatcaatttcatgtaaggtgacacaatgcacgacctccttgcgcttctggagctcgccctcggggcacttgacgaacttggtgtgaggaccaacagcatcgtaatcccgcgacctcccgattgagcggccaagcttggtcaccttcccggaggccttgtcgagcgcaaccacatccccgctctgcaccttctccttccccagggcctcaatcatcttgccgccgagctcgtacacggtctccatgtccgtggtcttgagcgtgaggcgcccggtcttgccagccgcggcgacaccggaaggcgcggagctgccggcggcggctgcggcggagacggggcggtcgatcgagatctcaacgacctcgccctcgatgatctccgcctcctccttgatgcggacgccgatggagcggcggaaggcctgggtgagcgcctcggtcttggagaggtcgagggagaagagctcggacgcggcgacggaggcgaagggcgtctcggcgccgagggacttggcgatgcccatggcgagggcggtcttcccggtcccgggctggccggcgaggagcacggcgcggccggcgatcttcccctggcggatgagctgcaggatgagccccgcggcgcgccgcgcggggagctgcccgaccatcccctccgacgagccgcgggcctccagcgaggagtccagccccagcccccggatgtgggagtgcgccccgatgcgctcgatccgcgtcaggtcgcggctctccgacagccgcttcagctccgccatggccaccacccgccgccgccgccgacgaggtgcttttggcttcccgagggtactaaaagagaagaaggtttaaggcgaaagggggggaacgagttctagggttttgccagccagcttgggttgggttgagtggatggatatatgaagacgaagacgaaaggggggagcacggagaggtgttgcacacctgcacttgtgacataatgggccgttactagttgggccagatgtctttttcggcctgtttggaaccaaagtttttcctattggattaagtccacatgacgttcctagtctattaatcgagtttaaatcgcatccccgaaccgcaatatctttgacctcccaacttgcaaaaccgggttgaattaggtcctccagtagcatataaggccggtttcgctgacgtggcatggtcaacctacctgagttagcatgggccccacatgtaagtcgcaaaaaaaatcccttctctccctggccgagagtagtcgccataatagtcgggtgtggcggcagcgaagctatgtgtccttggctgcttgcaggtccaccagccttgcgtcccgggtcatcgcgtctccgtcatccctgagtgggaacgatgatggatctaattttatgcaaattcaaatggcatgactacgtatatacgatttgtaatgccatttatctgaattgacatatctgcaatagcgtggatccaattaacccttacataaattccgaattcatgtgtttcccctgtaccctaccccatcattgaactctccctttaataacgggggaatttaactatttgcaactattaggtttgtcaattatctaaatgcccctcttagaattgcatttatttttttgccattgaagagagagaacttcttaattctttgccacttttgcatatatagcacgccaacaaggttgtcccgtcatcttattccttctccacctcctctctatcttctctcccccttctctctcacctccggcatcttgttggacaaacggcgagctcctactcgtcgagcactgagcctcgctgagccctctgaaggaggagctcgctgaccggatggtgcccaagtatggccgtgtcacgtgaggttgggggttgcggcagacattgtcgactgcagaagtgtcctaaggaggatgacgaggagagtccatggaccgaggcacaacgatgaagcggggatgcggcggtgtggaggagggaagggtggacttgaggaaaagaggcttgctactggcaatggcgctcattcgcggctccgcgacccgtttcacttgacctcactgttgacaatggcgctcctccttatcaacatccaccgcgagcacaaaaccctcatcttgtgcgccttgtcctcctttggtgacagcaagctcctgggtccctgccgcgccacatctccacctaaccagccaagacaagggagctcgctggctacccaagaagatagccgaaggtgaggaaggagagagaagatagagaggagggggagaaggaagaagatgacggggcggctttgttggcgtgccacgtatgtaaaagtggcaaaaaaaattaagaagttgtttctctctaagggcataaaattaagtgcaatttttagaggggcatttggataattgacaaacctaatagtggcaaatagttaaattccccttaataaccctctagggccagattctcaaattctcatcactcgaggggttaaaatgtaaaagagcgaaaaactcccgcgcgccaaatcgtgatggaaccctaaactccaccgctcccatctcgtctcgatcccctccatttcaaatccacactccgcctcccctctccggccgccgccggcgagatggatctctccgccaccccgtccagatccaaatccggcctcagatcctccccgaggaagcccgtcgccgcccccgccgtggcccagatggacctctccaccccgtccaagccgacccccaggcggaagcccaaggcgccgccggtggcggctccgatgtcccccgtgaccccgtcctccgtccgccgctcctcccgcctcctcgagacgccgaccaaggtaacttccgagacccccgtgaagcccaccccaaccccgaagcggaagcgcgccgcgccgtcgccgtcgccgaagacgccgacccagtccgagcccaagcggcagcggcagaggcagaggcagaggcagcagccgaagaagccgaagaagagggcgtactaccggaaggtggtgtacgacggcggggagttcgccgccggggacgacgtgtacgtgaagcggcgggatggcgcggagtccgacgcggaggacccggaggcggaggagtgccgcgtgtgcttccgcgccggcgccgcggtgatggtggagtgcgacgtgtgcctcggcgggttccacctgcggtgcgtgcgcccgccgctgcggcgcgtgccggagggggactgggcgtgcccctactgcgaggccgagcgcgcggggaaggccatcgagaggcccaagccgccggaggggaagcgcatcgtgaggaccgccaaagagaagcttctctccagtgatttgtgggctgcacgaatcgagaggtcagtgaaaattgtgctctgtggttattttgtagtcagtatggtaggcagaagttgattccgttcaattattgtttcgattcatttcaacttgcttgaactagccacattacgacgaattctagtgaatcttatagtcagaatgaggtagcattgagcagtaatgacgaactggtggtgtgattgtgtgaataggatgtgtaacggcgcatccttgtcatgatttagttgttccagtaatgaattctgcatagacaatcgtttgttctggccttgaattaggtctgataccccatgtccccagcaaaagaaggttgcatcagtaattggggttggtgcaagatgcacctggataatttctggatgtttatcgttgcaattaaacctctagttctctactgtaacaatttcactcgactgcttgtaaagtttgagacatacaatttcttaccaataccgttggttgcaacagtttatggagggagccagatggaatattctgggcaaaggtaagatggtatattatccctgaagagactgcagcaggaaggcagccacataatttgcgtagggagctgtaccgcaccaatgatcttgcagacattgaggtgataagttattttcgagtgataaattggttcctttggatggtatttttgttcattattcattctgttccttgcttttatggcttttgcagatggaaacaattcttagacattgttatgtcatgagccccaaagaatttaaggatgctagtgatcaaggagatgacgtattctactgtgaatatgaatatgacatacactggcataattttaagcgtctggcagacatcgatgatgaacctgaggtacatgtactgaaacttggttatagactgttcatagtaggagtgtaggactcaggggcaccattctggtagtcaagaagtgaacctcatcctactctgttattgtagacaaaggaagatcctggcgacgagccatacaatgctggtaatgattatgtcagtgactcggatgaagattctgaatatgatgaggaggaagaacctactaaatgtagttctgctagaacacatcaatcacatgcgttggctgcggtaccaaccattcctcgtcctccccccctcttgcctgtctcctctctgctagtgttgcacttcatgctttactgaaatgacatgcccatttgcagaatctgcggaaagggaggacatatggcctacaaaaaattgggatccgtaaaattcctgaacatgtccggtgtcatcaaaagaccaatctggagaaggcaaaagcaaccctgttattggcaactcttcctaagtcgttaccttgtagggataagtatgttagtacatttttgcagcttgtttcaaccactttcttttgcaaactgcttttgagttgaagtctcatgtcagagaaatggaggagatatctgcatttgtgaaggatgcaatttgcaatgatcaatgtctaggacgctgcctttatattcatggtgtaccaggcactggcaaggtaactaaccatcctttactgtcccctatgatggtttgatgtccttttctgtggctgaaggctaagcaatattttctgtgcctactttttcaacctgtagactatgagtgtacttgcagttatgaggaggctaagatccgagcttgattctgggaatctgaggccttattctttcatagagattaatggtcttaaattagcttctccagagaatatctacaaggtatgtgaacttctatcttggttgaatactatgattgtcctagtaaaccatatcagccatgttaaaaggattataatgcatataattttaatatatgcaggttatatatgaacagttgagtgggcatagggtagggtggaaaaaagcccttcattatttaaccgagcacttttcaggtggcactaaaattggcaaacaagcaaaccagccaattattttgctcatcgatgagcttgatcttcttttgacgagaaatcagtcggtaataatttgtagctgaacctgttgagtagttcagcaattttgtattctattgtttggaaaatgataattgtttgatatttcgttttgtttgtcactttgttttaccatgtagattcatgttcattgacatttgagctaatgttttgtcaggtgctgtataacattcttgactggcccaccaggccaaattcaaacctagttgtcataggtacctatacttttgtttgttttacgtgtgattttagatggccttttaattactctttggctgttactgaacgcaggtatagcgaacacaatggatcttcctgaaaagttattgcctcgtatttcaagtcggatgggtatccaacgactgtgttttggcccatataattatcggcaactgcaggagatcattacaagccgtctaaagggcattgatgcctttgaagaccaagctattgaatttgcttctagaaaggtttggaatgcagtgtcatgtgtaaatcttttctattattcacccatgtcttttctgtgactgttgctttgtccatcctatttgcaattttttttcctgaagggtgaatttatgcaacatgtcttttgttttaaggttatttcattattttgttctctgcatatgaattttccatgccattaaacacctttttgctaccgcttgtccgataacaaaaactttggatgttctgagttcctagtcaaactaataaatgagtggcaggtgctgtaatcactctacacttttcccttttccaacaaatactgtacagaacacattgtctgtttagtcaatgattgcatgccatacgtgtagcagtcttacttttgggggatgaacttacaaactaaggaacacctcatgatctaggagatcaattatttgtgtcatctgtagttagttacttaagacacttagcaatttcttttcattgtagttcctttttgtatgttcctgcaagttcagttgacagttgacaccaacggaagccagtggactaactgcattcacagcactgtggtttggttgcacactgactgttaagtg

SEQ ID NO: 4668 - DNA, 6291 bp, Oryza sativa
acgatgacgaacagaccggagaaattttccaaagtgagaggcgtggaatggctgccatgatcatctgtcaactgtgaatcagtcttgttggtaattcttgtcatgtccaagatggctactgaaagattatggaccaatggagaacctatagggaatccctgaagagaaaaacacggtgttagtaaccaacttttgaccccagaatgtatcatagtatagctctttgaaggatgaggtgtaaatgtacgaactcattaaagtgatagtcttacaaaagcaaatccaaggatattgtatgtctgaggaaacacccagaactcgttagaattattctggtcagacataaaagatcttatataggggatttcatcaacaatagcagatactttcccccttctcaaagcttctgcatattcttttccatttgcataaggctttaacctgtcttctttgaacgtttgatttaacaaggagtacacaaatgatttattttgatacccgaacatagtcattattgtgacggagctggtcgagatcaaccactgaggggcggagcctcgatgtggttagcatggatgacaaactagccgtgtaactctgcatagtatcaccactgcaaagcaccatattaccacaacaatttttgacatagggcttctaataatttgacctgtgcataatgtaaccaagaaagtaggttatttcagaagtaatattatagaataataaataaatctgcatgtttgagatgtgagttataaccatgagaaaatgtcattgtggagaaagcaaagtagagagaagtgctgatctgcctcgagcttgatccttggtactcctggtttctgggtcgttcaatcatccacacgacaaatgcaatgtataagaaactactcacagcagccaaccacagctgccatgtcagcggctttataaatatccattgaattctcggtttggagtatttctcagcgagcacaagaatagacaaaccagattgtgtgtatggcattgtgaaatctacatgtctttctcgttcggcagttatgctgacatcacccactgtagcattaaacttctgaaaatcagaagaacgattcagtgagagaatgacaggaaattaaaaggttataattcaagccttgcaaaatgccaagaaagcaggtaggagtaaggctcaccccagaagagacgctgcctactagatcatcatatgaaccctcaaagagacagaacatatagcatggaggatgatctaacttcttcatagcgttctcaaatacttcgatgctaaaaccagtggcatttatcttgccattaggaagatcagtaatgttcagaaaattttgaaaaccatattttcgtgtcacagcaatcctgagtgtctcgttagatttctcactcccacttccacaactactttttgagcatttgtcctttgattcaatagcatttcttctctgagtttttggattaaggggtgttttagtgccatgtgttactgctaatccaaccctattgtggcctacagaagctgattgagaatcctctgttacagctccattgccattgctgctaatgtcaaagctatagttgctggtgcttcgattttgggggagcccagaatatgatgtcctagaacatactcccctcgcaccttcaccagtgatggttacaatctcgtacgatgatagcttgagcttctcagcaagctgataaaatgatatggtgtccgctgagtcggcatgtgttcttctggctacaagcacaccaccctgacccaattctctctctattgtctggaccactgagctgaagagcctgcatatctcagttgatgtggcagtggctggtattacattgtatgaccagagcagaatactttggttgtgcacatcatcgatgttcggattatccaggaaagcagcaaaattgacttctttatttaacctctgaggttccctgctaatgacgaatgccatatcattcttcgtcaggtatttagctgcacagcccataggatctgtccatcacaatttatgtaaagcttcatcaataggtatatctgtagcagaaaacattgaaattttcctactttcgacaaagagcgcatgtagaaattagtttttttttcttttcagatcctccagaaatacctgtaagacattaggtatataactcactatagagatgtttgtcttataattaacactactatgatataacactaccacttaatactaagtagtagtagtaaaagatcttgaaggaaataccgctgacttgattaatgcggaattgacaaactgatttggtccagttggaacaggatcgagttgtgattttggcaggaactgaagtgacaaaaccatcgtgtttggaatgctcataggaatggaaacaaactccaggccggaattgagggccatccagagaatgcgagaaagccctcagcgagctgggcagagccgatttgtatagcgcatcaacaaaaaaattaatcattcacgaaagaagaaaagggtgatccaggcaggggctaagccaggatttagagatagggggtgctggcacaagccttaagaactcaccggcgcctcggtaggcaatggtgtgaatcttggtggctcaaatcctgcagagtggcagattggcctcacctagtcgccttttgttcgctctaaaatacatagtcgcccctcgtataattatattttgaattttgtggctatttgtcatttgcactaatatatacataaaatgattgttgatatgattttggatttatttcaacacattcttctagattcatatataaaagtgaacttattttagaatggtgggtgtatgtctgagtccgaatgtaccttaatatagaataaaaagaaccatttttaaactaggtcactaaatagcaccaactttactcaatacttagaatgacacaacatcatttatattcatgctttttagttttggagacttgcaaccacatcgcgttatgttaattaactcaagtaattacttaaagataaaacctattagacacctagatataggctcaacttgcaactgattaatgaactaattgtatggattagatggctaatcacgcggggtttgcatgcaacgcatagggatgaggggtgccaggcccaccccggcacccccggtggcttcaccactggatccaggaagcaccaagggtgtggtggtggagtcgtgggtgcatgacttgcatgactccacccaccagggttcaaattctggtgcccataaatattagacacatgtaggtaaacattcaacaggatttcagtgatattatgaatgtgccgttggttttcgtctcttagcccatattttagcggacgtattcgcggggtgctgtgtaatcttatgaaaaaaaaaagcagaagaaaaaggtggcccatgacggcactcaccgttggcggtgagagcgatttgggggcggcggaggacgatgccgaccagtgcagcaccggggcccgggggaggaggacggggagggagggcgtacgtgacccatgagtagaggaggcgggctgctgccccaagggcggcggcgagccgcgcgacggcgcgaggggcctgcggcctgggtcgcgaaggggagaggggggattttggcggcggctacacctggtgcgatgagcgacgagatcgacatgttactctacctccgccctaaaaatatgggctgccttgtctttctcctaaaatttccggcctttttggataagctagatccttccttattcagattttaagagtctagtactccctaaaaaaaaataatctagatgggatttgatacttcctagataaacttatatccaaggctgaacttcagtccttttccatcacatcaatctgtcatacactcacaacttttcagtcacatcatctccaatttcaaccaaaatccaaacttcgcgttgaactaaacatagcccaaatatgtcgtatgtcgtagatgataccaaatcaattgtcttttttaagaccaggggtatactttaatggctccaaaaattcatggattttgaaacgataccaatgcatgtgaattacaaggaggaaaagtgattatatttcacgtttgaacacgttgcgtgttacaacgagaggatgaaaggaggacgagtccgaatttaagaagagagtagagatatacaactgtactttgtatatggcattgctatcaatacttagttataatttcgtcttaccatgatttgacgacttacattttattgtaattttctcaattaatatgagaatttctaactttcgggcaaatcttggtaggtgaagtcaagaacgaacgattccaccgccatatttgtggtgtttcgccgtgttaaaactaattcataactcatctttttttattatataatttgcacatacatttgtttgaagtattaaggacaaaaccattttattttattaataatttcaagaatcaaaattactccctctttcatattagtcgttttgatttttttttcaactttttaaagttagtttgatcgtgttataaaaaaaagggaaaattggttctatagcatcgaaagattgcgattttggttttatagcattgaaagtcacaagttcactttgggagcactaaaagtttgctccgttagtgtatatagcatttccatcgggcttccgttactgcacagggatgcctgtctgcttccgtcaatcttccactcgaccgccggcggccccgccgtcgctgccatgccctcgtgctggagcagccaacgccgccgtcgactccttgagctattccacacggtcccgcccctaacagccaccaatcacattatcacaccttaaatttcccgtgtagctgcctggaatatcgccgtccccttaaatctgtcatcgagcaatccgccggcggcagtggtatagaacagacacgctcgaatgatgtgtatgtggtctggtcatctgggccaacgacaacaacaagaagacctctggctagattgactccgatcacaacccaattgaatcaattttttttatgtgcatgtgtagatcgtaagagtaactagtactagtatttctctagtcctgaactcctgatatgctccctgctcagcaagcagcagtcgagggggcctgaagctgcgcatcttgttgccgcttgggatagaaatttagaatgagaggcatcatggcttgtgatttctgtggagaagatgaagggggcatgaactgatttgtctcagcctgaccgagacacccgagacgaaggggcaccgtcgtcgtcagtttaacagaagttagcctcaagtatgacagaaatgctatatgcactaatggagcgaactttcggtgctaataaagtgaatcggtgatttctgatgctataaaaccaaaatcgcaatctttcgatgctatagaaccaattttgccaaaaaaaatatagcaatatttttaacataaaataaacatgttattgaaatatgttaaatattagttttaatgaaactaatttaatgttgtatagatattgttaattttttttctataaatatagtgaaacttaagaagtttgaatagggaaaaaaatcaaaacgacttataatgtgaaacaaaacaaaagaagtactaatatagttggataaatggatatacgactataaatataatagaagaaaggtagatatatactagcacactagctagacatatgttttttagatagtgagatcagataggtagagaaagttgaagaacacaggctctttcttagtgacactttattaggtttaactaaatttataaaaaaaatacaacaatattttaaaaaaatatcaaaatatgtttagtgttaaatataatgaaactaatttagtgctataagtgttgctattatttttttataaagttgattaaactagcttttaaaaattttgacttaaaagagtttcattatattaaaaaacgacttatattaatatgaaatggagggaatagcaaacttgttatgggatatcatgcatataggtgcgtacctactatattaacgttagcatgatacataaggtatatatcatataacttatgatagagagaatcccttatatgtcactgaaaattggtttgatcctttatatgtcactgaaaattggctatttccctatatggcattggtccaaatttgtgcaccctcccatgtcactcccgtctgttgaccgttaactctcaggtaaaaaagatgtatttgcccttctgagttgtcct

SEQ ID NO: 4669 - DNA, 29472 bp, Oryza sativa
atcagcaaaccttagttcggtactcttatccatcccaaacccatagacctgacacttctaataagttgattttcatccctgacatttccttaaaatagaatagaagaaatttgagcaccaggatgttatgatcaccagctttaacaaaaagaatggtatcatcagtatactgcaagtgtgtaatacccccatcaattaaatcaggaactaacccctcaaaagttccactttccttagctttatccaaaatagccgtcaatgcatcccctactaaattaaatagaatgggtgacaagggaccccctatcttaaacctctgtagttcttaaaaaaaaggaccttactctccatttatatttacagacatcttccctccctgggttatctttttgatccacccaatcatacaagaatcaaagtttttcttctgcataacttcatacaaaaagtcacatttgactttgtcatatgttttttcaaagtcaattttgaaaatgataccagcatcccccctcatcttcagagtgtgcatttcctcatgcaaaataacacaacactccagaatattcctcctagggataaaagcagtttgtgaccagctaatcaccttatcagccacctctattaatctccgtgttacagctttagtaatgatcttgagaatgacattctataagcaaatgggcctatattgcttgatggtattagcatctttgatttttggtagaagagaaataactccataattaaccctatccacatctaaagcccccatgtggagatcatctaacatttcctttataagatatttgaattgtggccacatttgtttataaaaacccacaggaaacccatcaggtcccggagctatattagatttcatacttctaatcacagcttctacctcattcatagtgaaaggtctgacaatagttgttttctcctcatcagatagtctcagcttcttggcccaaacattatcatgcaagtgaacctccctgtagtgatctctgccaaaaagttttttttgtagtaatcatagatgtgttgttgaatctgcctcaaatctgtgatgacctcttccccctactgcaaagaaaaatggctctttcttttcctccaattagcagccatgtggaagaaagaagtgttggaaatccccctcaaaatccaattcttaccacattttctttgccaccaaattttctcctggacgtctaattccttttcgaactcatatctttcctctattcagattcaaacaactccctctcatattcaaacaactcctctcatatgatctatgatctctgtcaatttctgttctaattattcaaacaactcctcttatatgatcctatttatttaccccgatacagcaaatgaacatgaaacatcctcctaaaataggaaaagagtgaataaaaacacagtagcaccaaatgtgcacacatgaattatctaccattagtccataactagtagaaatatttaacagaagttagagtacaccattagtccataactagtagaaatatttaacagtagttagagtacagaagcaacaactagttgagtacactcacatcaagtgaaataatgcgatataagactagataatatgtatcaagtgaaatcacgctatagcatctagtttcagtgcaccacaagataaaagcagagactcttgccaatggcttaaatttgccacaataaagcctccgacgttgttgaagaagtatacattaccgtcacaagatgagatgtaaagagccttggggatttcaaattgatcaacgagaccaagcttttcccatgtttcacgcttcatgaatgcatcgcagcagatatgcgggtaccgtctctccagttgagtttttacattgaagcactgcccgtctctccagttgattagtgagttgcatcagtctgttgatagtacctttctcaaccaagtggactgaagcatgactatgcatagataatagcctattggaaatttttcggcagattttgcatagtagaaaagcttccttgagaaattgagggtgcaaattggccatgagcaggtattgttggacgtgcagaaggcataacttgcacggatggtgatgttgcttaagcagcagaggtaggaatttgcctagaagtagcgcttgctagagtaactgatgggttagcttgcacaaatgacaagattgcctgggcaggagtaggaagttggccagcaccagaagcagagcttgcttgagggactggtggttgccgcagtagtaagccatgggacgagtagcatttcttcaaagccatgggacgagtagcatttcttcacagaaacttagttttttccattctgactctgtaaaagccactttgatattggcagctggaatggagcttagtgaatgacccaatccaagcagaccagttgttgatagaaaacacgaggcctgggagatctgcttaactccagtgcaggtccaaaactcgccttcggatgtatgagcgtgccagttgatttgatcctgcaatcaacaagaaacaaagacaaagaaaccgtgattaaatccataaatgatagccgatcggctagatgccgatgacatatcatttatctttgagccgatgtcatgtgtaaatcgatcggcaattgttaagtaaacaaatcagaactaaatctactcgatcggctgtagatatcaacgatatataatccttatatcgatatataattgaatcaagtgattgggatagatcggtcactttgccgagacagtataaatcacttagatcgagatatatattaataatgagattatatatatattcatagcatagccgatcagatagatctaacgtgtatcggctaatactccaatactactttatattaagatattaaagcaaatagaatatactaaacataaatctaatatacttaaatgcaacaagatcttaacatagagggcagatctaacatgttaattgagcatgtaggacaaaagcaattggatcagataagatcggctgaaactccgatactaccctaatcggcaaccagtaggcaggctagagattgaaattctaagcacgacttaatagatcaaactcaactgatacagcattaagtatgaaaagaagaacaatatctagacaatcaagccgctggatgtttcatagagtggtggatatctcatataatctaagccaacgtcgttatttaacctaatcggctaccttctggtaacagatgttagccgattgtaagttagatgacgatattgtcaaggattatgcaagatatatgataacttgacggattacataaacaagattagagtatcataaagatggaagcactaatctcgagaacacaagccgccataacaagttttacctcttgttgaagatcgaaaccgatgcagctcaacccgaaaacaataactcgttgaaataaaactaaagcaaaaagggtggcgatgcgccgaaattgtattgaacgtgtgtgttttttattacatagggctcgaggtctatttatacccgagaaatacaagatatgtccatattggacacgactcttatctctaacaaactctaagataccataagtctttgcggcagacttttgcccacatttatctctaaggaatttatataaaatatcctaattaatagatacaattgccttcccaggactctatccatgcgtggcaatcatcttgaagcacatcaactcgaacccaatgtcgcacacgggtcgtattgtcggaatcggctgtatcacttaaccagtccaactcagacttagccgatcccagtcatagccgatccggactccagccgattcttactctgtttccgaaaaaacccttatcctcgattccgcttcgatttcatcttcatctccgatgctgatattaccaaatttggtcgttaacaccagtacctttgagagtggggacagagggagtaagatttacctaggcccccacgtcgccctgctccaaggcgacacgggcagcgacgccactacccgctgccaccccctcccttctctcctcctccgcctcgccgccgcccgagcggccaccgacaaagctgggcgacggcaaggatggggcggcggggcctctcccttcgctcaagcctcggtgggcgggggcaacgccgagatttgagtggagggacgccggccgtcggcactatttccggcaccgacgaggccggtcgtagtagatccggccccttcgcggccaaatcgggcaagggcggcaccggcagtgccacttctggctcgaggaggaggccgtggtggatctggggaggtgagtccaacctcccgcggctagaatgggatgagattgacagcacggtggagacggcggcaaagtcggcggcgtgcacggcccgggagacgcatgctcgcacgagaggcgtatggcggcacagatgcgaccggtcggctggggcagccggaggaggaggagatgcgtgctgcggtggcaggcgcgtgaattgtgtttgatgcggccaacagagtaggaggacagcgtgggcgacggctgggaggccgtcgcgccccgcgagagaccggcacatccggcggcggtggaggccagcgcgttcgaaggcatcgaggtggagggaagcgcattcggcagcgtctaggtggaggccaacgcgtccagtgacttcgaggtggaggctggcgcgtcctggcaggtggcaaagccagctcggctagaagcagaaggcgaccccatcgggttgcgctcacggcaggagatgcaacgggtactagctgcgccaacggtgagttgcgggaggtggatctaggctggctagtgatggggcactagtgcggcagactttcgagttgatagaggttgttcaggcggcggagctccagggcagcgacggtacgggtgggtgtggacgtttgcaggtgaaaggctagctcgggactgcctgagccgataacggcaacatccttggatgttgtgttccctccttggggcgttgtcgagcagcctctctccccttcctcgataggactctccaggtgaaaaccgagtctagttggacgggcaacggtgatgtctttgttgccatggccttcttgaaggcgttgtctaggacgtctctattcctttccttcgccatcttctcactgtttggacgctggcaggtcttgttgtcatcatcaggttagggtgagagatgagcggatctccttctctctcgccctctccctctcctcaacccctctacgtgaggataaccgggatcttttcattgtctttcggagttaagctggtgtttggcgaggcgtttgtaacccccttgttggcctagtggcaatcggccacgcttagtggcggtcggcttggtgctagtgtcttctccagagtgctgtgtaaagagctgtcaacttgtggtggcggtgtgtttgttttttttcctggttacaatcttccagggtcgttaaaaagaacctttgggagcatgcactcccaaccaagtcgatagtactttgtaattttgacatagtttctacacatttgtgccaagatttttgtcaatgagatgaattgcggcatatgcagtagcatcttcaccaagggctgacagctcccgtctcaatatcctgaatacctcctcatatagcttggatatgagatgaaggggcataaactctagatgataaatgatcagcctgggatcgatatttgggtctacagcatatgctcttaccccttgcaggtatggggcaacaaggattgggggcgaagagagatactttttgagttggcaaaaagtctcttctgcctcctccgtccaggtaaatcccctagttatgttgagaagcttgaagagagggatagcccattctccgaggcgcgagatgacctgggctcccctcggcttaccatcttaagacgtagatctttatatgtctccacactccttttagggaggaatgcgtgacatacaagggcataaggggccccagatcccaaaccgaactgggattcgggctccccttgatttatagtcttaagatgtagatcttgtatttatccacactcctctcagaaaggaatcatgacatataagggcaaatgtgagcacggatcccaaaataagccgggacccaggctttccacggccttattctaaaaatgttgatcttgtaggtttttgcgctcttctcaataagtgatacataacctacaaggtcatgggagggcccaggtcctgagctaaggcagggattcgcgtcccgcacccctcaatctatgaaatcagtttatgtcgtgagatggggatcctgggactcaccctatagtaggtcccaagcccccttatacttattacgcgtcttagattaatactgatataagtacaccttttgtattaatcaatatggaatgctaggttcccggggaaatgggtaccgtagttcccatttcattgacaggccccatgaaggaaaaccagcgccttccaaattttgacaatttttccctacttcgtccataggtgtcaaatttagatgtaaacaacgtcgaattggatatgggcgacatacaaccaactcaaaatccgactcaaacatgcacgacatactaaaattttagtggaaatattttcaatttttataatagtagagataagtagtagtatatgtatacagacactaagtaattaagtagaaactactagctaggatactcctacgcgaccaatacacggtttatacactgtctagttgacagttttttttgtactatatatgtatttggtaacgtagccagccagtactcagaaaattcagagtgcgtgtttccagaggtatagactgtcaaaagaaagcctcagttattcagttatactattcagaagtactcaaggctgtagtataaacatgcgttacagaatgtagaaataatcaatcatttgactttgacttgaaatttgaaaggcgtcccattcattatatatagttgacataagtacgatcgatatgaagctaagtttacgataattattcaaaagcacgaataaatgaattaaatgttagaaagtcgaatcattagttttaagaagttttatgataaaagtttatggaaaaagttttcagaaaaaatcgtatggtttaggagctagacaaacataaccgccataaaatctctactattataaaagttgaagatgtttttgccagtattttttttacgtcatatgtgtgtgagttggtttttaagttcgttcgcttttgaaaataaatatctgtatttgagtcagtttttaagttcgtttgtttttgaaaatacaaaaagagttgtataagaaatctcttaaaaaaactcgcatgctaacttgacacgattgaactcctaattgtaacttatgattttctaaaaatatatatatccaagcgaattctcacagcgaattttaccttaactaagccgcataacaataatagattaaaatagccttcacccgttgcaacgcacgggcattttttctagtaagctaaaaagaatgaaacctatcataacaacacaggtatatatagaactgttcgtgtatacgaatacaagtagatcagcagtcaaattttatttcttacaggctaaggttttttatttttagtgatgaccaaatcattggggctgcatgatttgactgaaatggagtttttagcaccaaacaggcgcgtcccctgtaatacggtgcaaatttgtgatgtattgcgtctcggctgacgaattcattcccttctagttcaagaacatgaatgttctactactttctactgttacatgtcttgtcgtttaatgttcagtgtatttggactatgttaagatgcaagtaggacggactagcaggttttataattcgtctattctaatcataattatagttgtacctatatctttattcatggttatataagtagattaaaattgagtgtatatgcgagttgcatgtgtgaaaacgagtgttgccaagcctaggagaaatagcccgacaaacaagacacaaaacttacattctctatttcagaaaaaaccagtttttgaaaatatatctggacataaagctatgtttagatatatagcccgaagttttttttttttacagaggaatagtttacaaatatagtggcatgccaaagtgaaaacttttttcataggcagattaaacatgggactaagaattttcgcctgtatataataagcaagaatttaaatatgtcaagttgcccaagttgtatataataagcaaagtagcagcgccattttatctgcgatctgttgtttctcgttagtcagtagatgcacggataaaagcgcccaagcaaaacatcaagtgaacatcattcagcatgaatgtgatatagttagtgtcaatctagagttttagcgcagcttacaattgaccaaataaaggttcgtttcaaaaaaaaaaaaatctaaggtgtgtttttttttcacacacgcactagtaatacaagagtatatacattgccttcgcaaaatagaaatgattattacagtctaaacggttggtagagaacaataatttcaaatgataaataattaaatattgacatgatcaattactaaaatatgtacagaacgatctaatccacggccttcctgcattaatttctacagcatattggcaaacacctacaaaaaatgaagagacgagtcattcttattttcgaagttccagagcacgctccgtgtgacagtgtcaacatctttttgtcagtattcatccggtctggctggaatttgcaggcacagagccattctgaattggtccaggctcttcgccgtcagcacgttcgacactcccatggatatcctgggaactgtcaattctgatttcatggtgaggtcgatcatccacatagccatcacccatgacgttttgtgctgagttacgttcttcgcgacctccatttccaccatccgcatcgggacttcgcacttcagaatctctaattctggtgtaattggcaagaactgacttagaaatgcttatcatcagcatgagagctgagatacatccagtgatgatgaaaagaccagagaaactctgcaatgtaagaggtgtcgaatctgtgttaggaattgcatagcttggaggggcagccgttgtgccaaaccattttgcttcgatccgtgaaccttcatccccacccgtaacatccaatatggcagttgaaagattatgcaccaatggaaaaccaggaggaaacgcctgaaagcaaaaaagcacaatgccaattagtccagcatattttgtccagaatgtagtatatctcttgaaggctgaagagcgaatccatggaagcaatagagtcaataacgctagtaaataataaatgggagttggggatttgccccatcactttatgtctcattctcatttatttttatcttcactttttttttatcaaacttatggctgtgtcttatgacagaagcaaataaactcattctcaatgcaaataatccatggaagccgaagatgtaatccattttcattatctaaaaaaatggaagcaatagagtgagagtgagaggcttacaaaaccaaatccaggcgtcttatatatgcggctaagcatctggaattctttctcgtaacgacggtccgaaagaaaagaggttaaatatgggatctcatcgacaatagcagacacacctccattcatggaccccttcctcaaagcttcagcatattcttgtttctttgtgtagggtcttagccttcttttactgaaaccttgttttatcaaaaaggattccacaaaggatccccgttggtatccaacataatcaccatcaaacaggatctgttcaagatctgtctccgagggccggagcttcttcgcagttagtatggatgacaagctagctgtgtagctctgcacaagaaccagcaccacgaagcaccagattaccacaacaatttttgacaaaggacttttaataatgtgacctgtaacaaagacaataggttatttaagaactactgcaagaaactaaattaagccacttatagtgaatcaaatatagcctgcaatttggagctctaagtactaaccatgagaaaatgtcaaagtggagaaagagaaatagagagcagtgctgaactgtcttgagcttgatccttggtactccagatttctgggacgttcaatcatccaaataactatgccggtgaataagaagaagatcacagtggcaacccaaagctcccttgttagtggcttcaagaatacccattcgattgttgatttagagtcattctccatgagtacaagcattgacacaccagactctgtgtatggcatcgtgaagtctgcatggatggttcgctcggcagttattgttacatcccccactgctgcatcatagttctggtagtaagaaccagcagacataatgtaagtacttgattctttgattatgatttgcaagcacagtaagtaaggctcacccctgaagacacacgctgtactagctcgtcataagaaccgttgaagacaacaaacttataactcagatggtgtggtaacttcttcacggcagcctcaaatacatcaatgcaatagccaccgacacttctgtcagttacattcagaaaagctttaaaacctggtttccatggcactgcaatcttgagttccttcccatatcctctaggtagtgctcctaggtctctcctcaccccagcattagttctcttggtttctggatgaaaaaaggattggttcatgtccaagtctcgtgtcctatgagcaaaattgaacatagcacaacaatagcaagaattatttgtgtctatttgcatgatagaaggaaggtcacaaatttcctaagcaatactgttaggtacagtccataggagaagtgcatatggcaaatgaaaacatttccctcggctatatttttattgataatagtgactaacgcaacaggttatatttttcttttttgaaaccactacagcaggagctctgccggatatattaagagggagaagcaaaagtctggcaggaaggcaacattacaggagagcgatctttgcggcaggagagaaagaaacaaaaaaacagtgcctcaaggagggcggaaaaaccagagcacgctactaaatgttcttctatttggttcaagccatatattccaccaagttaagccccccaggatttgcttctaacagaaccaatgcaaggtcctcctctttatcatcaagggtaattcagatttttacatcctatcagaggtatgcaagtgcactgtttttttcttaccattcaatttctttgtgtatcacgggtggcactacctatatttggctcactgaacattcagctctcatatatcgaatgattcaagattaaatccctaagttagtcctcctactattcactactaattttatcctaaattacttagaagtcactaggatacttctacatagcaataacaattcacaaactgatcctgcactagaaacaaaaccaggatgaacagcgaacctcctccaagttggacggatggggccatggccctgcgactgcgaggcttggtacggcggagccgccctgcatgcgcgcacgcgtgctggaagacgggagctctgaacccccccccccccccttccgtcggcggcggcaatccctacttgtcagacggcagccagcagccagcagccggcgccgcgccagcgtggtgtgattgggggtggtggggatggaggcgattggtgtagaatagcggttgtcgcaaccgctaacgccgccgcgcgcctctcctccattggagtgcgccggcggcatcaccggagggagtggacgccgacgaaggggttgcggctacggatcacctatctttttttttctcgttttcttttacgtattactccgtatgatatgatataaagttttacaaaaatcacactattgataattttaatctttgatcaaccatgattttttagttatacggtcacaccttaactttatgagtatttttatccatagtgtaaatatacatagccttttttaaattttgaagttttttttttacattttgatataagaacatatataattagttacagtttttgtgaaactttataaatataatatatggatttatgtgttatgtgtcaataaaattttggttttgtataacttgatcataatagataagatttattttgttaatactaggggcatttattttcctctcttttctaggtgccctattttttctcgaaatattgtgttgtttaagtacaaccgggccccgcggccacatgtcatacacatggcaaaacagcaaatgtatacgtggcacgtttataaatctccgttttgcctgttgcaagaactaatcctatcgttaagactgctgaaatctacctcggatgagtttcaccgctccttaggaatgtaggaaattcgtcggaatttcagacagtttagctcgatttctctaatattctttcgaaattctcccgttcaaaaggaggcctacaagatgaagtgtttgatgaattggtggtaaccacgagcctataagggcagtcccaacccatagtacccataagcagtgtctatggtgtcatgtcaataagacatcataatagaaactacactctacaacccatgatttcttaaagtggaccattaataaatgtatcatctctcttttctatcagtcatatttattcttcatctattatgaagacactattatctcccaatgcaaaacttgatagtgtctagtgcataggttctcgtgttgaagttgtgtcttgcatgagacccaatttcttcctctcttcactctctctctcttaattaatatagtgccacacaagctaaaagtgctatatggcaatgtagttaatgtcatagacaccatcctaggaggagggttgggactgccctaatgatagccgagcacttttgtgtttctttattttgggcagaaatccataagaaaaaaaatagtatactactctactttatagtaagttagtcgtggttagacacatactaaaacttgaatgggaacacgaacatagctatatccacattcgaagtactccaatttagaactaggttaccataatttagaacggagttagtagttggttctattcccatttgcataagtgccatcatttagaactgaatattttgttttagcatgcacaaaaacattaacatgtacttagaacagcaatttcagtgactcactattacaggtctctaaatgtactactttttacgttctaaaacacttatcgtggtttattttggtacggagggaggatatcagaattcagaccaacgagcggttaccatcgccgtgagcagccgtgatagcacccgtgcgcgaaccactgccattcgggtccaagcggtaggcctccaacgccacggaaacatctcctcccgtcgtcgccgccgccgccgccgccaccgccgaactccaaacaacgagcaggacgggcaccaccgccgccgccgccgccatagccagccgccgcgcctccattgctggtcaacttacataccctacactacagccagtggtggagccagaaatttaaacatgtgggatcggtttgtttttaagtggggtcatttctctaatttcgtttagagaaatgactacagctcgcgacgaccacaacgtacgtatatcgaactacatgtacgtaggtagtatgtgttaaataggcattgggaattttgggatcaatcaacacgttcgcccggtcttgctggactatttctctcctctttctcttttttttttccattttgttgattaacgtgtgatttgtgtggctgtgagcagccagtcaagaaattcaggatgcatatataagttttttttttccatggtccatggagatatcagaattcagaactgtatcagcaacagtcaatcatttgacttgactccaagggtataatgacacacaagttggtacagaatggttcatagctcatatagtcataggagcacgatacaagtcgtagatcattcaatcttgtttttctctgcaagcgcttaattagggcttattcgggcatcatatgaccaaatcattgggatctaattaattaagcttgcacagttgcactgcacgacctgcatggtttgagtcaattgagttccacttccactaggcttgtatagcatcaaaccgcgtgtgtcccttttaaatttcttctccttccagaaacttggctactagttcaatgttcaggtctactgacatgacagagatctgtatagttctcccggtttacattgacatgagtcactgaccgagctgctacaaatttttagttccacagagaccaaagaaaaccaggagaaatgtaatggcgcggaaaagaatgcacaagtttagtttgcaagattcagtggcattgtgtcaaggtaaggctgtgtttagatccaaagtttggattcaaacttcagtccttttccattacatcagcctgtcatacatatacaacttttcagtcacatcatctccaatttcaaccaaaatccaaactttgcgctgaactaaacacagcctaaatacaaagtttctcgttacaaagtagcactgacattagctgtgagttttagaatagcttacagttgactcttgcccaagaaaaacttcgttcgtcgtgtttgtgctatattacaatcattgtcaatctagagttcttttagaatagcttacaattgagttttgtcccaagaaaagaaaaacatcaactgaacatcgttcagcatgtttgtgctacattacaattatcattacaattattgcaaatctagagttttagaatagctttcaattgactaattaaaaccaacagaagaggcttacacagttaagcaaggccatgcaacaagcaggccaaaacaagtgaacttttttctagcttcagagccattctagtgccttgggagttgggatagttggtgcagataactgttcacactctttatttgttttcagtcctaatctggagggtatcagcaggcacaggatcgtcgatcgaccatgacaatctgcggtggttgtggttgagcttcaccgtaacaaacaactctctcgccactatggacacggtctgaaccgaagcctctcatctctttgcatttgtcatatagaaacttgctaaagtttatcaacagcacagcacctaaaaggcacccgacaatgatgaaaagaccttggaagctctgaaaactgatacgtgatgagcctttgctgtgactgccataataatccaaggacgaatccatgaaccatgtcttttcaatcttcaacctttcaggttcttccgttaagctcaagatggcctctgaaaggtctggtaccaatggagagcctttaggtaaaacctgtcgaaaagtaaacatatattgtaaagccaaggcagaatgctcgaagatgcattatactaataaataacaagtgcaagaagcttacaaaaccaaatccacttgttctgtcaatggggccaaccatctggaactccctcccgtatttcgagcagaaagaatttagatagggtatctcatcgaagatagccgaaacccctccatgctttgatcccatccttaatgcttttgcatattcctcctgcgtgctataaacctttatcttgtggtcatcaaatttaagcttcttcagaattgattgcacaaatgatccactttggtgtccaacagaatcaccattggccaaaagttgttttagatcagtcactgaaggttggagcctctctgccgttagcattgatgacaaacttgctgtatagctctgcaccagaatcatcaaaactaagcaccaaattaccacaacaatttttgactgaatgctttggatcttttgacctgtccataggattaaaaaaaatagattatcaaaaatcatagtagtatcaaaacaaattacagcaaatactgaatcacagtagcatatgatagcatccttaagagtctttcagctgacccgacaaaaaacaataaaaaaaagcatccttagaaattaataagttgaatgtacgaagatgtatgtagttatgtattttatctattcaatagctaggtctgtaatgacataccatgtgaaaaagtcaaagtggagaatgcaaagtagaaagcagtgatgcactgtttccattttgacccttggaaatcgcgatttataggtctttcaatcacccatacaactaggcctgtgaagaagataaagatcatagtggcaatccataggtcctttgctagtggctgtaggaagatccatgtggttggttcatcgtcactcttagatagaacaagcatcgaaacaccagactctgtgtatggcattgtgaaatctacatatctagttcggttagcaataattgtcacatcaccgactgctgcatcaaacttctgttgcacccagggaaacggaaaggcaacaagtaaattagtaataatgagtttattcacaagggaaaattagttaagaatacaaaataagcagagctcaccttgtaaaagacctgggatactagcaggtcatatgaaacagcacaatcatagggaatgtactcgtagcgtagagcatacggtaatttcttgacagctgcctcaaacatatcaatgctgtagccactgacagttgatctattcgtgttcggattagtctcaacattcacaaaagttttaaaatcacgtctcactggcacaccaatctggagtatcttagcattcactgggaagtcccagcctttgggcactgttgttgaatctccaggccaaacgatattttccagatcagaagaacttgtgctaaatttagcatcaccatggataattctagagttcacagacattgtgagtccagaatcaggactataaaacccgataactctagttttctctccaataacattgacaatctcatatgtgggaacctgcagatgtctatcgataagcctgaattgtccagccaatccatcaaactctccttgcaaaatggaattgaggagttctggaccagcaggcaatgctgggagatcatctactaagttcttgcctatgtttcccggaggatgaaaagttgggttcaaagatctggtcctatgaaccttctcagttgctgttgcgactgcccatgccacatcataagcccataattgaaagatagtgggttttgccatcctaatatcagtatttggatggtacttagttctgaataaggtggtaaatcgagagctgaaatcagtgatccttgtagattctgcaatatatggccggaaaccaacaattccctccatgctttcaatggaatgttggggaagcacatcaaggacaataccaatgctatctgtgacaatccagacataccctttagtcatcataccgagtgcttttgcccttgcaaagaggcgggaagcacgggctggcaacatgtggacaatgaagacacgcgtctgcatggtcatgagcttgtatagttccacatctatatggttattgggggaataagcagggaaggcagaacggttaatgacattaaccccgacaccttgaagagcatcggtaatggaagggaggatgccaacaccataattgttgtcttcatagacaagaacaacatttctccattcataggctttgacgaatgcagcaatggaggccacctgataggagtccttggaacaagcacgaatgaagtacgggacatggtaccgagtgactgcatcaccggttgcagagaaagtgatgacaggaaccttggtcttgttcgctaggtaggtcacaaattctgcttgtaaagtgctctgaggaccaataacaatggcaacattttcattcctgatgagatctattgctgcaggatatataaaagaatgatcagttcaatgttcaatacatatgccaactgtgcaaaatatatgctgtataaccctttccttacatcgaacactccaagatagcacatagaagaaataaatcaatagcaaaatttgaagaacatgtaacaccttaaccaacatgtgcaaatctttctcattctacccatatactagcattttattccaacggttccattctactagaaaacaagctatgctacatcttagccagatttactgcctgatgaacagcaagaacgatctaacctcaccaacaggcccagatttacttcccaagttcaaggaactaattgatcgctttcgatttacaattagttgcaactagttcatgacataatcactgaagcaaagcaatctacctggatcgatggattaaatctaagacagggtacggttcagtaacagatccaactgaaaactgtttggatttggttggctcaatcaggtttcgcgggagctcataccagcgcagcgaacagacgattccgctcaaaatcggtgcctggatcctccctccttcgccaatcgctgcctccgaccatgactccgatctcccgatcccctccgaatcaagtcgacttctacacggcccccgcgagtgaatcccatcagatcactcctctccttccccagcgaccaaaatcagcggcgagctgaaggggcggacggcggcgactgcctctctcctctctctctctctctctctctctctctctctctcgtcttccttcgcgagttcgcgttatcgcgtttgctttttaattttttgcttttttttagggcaattccttctcggcgatttgatatgcctttttaactgatttgcaattgattgctgttatcttcttatggtttggctcaatttttttctaaaaaaaaaattaaattatggtacacagctactattttgttattgttctggtggcaatggtacttataaattataattgaaaattcggtttgatatcactaaattttactcttcaagtatttaaatatttttttctttcaaagccagatagattagatgtcacatgcatgattacaccgctaatcccaatgcaatctcatttggattatgtttgtcgcaaccactcctatgcatgtgttggccgctcgtgttcagtgttcacagatcacaacacaagctactacagtagtagtttatcgttacaaggattagagtatctatcaatgcacatatagcagagagggaggtagagagaatcttggctagacacagatttttgaagatacaaagcggagagtatctatctatgcaaatagtggagctagggtggtgttattctctaattaagatatagatttttttctcgattttcgttagcatgctttttaaactgctaaatgtgtttttcgtgcaaaaactttttatatagaagttgttttaaaatatcatataaacacatcttttaagtttgtaataattaaaaattatttaatcatacgttaatggttttctcgttttactagacctaactataattcatcttcaccaatttcaaacacatattcgcctctgccaacttcgcaaagtggctaatcaaaatgcagtgacagttcaatgtgcctccttgaaatgagggattggcaaagaaatattggagaaattatttttctatagaacctttgaaggatatgaagatttctataggattgtgctcatatggttaattatatatgaaaataaagaagatgttggatctattgtgaaacttttctctctttttttttttaatttagcgatgccgcaagagtagccttcttaccttctccactaatatcagtacataaatgcacttcttttctttattagtgaaagagatagtcttcctgctttcttattcgaatttttttctataatatatgtaatcaaagggctcctttctccgtttcatgtgctcttaatttctgcatggttgaaaaaacatgtactactttaattcatttttctttttcttacagcgcagtgcagtatgtgccaactatggataggatttgcttgcatgcaaggtagcagggataataatttacacatgcacatgtgtgtgcaagcagtaaccacagctcccaacgaaaataaaatccatggattcttgggtatcatgtgcacttagccaggcaccagctggctgattacactataattatcatttttcctgaaaaaaaaggacctggaaaacttaaataaatccctactgacataagttggcctattcatgcatggtcagtctgcagaaccttaaaactgttcttgcacggttatcatatccacaatctaatatgcccattggatatgctatttaacattcaacagaaatttcgaaaaaaaaaatatgtcaaattttttgaccatgtggatgctctttgagatgcgtacagacaggcaaagaccacaacaacactaggctaccgcacctttttttttaagtacaatgtaaatggagatttgctatatatatttaacatttgacagaaattttaggggaaaaaactgtcgactttttgggtgcggggatgtgctttgagatacgtacagacatgcaaagcccaccgcgacactaagctacgcacaacacctttttctaagtacaatgtaaattgcatgcaacatatacaatgtaaattgtattataatttcgtgcaagttgtaatataattacattataattataaactatagcatagttatatatttagcaaagtttttttaataatatataaacaggccaataaaattatttaaaccacactttgtagtttctattttttattgtcgttgcttgcatgcaaccaattaatcctcatgcaaaactaggagaatcatttattttgttagctttttttttagctaaccaagttcacgtgaatgcaatttggcaacaatatcgtagacaatggatcaaggctggctagaattaactgatcaaagtattaccacttgatcgagagaggtaagtgagcagcttaaaagaactattaacagtccaatgcatggattaggtgatagattcttcctttatatattgtactggggtgcagtagagtgtttaattaattattgcacgttgagttcgatccatctgtatttgtgcttacgtacgttttaggtgcattttttaatttcctcttatgtattatggattatcatagaaatatttttctaaactgtatgattttctaaaagattagtacttgaaattcaacttttaaaaattttaatatttattaattattttgtgtttaaaatcgaataattatcataatctcaatttcgttcataataaatcatacattagaactttagaatatgtattctctgtcctcataattagttaagctagtgttctggccgatgctcagtctgatgtctagtttttagggggtgtttgggagaaagggactagggacttattttttggagaaagggacttaagtttagtccctctcttctaaacaccctcttagtccgcagtccgcacacttttcaattttctcccaataaaaaagaacagaaaaactttttttagaagaaaaagaagagcagcgacaactgtcatcacatattaccagccttatcttttttcacttatcacttatgcttatatatacttatcagtcaaattttaaatttttaaccttttattcggagtcgattttagagttttttcatgaaagtttattttttacccttgatttttagatcgctacgagcacatatataaaagttttattcacaaattatattttatttgcaaatatatcgtttgtcttattctttaaataagccaaatgatgggaccgtaaacaacgccaaatgtaatcacgtcattaagtaaagcacttcatgattaggcgattgcttagtcacttcagtactagagctagcttagctaccaatgtcgtcgaagtgtcgaagcaagtgtatatacctgcagacgcggcggcgacgacgtcgccgcgggagtccctggcgcgcagcgcgacgcgggtggcgaactccgggtgcgccgcgtacacgtcctccagcgccatctccatgctcagcatgctcttcttccccagcgccgtcgccaggtccagtatcaccccgacgtccaccgccaccctcgccgccgccgcggccgccgccgccgttgtgttgccggccgccgccgcgacaatgagcagcgggaagaagaagaagaagacgacattgagactacgacgacggctgcaggtagcagcagaggaggctgcttccctcctggagccaaataagcctctaggctccatctcagtggcagtggctgtgtacactactacactggttggtgccactcgctagctgctagctgtacgcctggcaaatactcctacatgatggtagtacttatatactgctatatgcatatataatatggtttcaaaaaagaatatatgcatatctcttctctacctctactattataaaaattgaagatatttttaccggtattttggcatgtcatacgtgtttgagttggtttttaagttcgttcgcttttagaaatatagatccgtgtttaagttagattttaagctcatttgcttttggaaaatacaaaatgagtcgtataagaattttctttttttaaaaaaacttgcatgctaacttaagattaaatacagactttatgattttctaaaaagaatatccaagtgggttcccatagtgaattttatcctagctaaaccgtatatataacaacaataaaattaaaatagcatttacccgttgcaaccgacgggtactttttatagtttaatataatgtatgtgattgttgcccgatagacacgatgtagagatcgatgactattgacttaaccgtgtctaatggctctatgttgaatagtataccgtatcaagcctgctaggatcgaataacaatatgtttatgttatatatatttattgttttgtttcatatgagtgctttgtctctctatatgcattcattatgaccgaacaatgcaacacatattgagtgaatctataccgatcttacagagaaataacccgcatacaccgccgctcatacatggaaataacattgtagcatctgtacctaatcgttgtacaagtgtgtcaaggtcttgtttgagaatattaagattctgataagtagcaagtagccaactggttatgaactgaagaagtagggtcttccaacttattgcattttctggattctataatttaagtgagactctgaactatttatacgagagagttggaggttctgcaacaagctagctagctaccagaagctcttgaaacaaaggctgatcgagtaattaacgtttccgggtaatctccaaggtaaggatttgtctttttcatcgcggctgtttgtgagacagcttctattcggtttaatttcctactagcaagctgcttgtcagtatgacaatatgtactagtaatatatacacccactagctagtccattacagctaactagctaactctgaagttaagtgagagcatgcattcatatcgagcagcatcgctgaataagattaactaagaaaaaaataaagatttaggcctcgtttggctgcctgtgtatattatacatgtgtgaatagttccacccgtgtattgagtgaatccacaccacccacccaatacacagcatgattcgatataagggggggctggtggttcgaccggtaatgcccaggtttgactccacagcaagtacgtagtgctagctaagctaagggtatgcatgaagagttgggcagagctaggtttaccttttaggtctcgtttgttaagtaaaaaaataatataaaaaatacagaaaaacctaagaaataaaataccagaatagaaaatccaacatgtatatccatctgtaattctaaaaatcctgctttaaaaatttaaaaaaaacacaagagtagaatttcacaaagaaaatagagaaattaacatgcatgcgcatggatgaacttgttactgatccatgaaatatttataggtgaactagaataattgattcaacacaaatcttccaggtagaaacagcacacaccagacatacacatccaagcatatatgacagtaataaataactttgatagctaagtctaccacagaggtttaatttaaagtctactaggtgttccatctatgaataatttctttgacatgaaacatccaagcaaaagatagacaactccaacagcagcatatctccctactttccattgcatcttttttccatgcatcacctgaaacaaagtacaaggcaaaagattaattggctccatatctgccgtggcaaactgactgctagcaacagagagaaactagagaaaagagctaataaggaagcttgcaaattcctaggacaagagcactaagggtgtgtttgaggagaaggagattgggaagatacgcaaaacgaggtgagccattagcgcatgattaattgagtattaactattttaaatttcaaaaatgaattaatatgactttttaaagcaactttcctatagaaatttttttgcaaaaaacgcaccgtttagtagtttgggaagcgtgcgcgcggaaaacgaggtgctttctcaccctatatcacacaaacgaacggagcctaagggactaagaaaagttggagcaagatgaaattaattgtgcattttacaagctatatcttgataaataagtagaaatgcttatattttggaacggatgtagtacatttaaacaaattcactctgtgcatcttcaaatttgaataaataagctcactccaagtatcagtgttatcattcattcagcaaattcaaatcatgctttcagagcccagtactgctcacccggagagagcaacaataatatattagaatatatgtatataaaagtttacactccccaaaaaacaaaagagcatgaataatatgtaaggcataatgagcatcatttttagcataaataatacacctgcatctcaggtgatgctacaatgtgaaaactacaaatgtatcatctgccaatctgctcaacatttacccccaaaaaatagttttgctgagcatcactgaattgaagttttaggtgatacaacaaacaaaatccaactgtttaatatgattaaagtgtagtactaattaatatattcatcagtttcatagaggcaataacaagacaaaaggagcagtaccagatttacgcagttgtaatcttcctccttaaccacttgagtcgtgtagagtcttttgcaatcatgaaaatggccatgttttgtggatctttgaagacatcataagccaggaccttctcatcatccgacatatcttccatgctgtccacaacagcaatgcatactgggatcgggaactcatcctcatgcacattacttcttgccctttcctgctgcataatttcagtctcggcttgcttctctttaaattccagaaattttcccatcatctcaacaactttcccatcctggcgacgcctttgtgttgccttttctgttttgtcacttgtaccagcatgcttgtttgttgcacttgcaactctttttcccattcttgaccttgtagcggcatcacttgcaattggctgttccactattctcaggtcgtcatcatcactttcagcattgtgtacatgagagtcaaaagggaaattctcatcttctcccatataatgttgtgtgacagtagcttgagaagtttgagaaggctgtgtgagaggaatatgagaaggttgtgtgacaggaacttgaaaaggctgtgtgataggaacttgggaaggggcaatggaggtgaagttcatggttctctcggcagtgtcccacaacagaaagtgaagtcaagtaatgtttaggagaactgaatagaacatgcttagctggtaggaaaataaagattcaacaatggtgacataccatcatatagctctcctaaagcctcaaacaatgggaaagatttattccggaattttttggccttaggatgagactgtttattgaataccagaaagaaaagtaattagcaaatgaaattaaagcaagaactatatttaagaatttaacaagaattaacagcaacgagagacaagaaatctcacaataatgatgttattccaaacagcttcatctccttcaatcctgcacagcttatcatcctaggacacaccactttgttttctcgcttcttttagaactctatattccctcttcaactctctctctttgtcttgaatttgaacctttgtaaaattgacataggggaacttctcatggaaggatttgactattcagttccatgcttctgtggaccacccattctgactcctatagcagtcgttgttgtgatcatgtagtaggtcaaccaaagctttttcaagtcctgcattccaactagctcttgaacgatcaagtacagttggaatagagaaccacacataagctacagataattacatgtttttaatctatcaacctactgaacttgagaagcccatatgtgcatttaacatgacaagaaaaagcccataccttttggcgatgcctttttcttttgatgtcttgaaatctttggagatggctttctttggacagctgcagcttggattaaattgaactttggggaccctcttccaaatattgttgctgcgaataaaaaaaaaccgttatcaaatttaagcatgcaaaaacatcatgatgcaaatacaaaagcaaaatatttcatgagaccagttaagactcacatttattaagacaagttatgactgtagtcattccacatatttagggctatcatatctctaaccgtgtttccatcatctacttgactgttaagggacatcacatcattactatattcgtcgtcaccttcagggacatcaataaactgttctggagatatgttgcttccttggtgattgaaccaaccctcatccccattaagcatccgtataagattgtagaacaccactgtggcaactggaatcttcacttggttttcaatagaatgatgcgttccaacttttaaaatagggaaccgtttcttaagaacaccaattgctctctctatgtgactccgcaatatggcatgcctatgattgaacaactccttataatttcttggtcgttgctgtccacgcccaaattccttcagatggtatcgaactccacggtacgatgcaaggaaggatggcgtgttagtatatccaccatcaacgagataatatttgccttgaggcacattgaatcctttaagcatggctgacctaagaaccctagcatcagttacagatcccttccatccagatgatataaacgaaaaatttagatcaaaatcacaaaccaacatcacattttgacttagggtaccctttctattcctatatggggcctgaaggtcttgagaaatggtgataggaacatgtgttccgtcgacagcccccaagcaattttggaagtaaggaaagaactgttgatctatgctaatcttccagtgagtttcaactccagtaggttgcttgataaatctataggtcaaagtgggattacattgaaaaccgccataatatgtcggtgaatcgtttctccactatgatggaattcatgttgtagatcttcatagctcgcattgtgagatatcatgtaaagaaaaaaaaaatccaagtttctcctctaccgtaatacctctcgtgtcatgtaggagatgttctgttcgaagatatgtcgctattgctctaaatatgttaggctccatgcggaatgcaacaaggcaaatcttttcatgtccctctaaaatatttctgagttgttcttcaccgtactgacttgaagtatgccttactcttttctctatccctccattactagttaaaagatatagggcaggcaaccagaacataataatctcctcatcctcctcatctcttctcttcctaattagcgaattcataccttctaactagaaggaatactgaatatttaagatgaccgcagttagcaaaagaaaaaaaaaagtttcagcactctagtttttagtttcaacactatatatgttcataaataattaaagctaattatgcatgtgtatgaactgaacactcactttgtttaatagaagtgctatactactatgctagtatgctcttttgtgcattcaatggtgttagtgtaaaatactgtaatgtgtgctgcttgctatacatttgtatatcatgcagtggtggtggtacagtctcagcagtgtgtagaggagaactactagttgtagtttatttctgctcaaaatctctttgcactgacacaagatcgaagctagtgattccctaccgtgttttgttcccttcaggatggctgtactttgcatatctctaagcattgacataccttgtctccaatatttctcttgcagatcgtcaaaccctagcaggatggctgtactttccggatcttgaaggtcctagcagcaaaacaagtggatgaaagaagatgggcaaagaaaatgagatgagatgaaggaggagaaggaggagaggactttgaaccttgatcaagcgagtaggctgccggggcgacgccggcgatgaggcgacagacgacgacggccgatgaggaggcggtggatggctcggagaaggtagtggcgccggcggcacaggaggatggcgaggacgtggtggacagctcggagaaggcggcggcgccggtggcgcagcaggacggcgaggaggcggtggacggcttggagaaagcggcggcggtgcaggagaagtcgcgagctgcggcgtgcacgcgagagagttccaggcctcgggtgaggattattctctcacccgtgggtcggcatggatcgagccgcaatacacagcaatacacgaacagctaaatgcatatttgggctggatgtgggaattgatccaggcgtgggctgcattccacggaaggacgggtttggggcctattccacatcgaaacacaaacagccaaacaggccttagctgggatgttccccattatcgtgagactagcagactaatcaatttcaccttgcaagattattcaattagtaaaattcagttattcccggggtcttatactatgttgacttggcgttgacgtgacacggttggtccgggagacatggcactgtctacgctgacagcgagtccggccgtcgtcagggagagatgctgctttggtttggttggatggagccttggatctgtcactgtttgtccgtgttactagtataattaatataatactggagagatacgatatatagtgtgaagattacttaagaagggataatttctctcacaagattaagaaggcataagtacaatatctagctgggaaaagaaagacagaaaggctactgaatgtttgtgtttgttgagctcagaatgtaatgaattgtggtgatatatttacatagt

SEQ ID NO: 4670 - DNA, 19418 bp, Oryza sativa
caaccgggactaaagataattggggccctgactcgtccggacaattttttgaaccgggactaaaaatgatctttagtcctggttggtgttaccaaccgggactacagatcaaaaagtttttaaccgggactaaaaatgatctttagtcccggtttaaataggaaccgggactattgtggattttagacgaccgaccaaagatggtttctctagtagtgtgcgcagctacagggaagggaaggaggtgttcgtcgcgcagcgcgagctccagtccatcgccttctccaccatatacagcatccgcttcccgggcagcgagtgcatcgcgacgaagacgaacctgcgccggcgacatctcgccaagaaggtgagaggcacgctcaggcgatcatacgcgagcgcgccaggccgccgccgccgccaaggaggacagcggatatggcaacgacctcctcggccgaatgctggaggccaacgcggcggtcggcggcggcggcggcgagaagagcctactagaaaaaatatttttgcaggcgaccaaaagtagtttttccaggcggggggaaggaccgcctctataccaacaactgtgacggcacaatcgtccgcctgcgaaaatgcactggatgaacaaaaaaaattggcgccccgccggccctgcgcctcgcctcgccgccgccgccgccgccctccccttgtcggagtgtaacatcctgaaaattcccgacaataaaaaacactaaaattttgaactttttaaaacttttgcatcatgctggttgttatggttactattgcttgccaaactataaactgtcacaatggaaaattaaactaaagctatacaactaagtaataattataataataatatatttatcatgaaccctataaatatttacgcacaagaaatcaaagtcagacaaaagaagtaatttaatttatggattaaatattaaatacttgaaccatgcgatgagtgtcatgatatctgtatacacatgaaatgatatccattcaaataagtcgagctctatctataaaatagttttactgggaataatcaattcgatattacataatttgtattgaatcacaaatattgaattgtagaaatccatgttgtggtaaaaccaatctaaaaagataaaccaatatgtgtgaaaacagataaataccaaaatcccaaaatataggaaattataaaaatctaggataatattaaatattggacaatattaaatttggagaaaattcacatttgaacacttaatattgtcactcaaatacttttgattaaatacacatttaattggcaaaatttcctcaaattataaattaagcaaaaccctaaaagaatggaaaatggagaaattagaaaagtatataataaaaataaaaatatgtgctatattaaattttaataacttaaacatggtgtattttacattgtgacaaaaatggtggcaatagtatatttttcctaatggcaaaataccctctaaaataaaaaaaatagtcggctagcactgttcattagcccctaggtgttcgatttggatccttgccaccctagccctcttcctccccactgctgcgacgccctagctggccttgagccccaagccgccatcgccatccatcgccgtcgacgtatcgtcgccgcgcgcctcttccggccgcccctcgcgccccgcgccgcctcgcgccgtcttgtcgtcgtcgtcgtcgccctgccgcgccgcttactgtcgctgtcgccctgcgcgctccgctgccacgcctcctagcgtccctttccgccacacgccgtcgtgtcaccgtcgccgtcgctctgctgtgcgccgcgcgccgtcgccatcgccactgccgcgccgctgccataccgcctcgcgccccgctgccactgcagcgccgagccccatgccgagctgcatcgagtcccgccccacgccgccgcgccgcgtcgccgttgtcattaagcactgcccgccccctccgcctatataaccccccccccccccccgcggccgcccgttgcttcccacaccaccctcaccacctcccctccctttcccctctcttttccatccccagcgtcgccgcctcttcggaagcagccgacgcgcctcgccatcgaccccgacgccgcgtcgccgccgaccacgccgccggtccggtgagtctccccctcccccaccgctcgtcgttgcgccgcgccgcccaccggttccagccgagccgcgagagtgagagagagggagcagagaggtagaaaaagagaagagaaaagagaggatagagtggcccacctgtcagtcgtagtaagttaataattaggttggaataaaaataaaactattaggaacagtgccatttcgcaattagttgaattaggaactttgaactagcataactcactcattttaactcagattatagtgaaacttgaacctaaattcatctaaaatcataagctttccaatggtatataattcactatttaataaagtatatatataattataaaataattaatatcaaaagattagattattggtcaacttaaaaatatgctagtaaataggattgatattgtaaagtagagtagatgtaataatattggtctttaacatgttttgtcactgtagcaaccacataaataattataatcaatgtttcaaattaatggatgtataggaaaataatagtgccatttattaatctatgtccaaatataattaaacccatgaattatcagttatttaaataaagttagccttataattaggtaaatcaaacatgaatacacatagatgagtctttaatttgtttatgaggaataggaacagagttgttatgatagaaccacccaaataaggttgagttggttagcatccaataattactcaaacaggaaaatcacttgtcaacccacttaaatcacatatactgtacaatccatttaaaatcatacataagaacaataatctaccttttgcatatattaaaccaaggagtctatgacaaacatttgtagtggataaatactaattatagtggataaatactaattatagatcttgacctaatataatctaagttcaattgtaaattaggattattcattgtaaatctacgtgatgggataatctgtaaccataatatgattaacctaaacaactctaacatacaaagcatggataattgttaaccttttataatttattgtgataaataaaatatgttaacaattaaagtaaagcctccatcaataaaacaataatacaaatgattcactgtacttatttgattgatcctaaatccatctgacaacaaaacctctagtatatgaccattttatttagatagatgcatgtgtagccataatctttccaaagtcattagctagactaaaccacatattagccagaggtatatctcatttatacactattggttactcctaaatagaccacgatgacaacataaagattaagaaactttagtccttatcacgattggaatcccttagcaagcacgaatagtatgagcaaccctaggttcgaccccaacaagtacattttgttgtgcataattgattggtgtttgaatattggtttttcttgcatattatagaaattgtatatcggttaatcgtgagacaacgtatgcagcttctaggaggagaaggttgatcaagaattatatcaagaataaggactatcctgagcaagcaagtcatcactattccttgaacatgttgatccaattgcgaaattattttgtctataaataaaattgcatgcaatgatgaacatcctacatgtgattatgccatgccttgattattgtttaccccttattccttcgtaaccatgtttacgtatgaagtccctagtcaattatgataaatgcttagaaatgctattctagaatcatgcatacttatatttatcaaatgctatatgcttaggtaattacctttgggaaggtaattgagatgcggcatataaagacatgagcgccacattgccatgatattgatgacatgatttgtaaaagatgaaataaaactaaacaactgttttcaactgggcggacggaggatttgggtggtatctggaaaaggctactaccgtccccgtcaattaaggatcaagccatgaagttaagcatgaaacgacccccgtataaccgtacctcttgaatgggtataggcctagcggattagatagccgagcggaggcagtatccctgcatagatggttcacccctaagtgaggcagatgcgctacggtggggcagccgttgaggtagggccgcgaggtgtgccctacatcggtgtcgccattggtaggactgccatgagagtgtgagagagaacttaacgtgtgtgtgagacttcttccccgggagcgccagaactcctctcactgctagaaatatagacgcctagagtgcatgaggatgtaagttcatggagcgggtactgccaatgcgaggttatcgaaaagttttgccgtgacgcgtctcatgtgttgggacgagactcatgtgttgggcagtcgcggagtgcgggtaaagtgtacatccaatgcagtgtgagtaaaacaaatctattcgaatagccgtgctcgtggttattgagcaccaggacgtgtattacacttggctagactctaaattcttaacttgtgtgggatggttttgtgtggttttatgtatgtcttgttttatatgagttaatttccgttaaataccaacaatataggaaaatgggttatttaaaaaaaattgttcgactaggaaccttaatttaatttcctctagttcccagctgtcacccgtgcaacgcaacacgcatataatatcaggtcccctagttgctacgttatgcaaacattgtcatatcattttagtaacagataagatcgtacgtatatatatatataaattcaatctgacttgatcgaaatacgaagaactaataaaatctagtgatatgtctccagcgaaaaaaacaattgtaaaacgccatcatacattctttccccatgtaaaagaaaatgaaccggtgaaacgttgggtctgtttggtacagctccaactcagtcaaacagtttcagctccatcaaaattggaagtgaagctgagtggagctttctcaccaaataaactagagttatagagctgggtttaggtaactttacaactccacttcagacctaactcctatagctaaatttaggagttggagctataccaaccaagcccgtcatcgtgttcagctcgaaaccgaaaatttcgacgaaatttctccactgctgtaacagctatagctcaatgtcagtgtgtgtgtatatatataatcactgcattttcacgcacacaccaactaatttatcactcaaaggtgtgcgagaattaatctgccgttgcattgcatggggatctgccgtcccataaaggatgcacataaatgaatctcatcatgtactacctccgttccaaattagtagtttcttgtaatgtttaaccactcgtcttattttaaaaattagtgcatatataaaaatgtagaagtcatactttaaagtactttaaattacaaacaaaataaataataattctataaatttttgaataagacgaaagataaaaagttacaaacaaaaactaaaagcgacaagtattctgggacagagatagtactaattaagggacctaattaaattccaaactgttatgttatattatgctactatgtagttaattcaaaatttaatttgatcatgtaaattaaggtatcatatatatagagaaatttcacaaaactcaataaaatataccaaaactttacactgatatctcgtgataccagtatctgaatgtatataccaaattttacgctagaaaatatataataccgtcttaagaattacctcttacatcccgttacctcttctctagctactaactcgatctctactttgattaacttatttgtgggtgattaacttatgctagaggtacgtgcatgggttgtgttaatttgtgtatgcagccgaagaccttatcaagaacgcacaggtgcaggccatcatcgtcaccacggaagcgcatacggccgtggttgcccgccttcgccgccgccaccgcgtccccatcctcgccttccccatctccggcggctctcctccgccgtcacatcatccaccccaccatgcaacggcgacggcgccgccgttcggcgccgatcacacttcagccaaggcggcgctcaccggcatcctcaccgccatattctcatcagcacggcgcgcaggcggctcgccgccccatggccgccgctacaacgccggcgctccgactggtcgtcgtctcgaccgccggcgattggcggggagaaggtcatcatcgtcatcgtcatcaggcgaggttctgaggatcgccgtgccgcggaagaccgggttccaggctttcgtcgacgtgagaataacccggacaccaagagacagaacatcaccggatactgcatcgacgtcttcaacgccgccatggccagagtacggcctcgccggaagtatgtgttccacgcctttgacggatcgtatgatatgatgatcttgtacgcaatgtatcttcaggggtaagccttgattactcccacaaacttgtttatttttagttgaattttttagtccttaagaaattaactcgagatacctaaattttacacgaggggcctcatcttttcacttgtgcttatatttatcagctaaaatttgaaatttcaacattaaatttagaactgattttggtgtttcttcattgaagtttatttttcagcctttgtttttagatcattaaaaacacatataaaaaagttttattcacaaattatttttcgtttataaatatgccggggctgtaaattttttggtactacatgtaaaaaatatgatagctctccagggtaccttattaaaaattatattatctatactccctccattttaagttatttgttcattctagttttgtagtcctaagtcaaactttggtctttgactatcaatatttctaaaaatctaaaaactaatatagttaacacaataaggtttatgtttccagatttaacttgaataatattttcataatatataattcacatgtgtcggtgatatgggaccgggagtattgcgcccggaggcttgaggcagatggaatcgcccacgtggcctggcaccttcggggacgtcgggcccgagggtgaggtgtccgccctcctcctgatttccccgagggggggtcgggttgctcctgccccgaccccgagggccgaggtgccccgaccccctgtggggtttgcactatgtacataggttgggtgaacacggtagggctcacctaaccgcatttattgcggtctggtcaagcgtgtcacgttgcatgcagcgcaatgcagcgcgctcttttatccggtctgtgaccagtcacagaccggtcggatcaacggttaggtggcgactggtggtctgacgcacgcctcgccccgtcccgtcaagacgagagcctttaggcacacgtctccagccggagctagcgtgttacctcttagagatggcacgttagccctggttagatgaataccaggcttcatcccaaccattacaggcaagatgctacaaaaagaagggtgatcatgcagatcgctgaactgacgcatagaggacaagaatgaccgatctgtgaccggtctgacactggtcgcgtcagcaacagacagccacgatcccacgttgcgcctgtctccgccgggagtggaggtaggtgtgggttgtcccatcgaaatgtcattcggacggcaaccataccaatctccgtccataaagagaagaaaagtccagtttggaaaggaaagggtacatgtggtatccccttaagatataaaaggaggaccatgcccacaaagagagggggctggattttcccgagagaggagagggctggttgattttttgtaacttgctcttacacagatccaccaaaaacacaggagtagggtattacgcttcccagcggcccgaacctgtatacatcgtccgtgtctcgcgtttcttcctggcacgcgatctttccacacacagcgagagcttgagatctcaccctaagcccccggccgaactggcaaaggggggcctgcgcggtctcccggtgaggagccccgagctccgtcatctggcgcgccaggtagggggctcagcgtgtgttttctgagctctcatactcttccgtgtgggccaagtttcccttgttcagcctaatggccgagcaagcaaaggcgcatgacctctctccgagtgtgagcggcgacgacggggagccaaacccgcgccatcgagctcgtactcccccacctcctccgcgccaaagtcccaagcggggggaggcgctcgagagagtcgaaaaatccgcagcatcgccagtcgcgggtggtgcaggagaacggcgagatggggagcgtcgcctcctcgtctacggcgacggcagcacgccccagggagtgcttcaggctgctggcgcgctcctacgtcacccgcccgtcgtccctgacccggagtctccagcccagcgatggctggacgacgtggccaacttggtcatgacggcacagcagcgcctgggtgctggtggacggtccgccactaccaggacctccggcgccgccaccaccggctctgtgtcatcaaggcggagggcgcggcgagcggcggctgctgcacgccattcggctaccactccctcgtcggcgcctccgactcgggaggatcagcatgaagagccggatgcccgcctcgacatcgagcgccgatgtagtgatcggcgtgctccccgcgcaacggagggtgcctcttcgtccagggtgtcacctcgacatggacgtgagggccagccctccgtgcccccggttggtggtgttggctgtagagcctttgtggcgagtcttcggaatgtccgttggcccccaaggttccggcccaccatcaccgagaagtatgatgggagcgtcaaccccaccgagtttctccaggtctatacgaccgggatcgaggccgctgggggagacgacagggtcatggcgaatttctttcccatggccctgaagggacaggcgcggggttggctaatgaacctgccacccgcgtcggtccactcctgggaggatctgtgccagcagtttaccatgaattttcaaggcacctatccacgcccaggtgaagaagcggacttgcacgcagtacagcgaggggatgatgaatcccttcgctcgtacattcagcgtttctgccaagtccgcaatactataccttgcatccctgcacacgcggtgatctacgcgttcagggggggtgtgcggcacaaccgcatgctcgaaaagattgcctccaaagagccccagactaccgcagagctttttcagctcgcggaccgagtggctcgtaaggaggaggcctggacctggaacccctctggttccggtgtggcagcttcggccgcccccggatccgccgctcagacagggcggcgtgacaggaggaggaagaaaaggtcggtccattccggcgacgagggtcacgtcctcgccgtcgagggcgctccgcgggccacccgaaaggggaggcctgcgagcgacaaaaagaaagaggctggtactcccagcagggagcgcccagccagcaagtggtgctccgtccacaacacctccctccacgatctcgcggactgtcgcgcagtcaaaaacttggctgagcgaacgaggaagtgggaggaggacatgaggcaggaacgccgtgagggcaagtccgcggcagttccctccggtaaacggcgaagtgaggccagacagaaggcccccgccgttgacatcgatgacggtgatgatgacctaggtttccaagaacctggggccaccattgccactgtcgacgggggagcgtgtgctcacgtttctcgccggagtttcaaggccatgaggcgagagcttctcgccgcggcccctactcatgaggcgacgcgtcgggcgcggtggtcggaggtggccctcacctttgaccagaccgaccacccaccgtgcgttgcccggggagggcagattgcgatggtggtttcccccaccatctgcaatgtgaagttggggcgtgtcctcatagatggaggagcggctctcaacatcctttcccccgcggcctttgatgctatcaaggccccggggatggtgctccagccgtctcaaccgatcatcggtgtgacgccggggcacacatggccgttaggtcacatcgacctaccggtcacctttggtggatcagccaacttccgcacggagcgggtgaacttcgatgtggcggacctcagtctgccctacaacgcggtcctggggaggcccgcgttggtgaagtttatggcggcggtccactacgcctacctccagatgaagatgccgggccccggtggccccatctctgtccgtggcgaccttaaagtcgcgctcgcctgcatggagcagcgcgcggaccacctcgctgctgcgaccaagcccgagggtggtgacgagaggcttggcacctccgcccccaccgccccgaggcagcggattgccacatgcgacgaggtcccggtcaaggaggttgccttgggcgacggcccatccaagaccacacggatcggtggtcttctggatggcaaataggaagacgcgctcgtctccttcctgcgggcaaacgctgacgtcttcgcatggagaccagcggacatgcccggggtccccagggaggtgattgagcaccgtctcgctgtgcggccgggcgcaaggccggtccggcagaaagtgcggcggcaggccccggaacgtcaagccttcatccgcgaggaggtggcgagacttctggaggccggattcatccgtgaagtcatccatccggagtggctggcgaacccggtggtcgttcccaaggcgaacggcaagcttcggatgtgcatcgactacaccgaccttaacaaggcatgtcctaaggatccttaccccctgcctcgcatagatcagatcgtcgactccactgcggggtgcgaccttttgtgttttctagatgcatactctggttaccatcagattcgcatggctagggaggatgaggagaaaactgcgttcattacccccgtaggaacctattgttatacatcaatgcccttcgggttaaagaatgcaggtcctacttttcaacgaactactcgaatttctttgggtagccaaataggacgtaatgttgaggcttatgtcgatgacttggttgtaaaaacgcgcaaccaagaaactttactttcagatctagcggaaacttttgagaacctccgctccgcccgcataaagctgaaccccgataagtgtgtgtttggtgtacctgcgggcaagcttctcgggttcttggtctctgcccgaggcattgaggccaaccccgagaagattcgagctatcgagcggatgcgcccccccagcaaacttagggatgtgcaatgcgtcaccggttgcatggccgccctaagtcgtttcatatcaaggctgggagagaaggcgctacccttgtttaagctcctcaagcgctcggggccgtttacttggacggaggaggctgaacatgccctcactcagttaaaggcatatctcagctctcccccggttctagtcgccccggagccaaatgagcccctgctactttacttagcggcgaccccccaagtagttagtgcagcgttggttgtggagcgcgatgaaaacaatcctcatttcgtgcacccccatcctgtgctaacttggcccgggagcgagcggggaggagaagcccccgagtcggacggtggcctacggcccctgacgaccggagtcggccctctgcccgcttgtcagacggtgctaggtgcccccgaccctcaggagggccccaaggccactgcgggaaggccgcacttaacgccctctgaccccgaggctaaccctgtgctgactcgacccgagaaagagcagggagaagaggcccccgagtcgaacggaggccagaggcccctgacgaccggagttggccctttgcccgcttgtccgacgatgccaggagcccccgacccccaggacggccccgaggccactgagggaaggccgcccctttcatcctccgaccccgaggtcatcggcacagaagacaagtgcaccccgaaaggccacttgaacgaagaacgccccggggatacggcccctagcagagaggatcggccccaccgaaaggtgcagtggcctgtctactttgttagtgaggccctccgggacgctaagacccgataccctcaggcccagaagatgctttacgctattctgatggcctcgaggaaactgcgccattattttcaggcacatagggtcactgtggttacgtcttaccccctcggtcaaatcttgcataatcgagagggtacaggacgggtggtaaaatgggcaatcgagctttctgaattcgatctgcactttgaaccacgccacgctatcaagagccaggccctcgccgattttgtggcagagtggaccccggctccagagaccgtctcaatccccgaggccagcacgaacccctcgcagctgcctcacaccacctactgggtgatgcagttcgatggttctctgtccctccagggtgccggtgcgggggtcacgttgacctccccgacaggagacgtccttagatatctggtccgccttgactttcgagcgaccaataatatggcagagtatgagggactccttgccggactcagggtggcagccggactggggatccgccgtctcctggtgttaggcgattcccagctggtcgttaaccaggtctgtaaggagtaccggtgctccgacccgcaaatggacgcctatgtacgccaagtgcggcgtatggagcgccattttgacggaatagagcttcggcatgtgcccagacgggataacatgatagccgacgaactctcacggctcgcgtcctcgcgagcccagaccccaccgggcgcctttgaagaaaggcttacccagccgtcggcgcgacccgaccccttaggggagacggatgcgcctgaccgacccccgaggcccgtcggagtccaggcctcgggacccgaagggagcgctccaagctctcttagattgatcgcttggatctctgagatccaaacatacctcacagataagactctacctgaggaccgcgaagggagtgaacgcgtacaacgcatttccaaacgctatgtgctggtagaagggaccctctatcggcgcgcggctaacggaatcctcctgaagtgcattcctcaggaacaaggcgttgagcttcttgctgacatccatgagggcgagtgcggagcccattccgcctcgcgcaccctggttggcaaggcctttcgtcaaggattttattggccgacagctctcaatgatgcagtcgatctggtccggcgatgcagagcgtgtcagttccacgccaagcaaatccatcagccggcccaggccctgcagatcataccactgtcatggccatttgctgtctgggggcttgatatcctgggaccgttcaaacgggccccgggcgggtttgagtatctgtatgttgcgatcgacaagttcactaagtggcccgaggcttatccggttgtcaagatcgataagcactctgctcttaaattcattaagggcatcacggcccgttttggagtgcctaaccgtattattacggataatggcacccaattcactagtgaactcttcggcgactactgcgaagacatgggcatcaagctctgcttcgcctcacctgcccaccccagaagcaatggccaagtggagcgcgccaatgcagaaatcctcaaaggccttaaaaccaagaccttcaatattctcaagaagcacggcgattcatggatcgaggagttgccagcggtgctctgggcaaaccgaaccacaccaagccaagcgaccggggaaacgcctttcttcctcgtctacggcgcagaagcggttctcccatccgagctcaccctgaggtctcctcgggccaccatgtactgcgaggctgatcaagatcagcttcgtagagatgacctcgactacttggaagagcgaaggcggcgcgcggccctccgagccgcgcgctaccagcagagcctgcggcgctaccatcagcgccacgtccgggcccgatcactctgcgtcgacgacctcgtcctacgccgcgtccaaacgcgtgctggactgagcaagctctcaccaatgtgggagggtccgtatcgagtgatcggcgtcccccggccgggctccgtacggctggccacgggcgacggcactgagctgccgaacccgtggaacatcgaacaccttcgtcgcttctacccctgagggggggggtcgggtgtcaggtttcgggctcgggctaaccacgcacccccctcgggtgtgcagggttagccgggggctaccacacatgcacaaccttacttttcttatttcagcatttcaataaaagcagtttcaatttcctaaaggttgtgtctgtgccgtttttccttctaaagaatcttaacttgaaataaggtcactcgtgctcaaccttgccctcgggggctcggttcggtcagctaaaatcgccaagcggggcccagaaccgagccgtgccccggggcgtggtgaactccgggggggaatcggcaaaaacccacaatcgggtcacccataaccctcggtcaccatgttcccggcctggccagtctcgacatgtggatctccccaggcactagccccgacccgagccatttgaggatcgggacttgagcacgagcccttaaatcaagctaaaatgcaaaaggaccacggcacaaatcatcctcaactcatatgcataacaaaacaaagttaacatagaaatttttcatcatttttgattgcagattaagttgatctatacaaaaagaagaaagaaaaagaaaaaattggagattggcgggggcctgggggctcattccaatgcgcccgggtcgctggccccgtcgccaccgtcgtcctcgccgctggcgtcgccctcctcgtcggagctgggggcgaacgcgagccgaggggccgacccctcgaagctttggacgatgtggttggcggcatcccggacccgcgcgcgcgcatcgtcctcggtcccgggagggaactcctccagcgccatccatggggagaagccggggtccctggcctggtaactcgctaacacgagttccaccgctccttgggcgaggtccctcgaggatgacttgatggtcttctcgagctcctcggggagttgttggacagcccaggccatcctcctaaggtgcggggcgaggccttccagattggtggagcgcgaaattgtctggcctttccagaggcccgcttcccgaccggcgcgatccagccgggagactgcatcccaaagcatgccgggccctatctcacccgacaagcggagggcctcggcttccccggtggatgagtccagggcgcgctgcatgtccgcgacgttgagttcggcagctgcgaggcgggcgactaagtcgctttcgcccgtagccgccccgccgctgcgcttcctcgcatccagctccttttctcgcgtctcgaggttagcagcctgctgctccagcgcggctctctcggcgcggatgcattccagattgcggcgcgcctgctcctcctgcgctgcctcgcggagggacaggctgtccgccagccgttgtgtcgcggcctcggactcctcaagagctcgctcccgctcagcaagcgcgtcctcgcggagccggagcgcggactcctcttcggcgcaggcggcctcgtgcgccgccagcgtcgcctcccggatagcggcggcggcctcgcggtccgccaagctggtctccacggcgccggcatgatcctccagcgccatggcacgggcttcaagggcctcttcgcgccgccgggacgccgcttcagcctccgttgctcgctgctctcgggcagcggcggcgtcgaggaccccctgggcggcgtcgagctttttctttagctccgcctcccagctcccgtgttgaaggcggagggagtcctgcgcctcaatcatcgcggtggtggcgacgagggcggcctctcgctcctcctccacctctcgggcgatctccgccagcgccgccttgcgggcttcaagctccgagatgtggcggcggtgggccttacggcccacctccaccatggcgtccaccgagcgccgcccctcctcgacgcgcgcccatgcggcctcgagctccgctcgttccgctcgcaaggcctccacctgggcgctgaatccatctagcaccgcggtgtttgcggcggccaaggcttgcagaaggggctcggcactcagcggggtggcagaagacgaggagaagagccgccttggagaaaatgcgacgcggctcggcccgccagaagacgcactgagctcggggatgtcccccggacccgtttggtcctgggcgtcgcccgagggagcgggcccaggcgatgcgcccgcggccctgtcgcaagccgccccggaggttgtcgcctgagcgtcacccgagggagtgggcccgagcgacgcgccggcggtcttgtcgtaaaccgcctcggaagacgccatcgcctctgcctggcgagcccgggcggtttcctcccgggtggcttcttcagcctgacgagcccgggcggcctcctcccgagcggcttcttcagcttggcgagcccgggcggcctcctcccgagcggtatcctccgcctgccgaacccgagcggcctcccgggcggcctcttcagcttcccgaaggcgatctgcggcctctcgccggtcagattctcgcctccgttcctctgcggccgccggatcttcggcctcggattggccggacttgggatggcgggagggacgcgacgggacatcgctgaagcagaagaaaaaaccagaaggcaaacaagatgggtaaggtaaaacttgcttttgggatagaagaaaagacggtcgcaaagagagcgggacgaacctgcgagggggtcggttaaatgaccaccttggaggggaaattaggtttccctgggatggttctgtctcccccatcttgcgcagccgtttcttcttgcgctccccctcgggctgcgatgttggcgcggccccctccgggcgcctgctgctggcacgcgccgccccgccccctcggggaggagatgggggaggtgttcctcccagtttcctcttcccccgggcgtcggtagggcggttgctccccgagcccccgacgcggggcccagaagcacgaccccctccgggggtagattgatccccccggcggctcccacctgcgccgccatggcccttaggagcctgctcctctgaggccccgaccgccgtcataatggtcaagatggagacgcgatctgggtcgctgcagagggggaggataccgtgggggatgagggacgcctccacggagttgagatttagcacccgttggatcagtatcttgaagtcctcgggggcccaatcccatctgaccccctggtgggtccgcatatagtcttcgggcccgatgtactcccaggcggcccgagcgcgccgctggagcggcgcaatccgacgacggaggtagtcgccgtacaccatggccccggtgagcccctgggatcgcaggcccgcgaggcggtcgaggacggcgtcatagccatcccccagatctaccggcgcccgccagctggaggcctgcaccgggggctggctcggaagtcggagatgcgcttcgtcggcgaggggggtgtagaaccagtcgctcttccagtcatcccactttttgcggaggacgcaggggatgtagcggttcaacaccggcccccgcggcaggaaatagcagccgccgaccaccgacggcggcgacaccgactgcacggtgaagaaccaccggaacagccgaagagatgggcgcaccccaatgaacatctcgcacaggtgcgcgaagatggccaaagtcatcactgcgttgggggtgaggtgcgccatctggagatcgtagaactccagaacatccataaagaaagaagaaaaaggaggaaccaacccggccattgcgaaggggagaaagaagacggaccgccccgggtagtctggcgccgggcgtccctcacccagcattactatctcacggccggtggcggattccggcatgaagcggcgcggcagcccagcctgcctctcgctcacaatgcgggaaggcggtagtacgctaccgtcgagcagagcggagccccgtgccatgtcgtcggagaaagagagggttgagaacgagtgtgtgtggcgaaggtgaggcgcagcaaagagagagttaggggcgcaaacggcgaaggaaaggggaatagtggcgaaaaggaagggagcaagtcctttcctcgatagctttatacccttgccatcgctgagcccggctcctcgtttctcgtgcccactatctcgctccctcgttactcgctatctcgctccctcgtttctcgcgcccacgcttccactaaattccattcgcccgcttacggcgcataaggtagatatgcggttgtggcagtcgagatagatcgtatcgtgtgtgcgttaattacgctcgctgaccgaagcgacgttaccatatctccagacgaaacgaatctacacgcccagattcgagcgctgctcaagtgatgtggcagtcttgaagagaccgcccatgactgacggccaagacaccgttaccgatatgcgtggtttgagaccgttgggtttctgcccaatcacggagaccggtcccacctgtcaccaggctttatgagtggcgtcatgcccgaccgcttcccttgagaaggatgattgccctgacataacgccgggggctactgtcggtgatatgggaccgggagtattgcgcccggaggcttgaggcagatggaatcgcccacgtggcctggcaccttcggggacgtcgggcccgagggtgaggtgtccgtcctcctcctgatttccccgagggggggtcgggttgctcctgccccgaccccgagggccgaggtgccccgaccccctgtggggtttgcactatgtacataggttgggtgaacacggtagggctcacctaaccgcatttattgcggtctggtcaagcgtgtcacgttgcatgcagcgcaatgcagcgcgctcttttatccggtctgtgaccagtcacagaccggtcggatcaacggttaggtggcgactggtggtctgacgcacgcctcgccccgtcccgtcaagacgagagcc

SEQ ID NO: 4671 - DNA, 67165 bp, Oryza sativa
ggcggcgtacccgcgctggcgggcagccggtgaccgagtccgggcggcggcggcggctggcgcgtcgggccgcgcggagggaggacgggcggcggcgaatgggagggcggctggagccggcgggccgcgcggatgggagggcagcggcgtggcgcgcggcagccggccggcggcaactcaatttttttttcttaagaatttgtgatggatctgagaatttttagaagttgtgattcattggatatgtgatgtataatctgtgatgtatttcttgatgtattgtttcttgagaatttgtgatgtgaatctatgtttgtgatgatactttgattttgatttggggatacagggagcaacttgatttggttgatttggaagagatttgtgcagttccaactcgatttgggagaaaataataaaaaaaacagtggccggtactagcgctggcatcactatctttaatcccggttgttatcaccaaccgggagtaaagatagatttttagtcccggttatttcacccgggactaaagatgagtatctttagtcccagattgctactcccggttgcaaaaccgggagtataggggggttaccaaccgggaggaaaaacactttctccactagtgtgctgccgaacgccgtatgcgagatcacgtcggcggtcagctcctggaacttctgcccgacctccacctgcacccgccgctcgccggcggcggcacgcgcctcccacgcccgaatcacctcccgcgcgcactccgccatcgtcttggccatcatcttgagcttgtccatggcgaacgccgggtgcacgacgcggcggtgccgcacccagtcgtcgccgttgacgaaggcgaggccgttgccgatcagcgccagaaagctcggcccgggctccggtttgccgtacagccccgtccggtcggacaggatctgcttcaccatggcttagtcgccgacgcagagcgcgggcgtggcgccgctccacgagacgaacaccttgccgtagcgccacatccacgcgcggtagtgcggcagcacgcgcgggacgatgtcgtggcagcgcaggtcgagcacgtcgccgcgcgcatcgcgttcgcctcggcgtcgctgccgacgaagagccggtacgccggcccgcggatccccctgccggccgaacgccctcgccacggcgtacggcctccacaccagctgcaccagcgccgtccacagccacgtcaagaccaccagaagtccagaaccaccgcggcggcgacggcgacggccggccccgtcgatgactcaacgatcgccatgcttggagcgagctggcttgtgtggcgacgtggcgtgatgaccaaattatcggaagtttatacagggcctgttcactttgatgccatttccaaccttaccaaattttgataaaattgccaaaaaagtggctacatttagtttgctgccaaaatttgataactatataagaaatcttatcaaaattttggcataattgccaaaatttggcattaccaaaatttggtaaggttttttttgcaatggattctcatgtcctgaagtattactgtaaccttgttttgattcttgaacttgaccaagcaccagtcttcctctaaatcatttggctagtaaagtaatttgccttcttcacattcaatttacaaaaaagttaagggcctaaacagaaaatcacaaaggcacagagtgcagaacagatagaccgatctgaaataacatacaagtggaccaaaacaagaaatggcagcatgccacgcgccattcaacgcgccacccaaccggaaacaaccatcacagtgaccggcatccaaaccccaaatgcatgaactaattaccaatcaaccggcctaattaagcaggcaaccggcgcaccggcaacgcataaacatgcaagttaggccgaggagcagagaacagtaaacggagacgtgtaagacagtcagatagaaaaaaaaatcatgagaaaaatggtgagattaggggagttactgattgatgatatccatagtgtttttggtggtcatgtacaattttacttctgaattttattttgtggagcagtataaaattagcacaatagaatgaacaattatctgtattacattttttttaaaaaaaaatccatgctattaggcaattagagccgacgggaacccaaaattaaaccatgaaattggcttggagttgagccagaggatgagaggagtgctgctgctggactaaggtataagctttattcaagtttcaaagcacatgaattcatctctgtctcgggataggcgctacgactcgttcaagacgtggtccgggaagcttgagcggcaactcacccatctggctagcgccggggacggaggtccctgaggaggaggaggacggttgcgacggcgatgccatccgcagccaccacatcaagtccatgcctcaggttgatcgcttcttcgccgcactggagggccctaaactggacaaactccgggtaagtttcttgagctaattcttccggaactacacatcgatctatgtgctttgatttgctggaacactggagagagctcatggtgtgtgttgtgtcgcatcagtcatcggaggagctggtgcttctgtcggacaaaacgtggccattcctgctctgttcccggtgtcggcgttcggtatctgcctcggcatgagcagccaggagatcctgtggaagacagtggcgacgtcaacgccgatgagattccttcacatcactaccaaggtgaaccaggtgctctggtgcgctttctgtcgcgctcatgtgcgtcaccgcggccatctacgctagcaaggtggtcttcttcttcaaggccatccgccgatggcacggtcataccaatttcgaccgttaatattgtccatttaatgaagactagctatgcttgcaatgcataattttcaaataaaatatatacttccactatgtcctatgctactaacatatatgcaggagaagcacacataaatagaggagaattgatggaacataaatgaacaattaatcggaagccgtcgagaggtagacttatggatggttgggcctctaaacccagtaaaataatatcaattgggctcaaccattacaactactgggctgaggaatcaatgaggagtggaataagttcattcgaggtcccttaacttgtcaacgaatccgatatttgtccttcaaccagaaaaccagatacaacgcgtccctcaactgtcaaaaccaatgccgatgaggtccttcggaggttttgatggcagttttcgctgacgtggtgcctgggtggctattttgacttggtcttcacatgacgtggcgcttacgttgcaattcaaaataataaacttcatgggacacacatgtgacatcccggcccagagcttaataggattaatagaatactcatatcaacaagttgcaacttcttttccggaagccgatttccaaagaattccaggttaagcgtgcttggtctggaacaatttgggatgggtggcagaccgggaaattattcctgggtgcgcaagagtgacaaagtgtgcagaaaagacttgtgttggtctgtgagggcagtctatgacctgtgaaagctgccagatgtaagcgtgcccggcctgggagaggcgggacgttacaaagtggtatcagagccgactctcgcggtttcacaggcgcgtgtgtcgcagttgcgcaggcatggtgcacatgtctggtgtggacctggagtggtcacacagcatggcacatgcgctggcactggacacacggacgtgcgttcctggcctggggttgaccgacgtgcgcatggctggtgtggacccactcctgtcgcagttgcgcaggcatggtgcgcatggctggtgtggacccggagtggtcacaaagcatggcacatgcgctggcactggacacacggacgtggccaagaggggacgttcctggcctggggttgaccgacgtgcgcatggctggtgtggacccggagtggtcacacagcatggcacatgcactggcactgacacacggacgtggctaagaggggacgttcctggcctggggttgaccgacgaggacgtcggtgtcttaagggggtgagcattgtgacatcccggcccagggcttaataggattaatagaatactcatatcaacaagttgcaacttcttttccggaagccgatttctaaagaactccaggttaagcgtgcttggcctggagcaatttaggatgggtggccgaccgggaaattcttcctgggtgtgaaagctgccagatgtaagcgtgcccggcctgggagaagcgggacataaataaataaaaaatgatgggcccacatcttcctcctctctctccccaactcagtttcacataaataaataaaaaatgatgggcccacatgccagctcaataaaaaatgatgggcccacatgccagctcttcttcctcctctctccccaactctacaggtctatcgcagagaatacatcacgatccgcccttctcgccaccgcgagcttcttccgctgggggcactgcggcgcgaggagtcttgatacgggcacgaagtacggcatcaccgcaccgcgctcgccgtccccggccatagcacggatccgaaatttccgagaggaggaggcatggtgagtttgcaggcgacgcgtggtggccgggggcacgagctcccgttcatcgtcttcacgccgacggtcttgctcgccgagccccgacggcacctggagcaagccgctagccaacctccgccatcgtctcgtggttctgccgccggccatggcgccctcgactcctccgcaccctccaccggccgaccgtcgacctgcgctcgccgccgaccacctcctcgactccgccgcccgccacgacgcagccgaggggtaccgagctcgtctccacctccgctggcccggcgccctcaccgggatgcgagggacgagctccctacgccgcctctcgtcgtccgtcttgctgcgccggcgccgatgccctccatcggcatctcccgtcgacccgattccccaagtcccgctgttctctcattcactcctcattctgtgtctgctcacatgtggccggcgacctcctcctccggccacctccgccgcacgcggcctaccgccgccgctccactctgccccgcctcgcccggccgccgcgcgccgcctccctcctcgctcggtggagaggacagaggagaagggagaaaaatgaatacagggagttggggagagagaggaggaagaagaggaggatgagaatgacatgtggggtctacgtgggtcgtaccatctttatttttttagatgacatgtgggcccacgtgggccccaccatttttttattaatttatgtgtaaactaacatgtgggtcccatgaagtttattatttttctggatgaattgccacgtaagcgccacattaatggcacatgatgcgaagacgagtcaaaatagcgacatatgcgccacgtcagcgaaaaccgacgtcaaaactgccgagagacctcatctgcactggttttgacagttgaaggacccattgcatctagtttttcggttgaagggcgtagtccgacatcaagcaaacaaaagataaggattatactagttcaggccccttatcaggtaatagccctagtccaggttatatgggatttatgatgatgagaatagattacaaagagagtagtcgaatcagatgataccggtgagatcgtagtcgagggatttgacgagatctcccgacgagttggctccacgtactccggcttcgtaatatatggtgggtgtgttggcgattgaattggatgcctttcacccctccccaggggtcccttttataccgtggagggtgagcgagggcctaagcggcgatagaggatgtgcaggagatttcaagtagacgatacaacaggacctccgtccctcaccactggcaaccccactgacctccatccttcgctcgccaccgccgcaccgacactcccctccctccacgtctcctgcgggtccaactgcctctccctgccactttttcctcgccttcgtacttggctccggcctcaccgtttccttctctcttgtcctcaagctgtcgttgggtgactccgccaacagaggagacagctcggcgccgacgatgtcgaccccgtcgtggccattcgaaggtgacaatgaggagcgtcatcccggtgcggggtgacacgcgatggtaaggagagagaagggatgagaggaggaagatgaggacatgtatgacccacatgccaatgacccccacaatattttctgtgaatgacagatgggtcccacgtacttttttgccttttgttttattataatgccacaaaagcgccatgtcgatgtcacgtgggatagagaccaagtcaacaacgccacgtaggcgccacgtgagccaaaatcgcttcctaaaccacccagagacatagtttccatcggttttgatagttggaggggtcgatatacccggttttgtggttggaggacatgatattatactcaggcgatcgttgagggagtcaaaatgaactttttacgattgtttatacatatacagcccctttacagagacagcccaaatagcggcccattgtgaccctttttgtcaaggtttgtgaaaagcggcccattgatcctcagtaaacagagcccctttcgcgagagctcctctgaaatatcggctgtgttcggcacagcactttcccagcgcgctacagtgttttgccccgagcacgctttttaaactactacacggtgtacttttttacaaaaagtttctatacaaaagttgcttaaaaaaattaaattaatccatttttttaaaaaaattagctaatatttaattaatcacgtgttaattaactattccgttttccgtgttactgtagcgcgctgggaaaacgtcgaaacgaacacagccggtccgtccagacctagaaaccatctgtccctcaatcccgcgacgccgccgccgttctgctccggtgctagggcttgggagctgagctccaccctgccccctccattctccagctcgcctcaggtcagtaccctgcagatccgcttgatcttaaccctcttttcattgatcaaaagctaatttattatcctatttctcatcgcctttgtttgttattcttctcttgtttgtttggcttttgtgaagccatcccttccttccgtctttaaaggcatcgctgccgggcggctgttagctgaatcgatcgcaaggaaagacaaaggaggagagttcagtcgacttgggatcgagtagaatcgccggcttctgctgctattgcggtactcttccttccttgaatgtcgtttacttctccaggtgcatagcatagcttttttttttttttttggggggggacggagaccgacgagattaattgttgtttctgttttgaagctgaccattatatccaatcccaatccaatcgacgatgggcctctctcgtcggtttctgaacctgatcgtggacaaccgcatccctggagccaaatcgctgcgctgcatcgacctcaccctcgcgcgctacaagttgttcaacactacaacacctgctgcactgacactgaatgggaaaataaacggattgaagaaaaggatggagaagatttgtcttcccagcccaatcttcaacttgggagcaccaggcgaacggatacacatgttccctgctttggagcgcagggctttctctttggaccagtcggggcgtggcctccttctggaggcagacacatcccgtctggtggtgatgccaaatctccacaagcccaagttggaacccattgccctctacatccccggcgctgagatagatctggatgaccttgatggcggcggtggcggtactctttttatcatggatagaattgcgaaaccacaggaggctgactatttgttcgaggctttggtgtaccgcatgttctgttccagctacttatcaaagtcctgggactgccaactcctcccaccaccgccgccatacgtcgtcaaatgtggcgttgactttctaaagatcatctcatatggtttggttaaaggtggctctgagatctgcatatccatcgacggggttggtacttattgctttgacactgtgaaacacacttggattgaagtgggcaagtggatgctacccttccaaggcaagtttgagtatgtccacgagctcaagctctggtttggcttcactcccaacgatggccactttgctgttgctgacctctctgccatggacgagtacctgcaaccacagatacgccactgctggaacgaacttgatgagtcactcatccaaggatggaagcagatacgggaccctcagcttgtcaacctggggtctgccaagttctgcattgcaaggttctttcacactggtgactttggcgatggattgagtggccagaatgtttctgtcctgactggtgtagagtttacccatgccaatgttgaccatgagaatattggattgatcaagcacaaatcgagatgtcacaagtctagctgcggtgaggagaccatcacggcagttttctgattaatttaagggctgactccccatcctttgaataattttctgtctctctctttaagagaacttgtgtctcgtcctaattttactttagcataataaaaatgatacttcctccgtttcataatgtaagactttctagcattgtccacatttatatatatgctaatgaatctaagcacacatatatgtttagatttattgacatctatatgaatacaggtaatgctagaaagtcttacattatgaaacagaggttatgaaacagaggtagtaccttcgttgtccgcatgttgtaattgtctcctgcacttaagtaactgtaccatttactactactagtaactactataaacttactcttaatttatgtgttgtctactgcaatggtaaaattcgtttcaaatgctttcttggttttggttggagcggaaaccaagaaggaatggtaatcttgtgtgcttcctctgtcccaaaataagttaaccgtgcgggacttttccagaggaagagaggatgatacgtgatgcggtgtatattccttttctgaaaaaagtctaagttatactacggttaatttcaactttttcatattctatcttgatcttaaaaaatatatttggaaattatcgtgacctcagttttcatcttctttcatagactttgattttctaaagaaaattggtttcttaattctaaagatgccagtacgtcactgttcattttgtagttaactctggtacatgtttatgtgaaattttgattattcagcagttgaaaggaatggaggattgctttgtgatttataatcacctgtgctgctacttgtgctgcagtcaatagtctgatgggaaaaatggaattgaaccactgcaagtgcaagatatactgaaatcaaatcagtgggtaaagtctgacaagttatctgctgcactgaaatctcctcatgcgtttgtgagcaaggtatccagtagcattattatctctgtatattttcagagtatatattagttgcaacagatagtcgtcacatatataatctatagatggccataaggctcgcccggcacggcccggcctaggatcgggctaggcacggcccaccagcgatcgggctggaacggctcagtcggcacttcgtgttgggccgtgctggcccatgggctgcacctccggcctaggcatggcctactagcaatcgggccatgcagtgctagcctgaaggcacgggtggtccatcgtgccttctttgaaataagtctatttctcctctctcctctttgggctgtgacatatatgtagctaaaataagtctattttatgtccctattctttgggccttgttatataatacgtctatttttgctccctcgtgccctacatatggttgaaattaagtctgttatgcatccccacactctcgtacagggcctagtcgtgctgggccggcccagtgtgtcggtggggaagcccaggcacggctcggcggtaaggccgtgccgtgcttgggctaggccaaaatgccgtgccttgggccgggccatcgagcctcgggtctatggctatctataataggaaaaagtacaccgaaggtccctcaacttgtcatcgacttacaaaatcgtcctccaattgcaaaaccagatatatgacatccctcaacttacaaaactgttcactttaggtccttccgtggttttaaccccggttttgtccgatgggacagctgagtcagcgtgggacctatgtgggctccacatgtcagggtgtccaactcagcaccttctctctttcccctcttctctacctttctccttcactttcctttcctctctcgtgtctccgacgagcaatccggcgaggtgtgccatgaactcggtgttggtaacgcacgcagcgaggtgcggcggtgtccgccgggagaatgccgggattgtgccgacaagggtcgggttcaggcagacgcatcgcggcggctgcaacggcggcggcaggagggacgacttgagcgcagctggagtcgctggataggttcaattgggcggggtatagagccgtcgtcgacatggcccgcgacgaggggctcagcctccgcgtcacgctccactctggcgaccccgacatcctcttcaccgactgctccagcggccgtgactgccacttcttcgccgtcgacgagctccccgttatccacggcaaggcgccgctcgactgctacgacgccttcttcctgttaacgatgaaatttggtaagtccaaagtcatcatcagctgaaagtcactatcggcttccgagttctagaagcagccgatgggagttgtcaagtcgccatgctatcatgttcttagtggagtcgaatcaattgaaggaagcttatctagaagagtccgatttcaagaaggatgcggcgtggcagtttatctattaattaggaatagtttgttagtttccttttatctttaggaaagtgtgtttagtgtccgataagtactttatgttttccttttatctttaggaaagtttctttcttgtccgacaaggacttgtatcaacccatgggtataaatatgtacacccagggtctatgcaatcaatctctcgatcaatacaactactctcggcgcatcgctaccctatttaccgaggttttacttatcttccggcggaatttgggcacctgacgcggggctgcatcggctttcgatctccggcgaaggggtaagtcctacgttccgtcggaccctggtgaatctgtcatctacgtcggcgtcgctcaaggctacatcgcttcgatctcttggatcactctggtttggttgattgatttgcctacctgatatctcaattctatctctaattgcattgtgtttagagacgcatcggtttagttggaactgtctcggttaggtctgatcttctatcttagccgatatatctctacaatcgcaatgctgttctaaatagatttgttatatccatcacattagacagatctatcggcttatcgagtattagattatcatatacaatctcgtgctgcatcggttaggttcgacctactagattgttgttgataatataagtcttgctaagctgataggttcatgctaatgttttatcggagtgttagccgataagttatctgcacgttgcatcggcttagaaggattacatatacatattagttggatttagccgatgacaacaaaggtttcactgtttaatctaatctgtggattttatggcatcggacctccagccgatgtatattttaaacttctgatcagtgcttattctatcatatcattgctagccgattgttttctattggattacgttattgtatattatattattgacagccgattgcctttatatcattatctacattagacatatagccgattgcttaaaccctatcgctatcggttggtacatcggctattatcggctatcggctgggattgctccatcggctgtttagccgatcagttgtttgatctactgtttacatatcttgtcagttgcaaggtcaaactgactggcacacccgcatctcattaagttttggacctgcacaggagctaagcagatctcctagaccggtgtgttcgattttttcgtcaacacttccgtagcttcgccgacgcgttccaggacctctccgactccaccatccgtacgtcgttgattgtgaacaccttcacgccatggatgcgcgtgtgcatgctcggtgacgacaagaagcattacaacatcgacgccggcgccatcaacaagtttgtctttcattttgtcctccacccactctgattcaggacaaaatgttgtaactgaagtgtgctagaactaaaacaaaagggacaaaagggattgttgacgagcaagcacacgaacaaacgctcagcatctcactctgcatcaaattatgagcataaaatcctgcagcttgtgagatcgtgagatctagatttttgaattggacagtaggtggctcttgtcggtgaagcacgctgaatcccacattcccagcaggcatagagttcagctttcacgtggagtatcaccgggcagtcctcgagagtgtgcttggatgtcctatgcacaggacaccaagatctcggttttagggtggtcgttcttgtcggctctgattttttgtttagaggacaaaattcggccgcttgaggattcctcctgggtattggggccgtcgatgttccattctccacttgagtgggaggaattatcggcggtgcgtcgtttctcggagtcgtaaccgtgcctttctcgttcccgataattattgggccagtcgagatcggcgtgatggtgtagaccggaaagaaaatggatctgacttgagtccacaccagcgatgtcgaggtagaggctccttgatcgacgccggtgttgatactgctgtcaggaagtcttgaagtcatactggtagatccttgagcaccaagtcctcctacctggcgtgccactgtcgacaagcgatacttgtggaccggatgagttgagtattggggtatgttggaacgagggtctacgtagtacgacatcaagcaaacaaaagataaggattatactagttcaggcccccttatcaggtaatagccctagtccaggttatatgggatttatgatgatgagaataggttacaaagagagtagtcgaatcagatgataccggtgagatcgtagtcgagggatttgacgagatctcccgacgagttggctccacgtacttcggcttcgtaatatatggtgggtgtgttggcgattgaattggatgcctttcacccctccccaggggtcccttttataccgtggagggtgagcgagggcctgagcggcgatagaggatgtgcaggagatttcaagtagacgatacaacaggacctccgtccctcaccattggcaaccccactgacctccatccttcgctcgccaccgccgcaccgacactcccctccctccatgtttcctgcgggcccaactgcctctccctgccactttttcctcgccttcgtacttggctccggcctcaccgtttccttctctcttgtcctcaagctgtcgttgggtgactccgccaacagaggagacagctcggcgccgacgatgtcgaccccgtcgtggccattcgaaggtgacaatgaggagcgtcatcccggtgcggggtgacacgcgatggtaaggagagagaagggatgagaggaggaagatgaggacatgtatgacccacatgccaatgacccccacaatattttctgtgaatgacagatgggtcccacgtacttttttgccttttgttttattataatgccacaaaagcgccatgtcgatgtcacgtgggatagagaccaagtcaacaacgccacgtaggcgccacgtgagccaaaatcgcttcctaaaccacccagagacatagtttccatcggttttgatagttggaggggtcgatatacccggttttgtggttggaggacatgatattatactcaggcgatcgttgagggagtcaaaatgaactttttacgattgtttatacatatacagcccctttacagagacagcccaaatagcggcccattgtgaccctttttgtcaaggtttgtgaaaagcggcccattgatcctcagtaaacagagcccctttcgcgagagctcctctgaaatatcggctgtgttcggcacagcactttcccagcgcgctacagtgttttgccccgagcacgctttttaaactactacacggtgtacttttttacaaaaagtttctatacaaaagttgcttaaaaaaattaaattaatccatttttttaaaaaaattagctaatatttaattaatcacgtgttaattaactattccgttttccgtgttactgtagcgcgctgggaaaacgtcgaaacgaacacagccggtccgtccagacctagaaaccatctgtccctcaatcccgcgacgccgccgccgttctgctccggtgctagggcttgggagctgagctccaccctgccccctccattctccagctcgcctcaggtcagtaccctgcagatccgcttgatcttaaccctcttttcattgatcaaaagctaatttattatcctatttctcatcgcctttgtttgttattcttctcttgtttgtttggcttttgtgaagccatcccttccttccgtctttaaaggcatcgctgccgggcggctgttagctgaatcgatcgcaaggaaagacaaaggaggagagttcagtcgacttgggatcgagtagaatcgccggcttctgctgctattgcggtactcttccttccttgaatgtcgtttacttctccaggtgcatagcatagcttttttttttttttttggggggggacggagaccgacgagattaattgttgtttctgttttgaagctgaccattatatccaatcccaatccaatcgacgatgggcctctctcgtcggtttctgaacctgatcgtggacaaccgcatccctggagccaaatcgctgcgctgcatcgacctcaccctcgcgcgctacaagttgttcaacactacaacacctgctgcactgatactgaatgggaaaatatctgaatcagaacgcccacaagactccaccccatgggcgggtgccgacaataacgagaaggaagcggcagcaacgttaaagataggaacgattcagcttcctacaccaatcatgaactttcgatcttcagctgagtacttgagttggtatatcaactgtattccgcttgcaggtcgcaaggtgctctgcacagaccaatctggccgcgcctgcctcttcgatgccgatacgtgcaaagtggataccttgccctctctccacaagcccaagtgtttgccctactccatcttcatccccagtgccgatgacaaggacgaccacgacgacaatagtaatggaggtggcagcgtctacatcatggatacttgtcttaatcacataccaagagacaacatacagctgagcagtcagtttgaggcttttgtctaccgtaggtccaccttgacctccttcaccaagtcctggcagtgccagcgcctcccgccaccgccattcgtctgtgaccccaagtacaagcatgccagcccccacaagatcacttcatacgcagtggtcgacggcggctcccacatctgcatatcggtggatggtgctggcacctactgcttggacacggtgaaacacacttggatccaaattggggagtggacactacccttcatcggcaaggttgagtatgtaccggagctgaagctgtggtttggcatttgtgccaatgactggaagcaatttggtgccgctgacctctccaccattctctccaccatggactctcagccacagctagtaggatcttggaaggagctggaggcaccccaagagtggacagagatgcagcatcctcatcttgtcaacctggggtctggcagattctgtgtcgcaaggttctaccacagttggacacccacggcgggcttatttggttctgatttaggtgagcttttttttactgtgttgaccggtacagatgtggtgcaatgtgttgtccatgacggcaatgggactggcaatgcctcttgcaatgacagttgcaataacccttatggcagcaacgggaaagtggaactccgaatgatcaagcacaactcaaaatgccacatgtcttatggcaccgatggtaacattaaggtattgttctgaataataacttactttggtgtattatcttacccatcattatcgtctgaataattttggcactttggtatgtaagagacaaattgttctttgagtactgtcatgaaatttaactctccctgtgttatttgcttcgcttagtatgatgatataaatttaactccctgtgttatgcgctttgcatagcatggtgatactgtttcccgcaatgtcacattctgagttatcttaatttaggtcattctgagttatcttaggtcatcatttatgtggtgactcatgtatgttctcatagttttgagggctttgtcatgaacgtagatctccccctgtaatcctttttgtactatgtatgtatggtatcaatctattgcaatggtacacttgttatcttcaatagtcctaccatttgtggtcatcttattattactccctttgtcccaaaatataatataagagatccattactaggatatgtctcatccggtcaaaatctcttatattttaagccggagggagtattgttttttgcctccatctgggttgctaaaatcccttaaatatttaatatttttttggacggaggtggtaatgttgtgtctgctgcatgctctatgtttgactcccatgttcaaccagaaagcattctttatcatcctggtgccatctgcgagatattttttttttggtttccattagcacgctttttaaacgtctaaaaaagacgcgaatattagggaaggacctaatatcaaataattagaaggggtgaggtttcgaatccaggtcgtctagtctatcaccttgtggagctagccggaaaacctccaagcgtttctcgctttttaaactgctaaacggtttgttccatacgaaaactttctacatagaagttgctataaaaatcaaataagttaattttacaagtttttaataattaaaactcaactaatcatgttaaggacttgtcttttgcgtgtgcaattaatcttcatctttcattagattcgaacggggcacttaaaagcaagccgtgcccatcgtcctggattcttctgctcatgcgactactcgtaagctattacaatatgtgctgtgcacttgtgtattcatctcactattacaatattgtgttgtgcatttgtgtattcatctcacttgggttctaggactttggcctctcttcttggatacatgggacgcaatagcacaggcccctcagtctatcagagagtttatggctcttctgacttttccttcttcacgatctgatttttccttcttagcgtcaactgcaggaaacagatcaagcaatcagggtcaggcagagcaaaaccacaggggaaaaaaagggagaatcagagtgggatgcttaatttcttaacctttacggctctctatgaattgagcagggattgggtactcagtctgatatagggggcattcgtggcggaaggacttcatggtacagaaagaaaaataacactacgaaatatataacaaaggctaacaaatttatgacacattggttgttagctcacctcttatttgtttgtctaatatagcggcctttccctcacgttttgactcacaaaaaatatattcgacaggacatggacatgatgttaaggctatgcactcacccaaatcgaactggttcttaacacttattctcatgcactgatgtctggtctaacctagatggatttaaggaaacaataattcaagagatagaagtaaatacatggatagtagcagcacacacagctagagtcaatgtgcagatagaagtaaatacatggaaatggtcctcctaacacaccattggatgttctatattttgcatcttgcatttgcagaactttcattggtagtccaatttaaattgggcaacaaaataatctgtcacagaattgattgttcattccaatttgagctaaattttatatgtaataatgaaaaacaacagatacaactattttgcatcataactcataaatttaggtgcagtccatacatgaatttcttgatctttagagttcagtcctcttggaaaccagcacaatgtagccctcgagcttcggatgcctgaatctcaaccaggtgtcctctaaaaaatgtaactactacataacatttggtttaactaaacggaaggtcagcagcaggctgagcggaggagacgtagggaatctggtgtgtcggcaacactacatgactgaaaacaacaatgaccggaagaaataggtcaggcgcagaaggagaggattaaaggaggattaccacggattggactttcctggaggagcctgagatagttgagaagcagcaatggctacgacgacccgatctttagatcgattgtgggggaatcgaacttgaagggacaacagaaatagcttggagggactacgaaggatcttctagaagttttgaggagcttcgagggtggcgaggagttgagctcagatcggcagcggcggtggtggcgatttccccagtaagatcaaagtgtgttttgattcctatttttgtgatgaacaattgacatcagtgattattggttttgatatttggagttaatctacgaagtggattttgagatgattggattttacggggtccggtcagaccgggctagtgtggctgatcagaccggtgctatgcgacggccaacgttgtgtcggtttcggtttcgggttgtttctttggatatctgagtttgtttcatgtttatgacttctagatggatactatacatatgtattactattgtttgctaacaatgagtcaagttggtgatagcttggtctcggaatatggtttctttgtttgattcatgtgtaggtgactcgatgcctcgggatagtatttgcggtgatggatcgggagtcggcttggtggtaagacgatgtccgtggtggtcagatatcatacgggatacttaggctagagttgatgcacatggttggtgaagattccatatggcatacgatggaggtattgtgtgcgtatgggatgcggagtcgaatttggtatgattggttatgtagagtttgtttcttgtactaggaggtttcctattgggattaggatttctagtatgagtttggttcgtggctttaggctgcctacctcatgtataaatagagggggagcgtgaggcttcctggtatctctttgtgtatcgcttgagagagcaattgagttgctagtttagttagggtttcgagtttagtcgagatttttgtaaagattgctgttgttgcactttgtaaacacagagagaagcaataaagttgtcatttacttcgagagttcttcgatttgtgttttatcgggttcggcggtccgaccggcaggataccggcggtcagaccggcggcaagcgacgatcagaccggcgggtacacggcagtcagaccggcggcagcaggcaagcgacagcaggcatctcaacggttcgaccgatcgatctacatcggtcagaccgacgttcatcaggcggtcagaccggctcttacacttcggtcagaccgcgatccgtcgaatttgagggtaacttttatttccgctaaaagttttggtttttgggcataccaaccattcaccccccctctggttggcttagttcttgtgtttcgatcctacaagtggtatcagagccatgttttcttctttggattttaaccgatctaaagtttttgccatggctgctaataggttttcaactaagcctcatgtttttgatggaacggaattttctcattggtgcagtaggatgcagtcttacattatggctgaggattgtgatatttggagaaaagtttctcatccttatgtgatccccgaagaaattaatactgctgctttaaaatatgagtttgaagaaaattgcaaagctcgcaatattcttttgagtgggatttctcgttcggattatgatcgtgtttcttatcttcaaactgccaatgagatttgggttgctttgaataattttcatcaaggaacaaataatattaaagaacttcgtcgagatcttttcaaaaaaggagtacataaaatttgagatgaaacctagagaagctttggatgactatctttctaggtttaacaaaattttgagtgatcttagatctgttgattcttcttatgatgttaattatacacaatttgagatttctcgtcactttttgaatagtcttgacatgtctatttgggagatgaaagttacatctattcaggagtctgttgacatgtctactttgactttggattcgctttacacaaaactaaaaacacataagatgaatattctttctcgtaaagttgatcttaagtctagtgctttggtttcttcctcgacttctttggatgttcttcatcatcgaattctactgcttttgctttgattaatgccatgtccgatgagcaactcgaacagttcgaggaggatgacttggttttggctgctaacaggttttctcgagctttgaataatgtcaggaataggaaaagaggaggtcataatcgttgctttgagtgtggtgcacttgatcatcttcgttcagattgtcctaagcttgggagaggcaagaaggaagaaaataatagagtcaaagaggttgaagtgtgaacatgctgatgaagcccaaaaggggggggtgaataggctgtccctgaaaacttaaaaacaaatcgcagcggtaaaattcaaacagacccggaacttcctggtatggaacaccggaacttccagtctgccaggcccgggacttccggtgttctagtgtaggaacttccgggtaacagaacaagaataaaattcagatttcgaaacaggagactaagccaatcttcacaagatgatgcacaggtattctaagcagaggacagatcacagaaacatcacataaagagacaagagcgattttttcctgaagttcggatcttgtgatcctactctccgttgaggagctccaaagagctgggtctcgattaaccccttgcctcacttgtgcaaaaaccccagaggaaatccacagcctttaaccccaaacactcctaagcaaatttctagaattaagtgaccaccaagatccaattcaacctacttctagaaatccgccacaagtgtaggttgctctacttggaaagcctctaaaatctcagcacaagaacttcattaatttacctcgttcccttttgaaggagaggagatccttcacaaacttacccgggacatccacaatatgcaacggattctcgtggatgacacctaaccgtctaggagatcatctccaagagtaataagcaccgagatgacagcccacgagatattccaagtgctcacccaagatcctagtctttacacatctccaaatcttcctctctccctctcaatctctctttctcacaagaattaggctctagattgagtggagaaggcaagaaacacttgggagaggctagcaacagctctaggttcgaaaagtaaaagtggaatagccaaagaacgagctggaaacgagctggttatgtataacggctaggtgacgtcatctagccgttactgacaattttgaactggaaactagacaggaagttccagacctggaagataggaacttccggactacacttaggaaaatctttttcacaagaccggaactttcggacctgaaagacaggaagttccggacttgcatttttggacagatggagtatttgcaaaaataactcctagggaaacttgacacttgggtcacactaagagcacttaacatatctcagagcatcacctggaacccctcttaatagtacggtttttcctaaaaaactcgattgcaataaataaactatcctatgcacttctcgagtttcggtccgctttgattctatacttttgggggggtctccaagcatgtgtaacgctccgcttctcgtgggacgttaaaaactaatttggcaaaatcctatatgcgaaaatttcattttttgtgtgcgagtctaagtcatgctgtagatctcaatttaaatctccttgatcctcctcctcaaaatccctattccaaatcaagtctccgaaatcgaacttcgaagttcaatcgcatcctttgaatcctcgccaaacactcactcccaatccccaaaaatatcaaacactaccttgagtcttccttgattcctccctgaaccctcgagttcgaatatcgaatttaaatccaaatccaaacttcaattctctccaaatcagccctctctatgaaagtctaaatcgcctccctcaagttttgtgggtcgattttgtccccctcggcccatctcccctctgcctatctcctccctcctcctcacacgtgctatgcatgtgcgccgcccgagagagtgtcgtcgctcttcctctctctctctctctcgccggtcgaccaccgccgctttgccgattcccgccgccgcggtttgaaccctcccgccgccgccattcgattttcgccgccgcccgtcggtttcccccgcgcgcgcgctcgcgcgtggccagtcgcctggtcgccgcctgtgcccgctctgccgcctggtcccgctactccacgccgcgtgcttccaaaaccgtgagacagagcgcctctctcacgcgctctcccccctccctctgctcgcccaaattggcaaggcgcagagctccctttttccctcccttttctgctttttcccctgaccaccaccgccatgccctatcgccgcctggtcacttgcgcctgtgaccgccagctcacggtccttgcacccttgaccgccctatgtcggttccccctcccaaaccgcctcttctccatctataaagcccaagccgagcctccccatctcattctctctcggcatctctcttacaccgccgctgcgccattgttgccgcctcgcagctgccgacctcacatccttcgccgtcgcgcgtgctggtgaagcctgcgtgcgcgcgaggagccgaagaggactccgggcaccctccttcttccccttccccggtccgaggccggagagcccgcccgcgccgtcggccatctcccaacgcccgtcctgatgcggtagccttccgttccacttcctcgctctctctcgccacctccagctcgcgtggtaggtcagctagactctcgaacacgcgtagacgaagccccaagccccgccgccgccacccggcatggcctcgccgccattgccacccgctcccggaggccgccgccgtcgctagccctcctcggtgctccttcgccccacccggcgccggaaacggattccccgacccccatagatactcccaccgctttgaatcgagctctcgttgccccgtcgcatttcccctcttatcttgccgccggccgccgctgccgcaatccgccgattccggccatcccccggcgaatcagagcctatggctcgctttctcttgtccctcccgccactctggtgtactccccctcccttgaacccccgcgaatcgctccggcgaacgccgttgccgtccgccgtcggatgccggcgccccctttttcctcctcctgccggcccgcgtggctgccacgtaggcgccacatcggagccacatcggccgcgaccgggtcagcacgaccagcctgccgcctccccctccctcgaccggtgcgcgcggtccacggagagccctatggctgcgcgtgggcccgccgcctctcggtccatccgacacactacccgtgcgccatcttcaccaaaccctagtgccgcccccgcgtgaacccattcctccgtggacccagccgccgataggtgggcccgtcccgggaccccgcatggtggaccgcggtccacccggtcggtctcctccccctcctgcgccccattaggccgccctcctcgcggccgtgccggcccattaggctcgcccgagctgcgcaagtccctcgagccgcgccaatgccacccgagacaagtctgattcacatctctcgtccatttccttttccaaaggatttaataaatccttttcctttagacagaaaatacaaataatcttaggaaatccatatctcctcaaccgctcgcccgattgaccccgttccacttccagtaattccataaaattgagatctgtctaatggcactataatttagtctaaataggatcttttattggtcttttgtttaggttctgattgtttacgtatagttgcggttaccggattttcgtcaatcgtggttttctcgaagattcgtgaagcttcgtgaagaccttgagcaaggcaagtcaccctttgatcaattgctcctataattggaaaatcattattattttgtttgcaacttgcattattagaatcacacacttaacttgcttggcctcggtttgcgtgccaaaccgacggacctacccagtagtcgcactaattcctgtaggctgtactaccctgattccttgtcgctccacccttgtggtacctcggtatccgtgctctctaagcgcgtataccaaatatcccacatacaccgttgattgtcgaaaacttggaaaatgggtttgagaagccttgaaaacccgacatgtggtgtcggtgtgtttgaaaataaaatgaattgtgaaaactcgcgatgcgggtgttgtgcctatgtggcgtcatcccgtattcgcatataaggaccgattcctgtgggaaattcatcaagcataacaagtgcaaccacatggtggtatgggacaccctggctaagtaattagttgcttttgggaaatcttgtatgccaatagaggtggaaagccgggatgtgggggtagaggcatcctgggagtccgaaacagaggaaggcacccgggagtcctaagggaaagccggagttggcccgatcttggtcagggagaccctctatgtggcatgaggtgacccaggattggctttggaaaggccttgtcacgaacctccgacaccagccagtgtctggagtaagttcgtgtcttgtgggtaaagtgtacccctctgcagaggttaactaactgttcgaacagccgtgcccacagtcaagggcggatgtgaggtgtttcccgttgcgtagatttgtttgccagtgctttgtgaaaagttgttgtggtgtgggaatcgtaaccagaatcagcctatgtggcagatggatgacctgagtggtcagaaacgaatttgtgtgattcggaatgtctacgagcatcatagactaggcttcccgagtggaagcggattgctttgctgctgggcagctggactctgggagtccgcaaaaatgaaaaaggctctgggagccgcctaatcaagtgaaatggctctgggagccgaaaagtaatgatctgacccgggaggttggtacattaccatttgagttgttgaaaatcatctcttaagtcgaatcgagacgcaagtctcctttcgacccaaacttaaaaagaaataaatcacgtagtgatttcaaaaatgatttcaaacaaaggatttgcaaaacaaccttgcctctcttccaagcttgcattaaacacctaagttcccgtgacttgctgagtacgaaagtactcacccttgctctatataaatatatatagttcctccgtcgtgaagtgaagatgaagtgaagtgaagattagggttttgtcctagttcccagccgtcgcctgtggtgttgggtgttagaccgttggttccgctgctgctgttgttgctggtgtttcctcgtctgtgtcttcggttgtattctcaggctgtcctgagctgcaacctaagttaaggtaaataagtcatctatttgttttaaggatttgcaatgatccatatttgtcaccgtgggtaccagcactatgtcctgggactggtactgagatcgcggtttcgtaggaagctgtcggtgacatggggctgggggtatcgtgactagaggccggggtagccgcgatcacccacgtggcctgaccccctcgagggggtcgggcccgagggtgacgtggccacccctccctctgtctccccgaggggtcgggccgctcccgtttcggccccgaggcctggaacgccccgaccccctatggttttggcgccacgtgtgtgggataggtgagcccagcggggctcacctaaccgcatttatagcggattggacgagcgcgccacgccgcatttaatgcggcgcagcgcacgcttatccggtccgtgaccagtcgcggtatgtgaccggtcacagaccggtcagatcgcgggttaggtggcaacaggcggcctgtcgcacgcctcgccccgtcccgtcggaatgatgagagcttcctggctctcgtctctagccggagctggcgtgctgactcctggagttggtatgtcagtcccggtcagatccattctaggcttcagcgcaagcatgggaagaaagtcgctggccattgaatgaaggttgaaatgggcgtccaccgggagagctgacgagcggagcagaaggcgtgtgctgtgcttgtcagaggtcacttccggctatagactagccctcattgtaaaaagcatgtttcctttcttaggcagctagaggcccatgtggtgacccctgaccacataaaaaggaggcccaggcctaggagaggggggtcgaactctggccacttggttctagagcctgagctctctctggttctctcgagctgtattccttcacacacagatccaccagaacacaggagtagggtattacgcttctcagcggctcgaacctgtctacatcgcccgtgtcttatgcgattcttctcgctgacattcctcagatcgagggcgaagaacctcacttagcgcccccggccgaaccggcaaaggggggcctgcgcggtctcccggtgaggagccccaagctccgtcagaagcggtttgcgccgttattcctacgacacgctcctgtcaagtgccgttgtacggcgatgccggattggggtgtgacagcatgcatcttccacaccttggactaatgcacctgaaaattagctcaataaactcattagtcccttaaccacatttgtcattaatcaccaaaacccactagggggattaatgcactttcaatctccccctttttggtgattgatgacaacatggttaaagcttacaaaagattgatataaattttgttttgaatggttagaggtgaatgaaactcccccttagtgtatgcatatggaagatatgagagaaactcatatgcatatgaataagggaacaactgtggagagtttccttcatcactactcattcgtgggatgcaaataagcagtaagaatagatatgatatgcaaatgatatgacatggtgagcactcaaaaagaataaaatcaacatcacatcacaaacaagaaataagacactcatagcataaatgaagtgcaatatatataaggagcagctaagagcatctaacagtcattacatccacacaactagagaaatattacatgtccacaagtccataagagtagaggccaaaggactgccaggtccggaacttccggataaaatacccggaacttccggacaagctgacaggaatatagagcgagggagctgccaggtccggaacttccggataaaaggatccggaacttccggataaacagacagagcaggcagcaaacaacaaaaacaaaattttgaccctcttcgattgcaattttctccccctttggcatcaaggcaccaaaaagagacaaaatcacaagggaagaagaggatcaagcctcatcaccatctccatcagaaggaatgatctcggtgtcgccggagtgaggtgagtcaatgtcttgcccggcggcgtccactgcctcatctggatctgtaggcacattctctgtaggtgcatcggactctgggtcagggatatcatcaccaccatcatcattgctgctctcctcagagtgggaggactcctcattgaagaaatgagcagtgccagagggtccctcaccactagcaatgtctcgagcagcctcataagcagcaaaaggatcagcaaactattcatcatcagaaatatcagagacctccttgcctgctgcaatccaatcttccttctgacgcctctctatcttcttcaccttcttagctgtcttagcacacatgcaaaagatagcccggagagccttctttatgggggaggaagactcagagcgctgtggagcagcagaagaagaaggagcagctgatgtagaagcacgagtctccctggcagaaggagtagctgaagaagagggagcacgaggacggaaagacttgtgctggttatccttgaaataacaaatcccagcctttgcctcaatcatcttcatgatataaggagcatagatgcaacccctctttggctcacacactgtctcatagatctcactccagataagcttcatgatgctaaaatctgacttgttgtagcgcatgcgactgaggagaagcgcatgcctaccaggaagagctgtagcatctcccactttgaggagcaatgaccacctaaagatagaataaagcactctatagtatggaagcaacccacaagtagtccccaaacaatccttgggagcatccttctcatacaagaaagtagtgctggtcactgataaagcatcctctgcaaagagatgtggacaactcaggtcatcatcatctaactccaaagctgcagcaaactgagccatagaaacctaggattcaatcaccagacacaaacatttatttaccgacgtgaactgttagtattttctcccttgatgatagtatttcaaactcgccattctaaaaagtttccccgaaattgcaccatatgcaagaatattctcaccacgtacgatttttataatagatccaatatattgggtttttttacaaccgataagaaaatggattattgctctagctaacaatctgatccaagactccaagcaatttatagtactataaaaaaaagaaagaagtttcttggaagtttctgaacatgaagcttgtccagattagtagtactaggatacgtcacatccactcaaaatcccttatattttaggacggatggagtactctagttcgaaatatctagtaactagcaaaatgcccgtgtgttgcaccggataatgatatggtgactgaactttgatttgaactatttatatgaagaaaatgaattgaaatattttttgatttgaactatttatttgatttgaaattttcttggaatttacatagcttaattgctaattttgataatacaaatatcatttcagcatttatttaaataaaaattattttttctctatgagcctttttcagcccattttcttcttcagcccgcaagcgaccgacggcccgcgtgcggcccaagtgatgtagcccaagtggtgcggcccaaactctcgatcgatctcaaccgttcgttttcgttttgatggacggctcaaatcagtttgaaattgataaaaaccctaaccctccccctccttcccagccgagccgagccggccgcctcccccctccccatctccccaccggcaccgcttcccctcccttcccctccggcggcgccgctccctctccgcctctccccctccccccagccgaccggctcccccgccaccggggtcgtctctccccccaccggcgccgcttccccttctcttctccctcccttctcaccggtacggcgcggtgacggcggggtgcggcggaaacggcgccctcccaacggcggcgtcgacggggtccgcgctccctctcccgctctccttcttgtctcgccggcacggtatagcgacgacaggtgcggcggattttttttgcaattttttccatggctattgctaaccaaatcggattgtgtacggatgaaaattagatgtgacgaaagaaaaaatacaaatatttatattagttatagatatagatagtatcaggcaagcctcctatttaggtggtattattcgtgctacagtgcttatttgctacggtatcacacagaactatgttgtactgggctactgcttctctgctctgtgggctggctactgggctacgtttgctttttgttgggccggcctgctgccgtcttggctgggctgctcgcttggtttttctttttttcgtttctcttttgtttgcggagcgtcagagatcgatcgccgtaatgcatccggattcacggattagcggcgtaataatcacgtgggcccaccctttaatgacggacgaaaaaaatcaaccggaagccttacttattttttaattaggtactagcaaaatacccatgcgttgcattgggggaagaaaaaatagtaattagtgtgtgggagcataaaaccaccaggttcattgaggtctttatagtcgaatcgaatctttgtagtgcaaataagacgctaacatgatataattatttgttgctctaaatccactgacatggatactaaactttgaaaccacaaaaaatatttacttttttgtcatgtattattatgagtcaattgcagtactttgttattttttttggtactcgatattgataagcacttttttttcatattgtaaagagtagccataatataagaaatattttttgctagctatcagatcaacctcactgcactccaattgcataaccactcacttaaataatcagaaggaaagaaaaaaatgtggtatatcgcagaataactttcactctaaataatagaagaaattatacaatgaatgaaaaaaaaagtgatgtgattaggtgtcctgtggcgaatgagcaattgatgagcggaaaaaaatccaaatgtaaacatgattcaatttgttggtgattactctttctaaaaaaaagaaagacacatgtgattatttttatttttaaaaaagaatttattttgtcggtaaataattcattttattggtgactacatgttttaagtaataagatctcttctttttcctgcttggcgtgagtccaaactttattcgtgttcggttgctacagtgttgcgcagtactgtgctgggctggtgggctgcttctcctccgctctgtgggctcgctggtgggctgcggctgctatctgggccggtctgcagctgctttggatgggctgcctcgtcactaatccaatccgggctgctttggatgggctgctccacaaacaaggttttctctttttatttttattttctcctttatttgcaggcgtaagagatcgtggccacgctttcggatcgtggattagcgacgaattatcgtgtgggcccactcttaatgacggacgaaaagattaacaggaagccttacttattttttaattaggtatagatatagatgtcaaccatgaagctaaaataaaaacgttccacatctcattggtcaatctgatctgaccgtgacaggttccacatctcatgtgatctgtctgtctataatattgatcaaggccttgtttagttccaaactttttcttcaaactttcaacttttccatcacatcaaaacttttctacacacataaactttcaacttttctatcacatcgttccaatttcaaccaaacttccaattttagcgtgaactataaacacaccccaagattcgaattgtcaaagaatagcaagaagcaatcagaattcagcagtctgtcttccctgaaacttttcttcataaccaagtcttggttttcataggtgactgactgaatgcatgacttcgcaggcactggacacgtgtatgcaatttctcagaatctctagacttctggtctagttccatggtcaggtctatagacttgttcttgcagttctgattctgactttctgaccagtttgtgatgcccccaggtacatatataagaaaaatctgggtattgatcaatcctacagttaaaatttcaagatatcattcatctggtaggctggaagcaaatcagtagtttttttatctgcagagaaattataatacaagagtagatatatatttttttaggaaaacaagaatatatatatttcctttggaaagtagaagtgatagttacatttttgttaaagaatatcaaatgcaaatgataaaacataagacgtgatcagttactaaactatgcatagaactatctaatccaacacggcctgcggtgaagcgtagctatagttgctgaatgggaacagcccagactaatctttgcagcagattattggttaatacctacaatagatgaagagatggagcattcttgattttacatttccagagcacgctcagcatgaccatgtaattcatactgtctgggtggaatttgcaggcacagagccattctgaattggtcgaggctctttgccatcagcacgttcagacactcccatggatatcctgggaactgtcgtcaattctaatttcacggagaggtctatcagccacaaagccattgcccatgctgttttgtgcttgattagatccttcatgagcaccgtttccatcatccacaccaggactttgcacatcagaaactctaatttttgtgtattgggcaagaactgacattgaaatgcttatcatcagcatgagagctgacataaatccatagatgataaaaagaccagagaaactctgcaaagtgagaggtgtcgaatctgtgttggggatcgcattacttggagagacagcctctgcaccaaaccaatttcacttccatacgtgagccctcatccccactcgttacatccaacatggcagttgaaagattatgcaccagtggaaaaccaggaggaaacacctgaagggaagaaaacatgatgcaatttaggccagattgtagcatagctcttaaaggaatatgagtgaattcgccaaagcaatggagtgagagacttacgaaaccaaatccaggcgtcttatatatacgtttaagcatctggaattcgttctcgtaatgagggtctgagacaatagcggttaaaaatgggatctcatcaacgatagcagacacacctccattcttggaccccttcctcaaagattctgcatattcctgcttctttgagtaggatcttagccttccttcactgaaacctcgtcttgtcaaaaatgagtgcacgaaggatccctcttggtatccaacataatcaccattacacaggagctggtcaagatctgtcactgagggctggaacctcttaacagttagaatggatgccaagctagctccgtagctctgcacaagaaccaacaccacgaagcaccagcttaccacaacaattttcgacaacggacttttaataatttgacctgtgcatagtaaaacaaagatagtgggtaattgaagaactattgtaagaaaatagctaaaccacttaatactgcatcaaatatagcctgaaagctgagctccaaatactaaccatgagaaaatgtcaaagtggagaaagcaaaatagagagcagtgcagaactgtcttgttcttgatccttggaactccatgtttctgggacgttcaatcatcgaaataaccaaggcagtgaataggaaaaagtatcatagtggcaaaccaaagttcttttgtcagtggcttcaagaatacccatttggttgttgattcagattcattcttcgcaagcacaagcattgaaaccccagactcggtgtacggcatcgtgaactccacctggctagctcgatcggcagttatggttatatcccccactgcagcatcgttgatctgatagtaagaaccagcagatatagtgtaagaattcggttctgttacaatgtcatcaaagcacagggagtaaggctttacccctgaagatacactctgtactagctggtcataagaaccattgaagacaacaaactcataactcagatgatttggtaacttcttcatggcagcctcaaagacatcaatgcaatagccagtgacaccttgtgttatgtggggcattcagtatcagcgccggaaccgatgccaacagccagagcaggcgccgtgaggttggattaagttgttaggattagtttcagtgattaagtttgttaggaagattaagttgttagttcctggttagtagctgtttggttttccattgtaagcctatataggccattcggtttaagtgattaatcaagaaagaagttaatcccagttcctgttagtttccaccacggctccggggaggcgaggcgtgcgccctcgccctcccgtcgagcacagctacgcgctacgccacttagggccagcgcctaacattttggtatcagacttccacgatcctctccctcgccgccgccgcgccatgtcttccaccgtcaccaacgtcgccgacgattggaagaagggtctcgctgaggtcctcgaccgcttggactccatccgcggcaagctctccgacctcgacaatgaacagcaggcgcaccacatcgccatccagcgtttggaacgcgctggccgcgatcgctcgccgcgccgtaacaatcgcgaccgtgacgacgaccacgacaatgacggccgccgcggtgatcgtccgccacgctaccacaagattgactttcccaaattcaacggccaaggtgacccactccatttcctcaatcgctgtgaacaattcttccagggccagcgcacgccggaggaggagaaagtttggctcgcatcctaccacctgctcgacggtgctcggcagtggtatatgcgcatcgaacgcgatttgggcacaccgacatggcgacgcttctccgacttgctcaatctccattttgggccgccgttacgccaggcgcctttgggcaaactcgccgcctgccgacgcaagactaaggtggccgcctacatcgaccgcttcctcgacttgctcgctcgcgctggccctctcacggaggagcagcaagtagacctcttcaccaccggactccaagaaccactcagcatcgacgtacaactgcagtacccgaccaccttggagttcgccatgaatctggcgcgttcgtttgagcgccgcgagctcgccgctcgcactacaccgtgacacaccgctcgtgaccaggcgtcctcttcagcggcgccgaccccgtcgcaaccggatgcagcttcctcggtgggacaagcgtccacacaggttgcaggccgcacggttcgccgcctgtcccagtccgagatggacgaacgccgacgcaaaggattgtgcttcaactgcgacgagctctacgcccgtggccacaaaaaggtttgcaaacgcctattccttcttgatttggcttatgatgatgatgatgacgaggtggaaggcgctgcaccggctgtcgaaccggagacgcttcgcatctctctgcatgcggtcaccggcgtccgtccgtccaacgccatgcatctccatgtccgcttgggcgacgccaccctccacgcgctcgtcgacacggggtcgacacacaacttcctgtcccaggaggccgcagcacgggtgcacttgccgctcgtccaacgcgctggcctgcgcgtgacagtcgccaacggcgacaaggtgccctcgccagggatgttccaggacgcgcgcatctccattgacaccgaggtgttcatcaccgacctctacgtccttccattgggcggctacgacctcgtcctcggcatgcaatggttgtcaacgctgggccagatactatgggactttggccaacttaccatgtctttttggcacaaagatcacatggttctgtggcgtggcctgcccacgggcgcttcaccggctgcgcacgtcgccaccacccgcgacctgctcgacgacctcctcaccgagttcgccgacgtcttcgccacgccatccggccttccgccaccacgccatcaagaccaccgcatcactttgctgcccgacaccgcgcccgtggcggtccgaccttaccgctactcggcgcgccacaaggacgaactggaacgccagtgccgcgacatggaggcccaaggcatcatccgccgcagctcgtctgccttctcctcgccggtcctcttggtcaagaaggccgacgggtcgtggcgcttctgcgtcgactacagggcgctcaacagccgcactgtcaaggacaaattccccataccggtggtcgacgagctcttggatgaactccacggcgcgcgattcttctccaagctggacctccgctctggttatcaccaggtacggatgcgcgacgccgacgttgagaagacggcattccgcacccacgacggcctctacgagttcttggtgatgccctttgggctgaccaacgcaccggcgacattccaatccctgatgaacgaggtacttgagcccttccttcgccggtttgtgctcgtgtttttcgacgatatattgatctacagcccgtcgtggtcatcgcacctacaacatctgcgcgccgtcttcaacacgctccgcgcccacaagctgttcgtcaagcggtcgaagtgctccttcggggacacctcggtcgcttatttgggccacgtcgtctccggccagggcgtcgccatggacgcctccaaggtgcaggcagtggtggactggcctcgcccctgctccgcgcgagctctccggggcttcctaggccttgcggggtactaccgcaagttcatcaacgatttcggcgccgtggcggctcccctgacacgcctgctcaagaaggacggcttcttgtggtcgccggaagccgaggtagcgtttggacgtctcaaaaaggcgctcaccacggcgcccgtcctcgccctgccggacttcgatcagccgttcatcgtggagtgcgacgcatcaggcacgggcttcggcgcagtgctgcatcaggatggaggacctattgcctatttcagccgcgcctttgcgccacgccaccacgccctggcggcctatgagcgggagctcatcgggttggttcaagcagtccgacactggcggccgtacctttggggtcgccggtttgtcgtcaagaccgatcacttcagcttgaagtacctgctggaccagcggctagccacgctcccgcaacaccactgggtcggcaagctattgggctttgatttcgaggtcgcctacaagccggggcggcagaacacggtggcggacgcgctgtcccgccgcgacgagccggctgcctcgctttgcgccatcaccacgccggtgtttgactggctacaggatctgcacaccgccaacgacacggaccccgcgctggtcgccctccgggaccagattctggccggcaacaggacagcaccatgggcactcaccgacggcatcgtcaccttcaagcagcggatgtacattcccccggcgtcagcccttctccagacggccctggcaatggtgcacgatgacaagcacgaaggcatccagaagaccttgcatcgtctccgccgcgagttccatacgccgggtgaccgccgtgtggtacaggaattcgtcaaggcttgcgccgtctgccagcggaacaagacggaacatctccaccccgccggcctgctcctgccactgccggtgccgtcggccgtctggtccgatgtgtccatggacttcgtggaaggatttcctcgcgtcgcaggcaagtccgtcatcctcaccgtcgtcgaccggttctccaagtacgcgcacttcatcacgctgtcgcacccatactccgccgagtctgtggcgcgcgccttctacaccgacatcgtacgtctgcacggcatcccaacatcgatcgtgtccgaccgggatccggtgttcacttcgacattctggaatgccctcttcgcggccacaggcaccaagctgcacatgtcatcggcgttcctcgacgacattcgctaccggctggagcaggcccagcagcatgcaaagaagttctacgaccgccaccatcgggagctgcaatttgtggtgggcgactgggtttggctccgtcttcgccatcgcgttccggcatcattagcaactccggtaaaaggcaagcttgggccgcgctattatggaccatacaaggtactggaaattatcaacaaggtggcttatcgcctcgctctgccggctggggcgcgcctgcatgatgtgttccatgtcggtcttctcaagccgttcgtcggcacgccgccgacgtctccaccggcgctgccctcgacactacacggagcggcgttgcctcagccagcacaagtactcaagtctcgtatggctcgtggggtgcatcagctgctcgttcgttgggacggtctgccggcatctgcaacgtcgtgggaagacttggacgatttccgtactcgctatcccgcattccagctcgcggacgagctatttgtcgaggaggggagagatgttatgtggggcattcagtatcagcgccggaaccgacgccaacagccagagcaggcgccgtgaggttggattaagttgttaggattagtttcagtgattaagtttgttaggaagattaagttgttagttcctggttagtagctgtttggttttccattgtaagcctatataggccattcggtttaagtgattaatcaagaaagaagttaatcccagttcctgttagtttccaccacggctccggggaggcgaggcgtgcgccctcgccctcccgtcgagcacagctacgcgctacgccacttagggccagcgcctaacaccttggtcagatacattcacaaaagcgctaaaaccatgtttcagtggcacagcaatcttgaggtttctcctcactccaacatttatcctcccggtttctgaattaggaaaaaaaaaggttagttcatgtcaattgtagatccaatattaaaaaaaaaggttggacaccaaggaagaacttggtgtcaatggttttaagaaaggagaggtaaatatttccctggtgagcgtgctcgataagggtcgaacccgggccgacggggtgcgtgccagcgacccctgccactgctgcgctactagcgcatctctagatccaatattctctcgtcctatgagcaaaactaaactacgtggcacagcaacaacaataattctttgcgtatgtttgcaccatgttctttaagcattactgctaggcatatttcataggagtacattgttaaggatatatatcaaacgaaaacatatccctccactatatttttatggatgacagctgggatgagtgtgagaagttaaatcagattctcaaatctgcaagatggatggcatcttggatgaatagaatctctggttgctccaggcgggttgttggtcttttgatcttttctatcttttatttttattattgtttgaactaggtcaatcctgtatgctcatttctgatatatggaaactagcatagtggtccacgcagattgcgcggctagcatcattatattttctctcatataataacatatatgttttctcaatgtagtattcaaatatattaaaatgacaacataattttaaattttatactaactttacgaaactactaatgtgcaatattcatattgtattttatatacgtgttagttattaattattttcaatataaaattttagttatttgtaaattatattatatgaactctagactcgtctttcaatatttcttttttttaattcagaattttagttatctatgaattgtatttctatatagactctaggctcttctttcaatattctttatttttaattttgaatttcagttacttctaaattgtattcatatattaactttagactcttcttcctgtgtttttttaatttcgaattttagttatttgtaaattgtatttttacacgaactctaaaatctacttttaattttattatgtttatttagaattttagttagttttaaattcctatatggactctatactctacttctaatattccttattttaattccgaatttctatcatttcttaattgtatttctatatggactctagtctcctcttccaatattccttgttttttaattccgaatttcaactatttctaaattgtatttctatatggactctgtttttctttttctccgattaatatgagaatttttaggccgtgagagtgaacgtggagactcatttttctattccttcaataacttaatagattggagaagggatcgcgtcctcttatatcattttttttaaaaaattaaaggataccaccgtaaatagagccaataatggatagatatggcaattgatatgatctgctgaaaaaattttgcgtactgcttgtttgattctacgatactgtcatggcaatcactatcaaactggccccgcataagaaaagttaaaaactaagaattcgtggagtgaacaatctatgaactccccgcgatttttttttaaaaatacaaactcttagaaaaattaggatgaacagcgaacctcctcaacttagatggaagaatggatccacggcctttaggggttggtgcggcggagggaccatgcgcgcagcgcgcatgaatgctgcagtaacggagctctgactcaggcggcgcggtgtggttggggaggtgggggattagagcaatacgggtagaatcgcacggtatagcaaccggtggcgcagccgcgcccctccataggggtggaccaccggcggcggcggcgacggtagcggcggcgcggcattgggctctccgtctgaacgatggtgagaattgagaactgacaaagaggaagggaaggggatgagctctgattgaggaagaattggccggtggatttggatgtatggctcagatttcacctcttagctaccctatatcttccactctgggttcctccaagaaggctaatgtacgggtgatcgcgcgaccgcataatcaggtaggcttttcttattttggcaccgcatgactttttttttaagatatatgtatgaaatttgtatataaaaggttatctatcaaatttatactctatgttttatttgtttgacgttggttaaactaaccaacttcatataaaaaggaaagaaaggggtatatagaattttgctaagattctagtacattttatacctatagagtttcaatgtatatatatttatatgcataaagcacatgaatattctcaaacataattgtttttctgttgttagtacatttttttagaaaatcttatttttgaatttgttttcaaaaccaagttttgtgcgtgcccacgtgcgctaggacgagggcactaggagcgactgagcaattcgggagtgatgcggtgggggaggaggagaggggtgccactccatgcacgatcattcgcgcgttagacatccttaagtttctcacattccattctctttctactagtatgtgttaagtaatttaacatgaacttaaaaataagttataatggaagtgtcaatgcaccctagttcccagatctttagagcatctctaaagagtggctaaatgattttccatactaaatttgaaaaagaattgctacccaaattctgtgcatgccagaacttagcttttacccaaattttgctatgttatttatagttactcttatagttatgacctcatcatcgaatctcttatccacaaccgtacatatatcctctacggctctaccattggagagataagtactattgcacaaaatatgctaccatttgtaagtaagtacgtgaatttattgtctaacaaccctatgtacttacttctgttccttttaataaaacatgtgcatctcacgtgttcccaaaaacattatcaaaatacaccttcattatgtacttaattagacgcaatgaacccgagagtgatagaattttatcgtacttacttaccgaaacaattcaaactgtaactaaatttacatagaaatgctcatcgaagtagcgggggatatatagtaaacaattcgtgcatgcagcgacgtactccctccggttctttttatatgacgatggctagttcagtagtacttaagttgcaaatacaaataactttttttttgaaaggaatgttgcaaatacaaataataagcttatatatctcttcactcatattagcattaccattgccgtttaggcccaagcggtgcgccaccgtcgccgccgccgacgccgccattgccatctccggtgaactccaaaccgtgagcagcatgatgagcatcgcggcgcccatagccaaccgaggcatttcctccatagccgtacagtacgaaaacgtgcaaattaactgcaaagcaagagcttagtcgagctagctaattaaggagctaacacacagcaattaacagtgcatggcatctcgagacgaactgcatgtatatatataggtagaagtatacgtatacacggtttttttaaaaaaaaataagtatatgtatacaggcactactaattaagcaattaagtaatagtaattaactaggacactaacacgcaaccaacgtacacacggtttatacactgtcaaaatggctagttgacagtattttttttaatactatttgtgtttggtaatgtacgtagccagtcagaaattcggagtgtttcccaagtatagtagtatactccagatcaggtacagactgtgtcaatgcatgtcagagaacgtctcgattgggtattcagttatactattcctgtaactacctgctccttactatacgtttatataggccctgtttagttcgcgaaataaaaattttttgatgtcacatcggacgtttgatcggatgttggaaggggttttcggacatgaatgaaaaaactaatttcacagctcacctggaaaccgcgagacgaatcttttgagtctaattaatccgttattagcacatatagattactatagcacttatggctaattatggactaattatactaaaaagattcctctcgtgattttcatcataactgtgtaattagtttttttatctatatttaatgcttcatgcatatatatacaaaacttcgatatgatgtttttagaaaaaaaattttagaactaaactgagccatacgttgcagaatgtagaaataataatcaatcattgacttgacttgacttgaaactgagattgagttaatttatgataataattttgatggtacatacaaatagcttaaatgctactaaaaagttaaaaaaaaaacgttggtttaaaaaaattttctaataaaagtagatggaaaaagttcttaaaaaaaacatactatttaagagcttgataagcatatataaccacaataaaataatctaaaaagaatggaacctatcgaaacccacatgcagagaatatgagggtgtaagtgactaatccactaaatccagttataaactaaaataagctacgaatatcttattatgatctatatatgcgtgggtttgtggcataccaacttatacacctagtagagaacagttcgtgtatacgaatacgagtagagcagtctggtgttctttcttagaggctaaggttagtttttgtagggatgaccaaatcattgggactccatgattagcaccaaacaggcgcgtcgtcccctgtaatacggtgcaaacgacgatgcgttgtctcgatcggctgacgaattcactggtggagaaaccatctttggtcggtcgcccgaaatccacaatagtctcggttccactaaaaaccgggactaaagatgatctttagtcccggttggtggctacagcgggcatatttgatctttagtctcggttggtgttaccaaccgggactaaaaatgatctttagtcccggttctaaatctgtcaggcctttgtaggcccttcgatatctttagtcccgggttgatacaccaaaccgggactaaagataggattttgagtcccgggtggtgttaccaaccgggactaaagatcccagggatctttactcccggttgataatatcaaccgggaataaagcgtacgcaccagcccacgcacaagcgcatgcgtagcccctctctctctctctatctcctatccttatctctttttcttctccttccttatcttcatgctctccccttcctcttctctcaccccctctcctcctcccctccccctcttcctcttgcagaggcagccgacggcggcgggatgggggacgggcacgagctggcggcggccggccggcagtggcgggatggaggcggccgggcgcgggctggcggcggccaggcgcgggctggggctggaggcggccggccggcggcggcgggattgcggcttggcgcgggccagcgggatggaggacaggcggcggcgacccggcgtgggccggcgggatggaggccggtcgccggcagcctcgccctcccctcctccagatccggccagaggggaagcggcgggatggaggacggccggcggcggcccggcgcgggccggcgggatggaggccggtcgccggcggcctcgccctcccctcccccagatccggccggaggggaagcggcgagatgggtggccggccggcggcgggatgggaggccggccggtgagtcgattttttttttgattttttttaatttgtggtttggatgttttgatctgtgaatgaatctatgaatcgatattgtgaatgaatctgtgatgttgtgaatgagtatgtgactcgatgttgtcaatgaacctttgaatcaatattgtgaatatatttgtgatgttgtgaatgaatatgtgaatggatattgtgaatgaatttgtggtgaatctgtgaatcatgctgtggagttgtgatgtggatttggggtttgatttgatgatatgcataccactcgattcgggagaaaataaaaaaaaaggactagctgatggactgccgctaccctctctttagtcccggattggtagtcccggtttgaaaaccgggactataggggggttacgaaccgggactaaaaagcacttctccaccagtgattccttccctatccatttcaaagaacttgaatgttctacacgtacttctaacgttatatgtcttctcgattaatgttcaggtcttcggactcaacagcatgcaagtgggacgggctagcccgcaggttttaaaactcgtttaattttgcactggttgaagaaaaaaaatagtaattagtgtgtgggagcataaaaccaccagattaattgaggtctttataatcgaatcgaatctttccagtgtaaataagatgctaacatgatataattgtttgctgctctaaatccactgatatggacactaaagtttgaaaccataaaaaatatttatttttttatgtattattatgagtcaattgcagtactttgttattttttggtactaaatattgataaacactttttttttcatattgtaaagagtagccataatataagaaatatttttcgctagctatcagatcaaccttactgcactccaattgtgcgagcagcggtggcagtgccctcctggctatggcggcgcccttcctccctccccgcgagcggcggcggcggctccctccaccccatattgcctcccaggccccctgttgcagtcctcctctcccatctcccccttttcctcccgtctcgccggaacggcacggcgacggggagggaaaccaccggcagcgctgtttccccacggccactccctccccttcctccaccggcctccctcccgcagcaggtagatctggcagcggtggcggcctcgcggcagctactggtggcagcggcggcggctccctccacccccggcagccgcaggtggcgttagcggcggctccctccgtcccctgtcgcctcccccccccccccccaacttgctaaaacgatggcggtggcgggggcggcggtgcagctcggcaagccactgccagcggccactcgccggatctggccatgggaggcggtggcgactgctgctacggcaaactccgctcgatttttggttgatttgtttttttttatctccgtttgctattcttctattcttgtatttgggatctaacatgaactggattaaaactttgtatgttatttgatgcgaactcgtatgtatatgcttctatttgtctgattgaatttcgattggcatttttttggtttttttggttggggggtgatgcaattccaactgagatttttggggggtggggggcggacggacgaaaatttgggcacggacaatgtaaggattgaaaaaatatgaatattttaattagttaagattaaaattaagatttcttcatgtttatactagtagattaaaattgaatgtacatgtaaagaaaacgggacacaagtttattcatgtttatactattagattaaaaagaatgtacatgtgagttgcagtggcgaaaacgagtgcgctgccacctagaaaaaatggtaaagaaaacgagacacaaatttagtttacacatacagtggcatatatatatcaaagtgaaagcacttcttttttttgtataggcaaattaaacatggtaacatttttcgcttgtgtgtcaagctgccctagctggatataataagcaaagtagcaatgccatctgatctgctctgttgtctctcggtagtcagtagatgcacggatcaaaaaagcccaagacaaacatcagctgaacatcattcatgctcattcagcatgaatctgatatcatgaatgaccagattatttgtcttgggacaaataatctctagacttctggtctagttccatgttcagatctatacacttgttcatgcagttctgattctgactttctgaccagttggtaatgcccccaggtataagaaaaatctggacattgatcaatcctacagctaaaatttcaaggtatcattcatctggtaggctggaagcgaatcagtagtttttttatctgcagggaaacgataataaaagagtacatatattttttgaggaaaacaagagtatatatatattgcctttggaaaatagaagtgataattacatttttgttaaagaatatcaattgcaagtgataaaacataagacgtgatcagttactaaactatgcatagaactgtctaatccaacacggcctgccgcctgcggtgaagcatggctagttgctgagtgggaacatcccagactaatttctgcagcagattattggttaatacctacaataaatgaagagatggagcattcttgtttttatatttccagagcacgctcagcatgaccatgtaattcatactgtctggatggaatttgcaggcacagggccattctgaattggtcgaggctctccgccatcagctagcacgttcgacactcccatggatatcctgggaactgccaattctaacttcatggaggtgtatatcaaccacaatgcaacccatgctgttctgtgcttgattagattcttcatgtgcatcgtttcgaccacccacatcaggactttgcacatcagaatctctaatttgggtgtaattggcaagaattgacatggagaacctaatcatcagcatgagagttgagatacacccagtgatgataaaaagaccagagaaactccgcaaagtgagaggtgccgaatctgtgttgggaattgcattacttggagagacagcctctgcaccaaaccatttcgtttccatacgtgacccctcatccccacttgttacatccaacatggcagttgaaagattatgcaccagtggaaaaccaggaggaaacacctgaaggggaacaaaaaaagaaaaaaacatgatcatgccagttaggccagaaaattttgtccagaatgtagcatagctcttaaaggatgatgagtgaattaagcgaagcaatagagcaagaggcttacaaaaccaaaaccgggagtcttatatatgcgcttaagcatctggaattctttctggtaatgagggtctgagacaatagcggttaaatatgggatctcatcaacgatagcagacacacctccattcttggaccccttcctcaaagcttcagcatattcctgtttctttgtgtaggatcttagccttctttcactgaaacctcgtcttgtcaaaaatgagttcacaaaggatccctcttggtatccaacataatcaccattattcaggagctggtcaagatatgtcactgagggcttgaacctctttacagttagaatggatgaaaagctagcagtgtagctctgcacaagaaccagcaccacgaagcaccagattaccacaacgatttttgacaaaggacttttaataatttgacctgtgcatagtataacagagatagtaggttattgaagaagtactatgagaaaatagttaaacctcttaatactgcataaatatagcctactagttgagcctctaagtactaaccatgagaaaatgtcaaagtggagaaagcaaaatagagagcagtgctcaactgccttgtgttcgatccttggtactccatgtttctgggatgttcgattatccaaattactaaggcggtgaatagaaagaagatcacagtggcaaaccaaagttcttttgtcagtggcttcaagaatacccattcgattttttattcagattcattctccgcaagcacaagcattgaaacaccagactcggtgtacggcattgtaaactccacatggctagctcgatcagcaattatggttatatcccccactgctgcatcgttgatctggtagcaagaaccagaagatatataatattagtacttgattatataacaatgtcattaaaacagagggagtaaggcttacccctgaagatacactctgtactagctcgtcataagaacggtcgaagacaacaaactcataaatcagacggtatggtaacttattcacggcagcctcgaagagatcaatgcagtagccagtgacaccttggtcagttacattcacaaaagctctaaagccatgtttcagtggcacagcaatcttgagtttcttatgataaacttcaggcaaacctcctaagttcctcctcacaacagcatttatcctctcggtttctgaatcagggaccaaaaaaaaaaggttagttcgtgtcaattgtcaatccaatattctcatgtcctatgagcaaaaatgaacttcactgcacaacaacaacaataattctttgcatatatttgcccatttctgttacaataattctttgcatatatttgcacatttctgttaggcgcatttcataggagaagtcaagtacatatggaaaattaaaacatttccatttttccctcctccactatatttttatggatacttgtaaaattccgtgtactgcttgtttgattctacgatactgccatcgcaataaccattcacaaacttggcccacataagataagaaaattttaaataaaaaaaaactaagaattcgtggagtgaacaagtcaggatgaactccccgcaaacttttaataataaaaaaatcctcaaaaaagaattaagatgaacagcgaacgtcctcaacttagatggacggatggatatgggatccacggcctttaggggttgggtgccgaggagacacctacaggaaggtagctctgattcagacggtgtagttggtgtggggaggtggggatgactttgcatgtcaaattttagcccaacataaaaaaaatactctcaaattccgtgcaggtggaattatccacgatcataaatatatccttctaccagatgagtgttatcacaacaaatatgctactacaatttgtaagtaagtatgtagagtgctagacaataaattcatagccaacattgtcaaaatataccttcattatgcataaaattttggggcaattgtgtttttgaccttgttttaaagcctaactcccaatttaaccctgttttcttaagtttgctcatttgaccctcttttttaaaaatgaagatcacacttgaccctattacgagaaggcaacataacggtgttaacctgtaataaaaatatcatttatgcccttgctcatttgaccctactttatcaaaagtttttatttatttacccgattttgacaaaggtttgacaaattaatttgtcttagatttgacgaattttgataattaaaggtttgacaaacgtaaattaaaggaaacttgcagacaaatgtgagacacaagctagtgaattaacaggaacttggcaaagctttaatttgcacttcacgtacgtaaaccagataaacagatatctcaccatacagagagttaatcgcaaggacatagcattgtcgcataattcagaaaatctcgttggataagaaggttcagaaaataattaattctttcaaacgagattagcaacacatccatccagccggcgcatggagatgatgggcgcgcaggagaggatgaaatgaagcagcagaggctaaccataccggagggcaagacatggcacggcacaggggcgtacgtgatggaggcggcaggggcaggcaggtatggcgcgtcgtcgtccctccctccgccgcgcgccagcctccgtcgtccctccgcgacggacggccgagaccgtagccgtgcgccctctgcgcgccgcctccgccgaaagcgcgcttgcagctagctagccgcgccgccgagaaggccgagatgagtgtggaccacgggatgaggaattttggggatagggttgaggggcattttgaccagtttgagctataaaatactccctctgtttccaaatatttggtatagttgacatttttagtatatgtttgaccattcgtcttattcaaaaatttttgtcaaatatataaaactatatgtatacgtataagtatatttaacaatgaaccaaatgatacgaaaagaattaataattacttaaattttttaataatacaaacggtcaaacatatttaaaaaaagtcaacggcgtcaaaaatttagaaactgatgaaatattttattattattattttttaagtgaaatcctaacggtgtacaccctccgtcccataaaaaaccaacttctgtagataaacctggacaagcatgtgtccaagtacatctcagaagttatctttttttttgggacggagggagtagggagatataggtcaaacggtagcttcgattttaaaaagtagggtgaaatagtcaaagttaaaaaaataagtatgaaatagtcaaaattaaaaaagtaagtcagattagtagttaagatctagaacatgatcaaataagcaattgtccctaaaatttttagctacgtatctcaatatattgtgatagaattataacgtatagttatataaataactagctgggtggcccgcgcaattgcgcggctagcacccaaacaaaatcatatatttttagtatgattttacttaaatattattaaatagataccttgttgtcttaagattttgaaagaccaaaccttatcacccccgtatttctaattaaatagtttttaaaaatcacaccagttactatcccttacttttgtcatatcttacttttgtcatatccttctttatttgtttgctcaatctatcccgggcgggggagtgatgtgggctgaagagaagggagagggagggggaggagaagaggacttgggaggacttgggaggaagaagggaggactttggaccacatttgacctaaagagagggagaggattatttttgcgttttttattttaataaatatggaattggtttttgttgttttaaaataatttcttatgctcttatacatgtttgattatgtcttctagtatttaacagtaacttttacccgtagggaagtatgggcattttgctattgagttaataaattaaaacccgttagataattacgagaagaagctagcttgatttagggctgaaaaattctttccgtcgaagaattcagggacgttcttacttatgttgtcaatgctcaggcctacactcgcttaatttatggcctgatacatctccatgtagagactgaattcagttcccatcatcgaaaaaaaaaagaaaagaaagaggtcaacgtcttgtgagcaaaccaaaatgattttcttgtgagcaaaccaaaaagaaaacagagagtatacctgtcaagccttgttatctagctaattaaggatacattacacatttattataaccagtagcctattgacattgctaagtattcaaccatgaatataacttaggtctctcacggtccggttaatcttatcgcacgcaataaagaacaatttttcgggaacgcgtaaaaaaaaaacagttcggttcattactttaattactgcccctttcgtactaaaataaacaaacacatctcacggcgagcaccgactcactcaacccttttatcggcaaggcgctcctggtctgaactgatatgacagtgtgacactgacatactctagtaaacgcttgtttattttagtactgtccagaagaaacattataccattctcatgcaacatgtcaaatcatctagctgaaaaccatagcaaaacaggctttttactagtagaaatactagaaaccatcgtaaaattgcttcctggttatctgcaatggaaatccaggacttcttcagagctgcactccaatgaactgggagacactgacttgaatcaagtctggaggagtgcatatgcatatgcacgagagtcttacttgtatgatgtcactagtagctacgctttctaacttttaactgcagagaaatgtctctttcttttctaccttgtgttgtgtgattcaatgtagcatagatactagcacagaagcttcattttaggccgataattccttctctcgaagaattcagggctctttaacgttgtcaacgttcaggtcacaatcagcctcgcaagttcaggtctacagtcttgcaacctaaacaagctggttttcttcattctgattctggaagtaagaaaaacagagggcatacttgtcaagcctacccggatttaatgtgttggcaacttttttgacaagtcgacaagcacaattgcaacacctaaacaccttgcggtgatatagagtctctaaccacctcgatctagccaaagggccaaatcaagatgggttttgcaaaaagaaaagctaaaccggctagcggagccgatttagagatcaaaatcagcctctaggccgatttagatcgatatgaggataactacccgtcttgtgggcaaaacggaaggttttcaggacaaacctacaaagaggtgtcacactctcgcagcggcggcggatggtttacggcgcaaaccgataaagatggactaaaactagggtaaaatagaaaacatagtaaaagaacgattcaagtagattgtattcgggggttttacaatgaaccggccttatcctttaaataggggttggtcttaccctctacaggctcttctccacgtccaactcgggatagaaaccaaaggaaatacgaaacatgccttcccgagcaaggaaacccgagacccgatgaaaacagactcggactcggaccctgacggtctgactgcccacatatctgcggtcagaacggccctactagccggtcagaccgcccacacacctgtggtctgaccggtcctatgaaggaaacccgtcactttccaaactttgtcaatttttccctatttcgtccataggtgccaaatttgggtgtaaacataatgttcaacaataaaagacgataacatctgctttaacatctagggcgtgtttagttcacaccgaaattggaaatttgattgaaattggaacgatgtgatggaaaagttagaagtttgtgtacgtaggaaaattttgatatgatagaaaagttggaagtttgaagaaatattttggaactaaatagtagaggtgaaaacggtacggaaacggacagaaacgacctttatcgtttcgttttcatatttttttcggaattgaaatcggaatcggaaacccccggaaacaaaaacggaaacgaatattatcgaaaccgaaaacggagcgaaaacgaaccggcgcggatacggtaacaaaaatttatcggaatacacaaacccctcaaactgagggtcaaactttgtcaagtccaaatctcaagtctcaacattcaacaatacatcacaaaacacaaccatatcaaatccaattgtttctctcagcagtaccatcataaacacaatctatgcagtctgtaacttcatatttgcataacaaatattgcatggagttgcataacttcaacaagcaacaacagcaagtcagccatagtacatagttcatcacaaaacattgctgagaattacatagttcagcaatagtagaagtataaagtcagccactatataaacatatgttagtaaaacaagcacaaaccagggacaccaaggcacaaaaatttcgctccaggttctccattcaccagtcaccaccactccaccagtggggcttgagtcggcggcggtgacgaggacggcgcgagacggtggtgcccgggacgacgcaagacgtcgggggcggggacggggacggcgagcgactacacgagacgcggtggccgggacggcgcgagacgttgggggcggggatggcgagcaacggcggggtcgaggacggcgcgagacggcggtggcgactggcgaggacgaagcgtagggggcgatggccgggacggcgcgagacgagctgacggcggtggcacgagacggcgacggcgtgaggggacggcggccggcagcgccagatctggcgcgtggtgtcgctgccgccactgcaaatcctcacccggcggctgtgtctctcactctctcggctagttagtggccggctagacagtggagtagtacactagttactagtgtgttgcagtgttgggctgggctagtgactactgctagtactagtgtgttgggctggccggttggacacaggaggttttatggactttgtaatgtcggaaattccgagaaagttttcggaaagtttccgaccgattccgagtaccgtcgaaaactgctattattattttcgattccgttttcgaaaaattccgaaaaaattccgaccggctgattccgttttcgaaaaccagtccggaatccggaaatattccgtaccgttttcacccctactaaacagggccctagtaaaaccatctgaattgatatcaacttgtatctgcattggtgaatctatctgacactgacaagtttcaaagttcactgtcggtccagttctctgtctcactaaggctgtgtttagttggatccaatgtttggattttggttaaaattgaagatgatgtgattgaaaaattgtgtgtgtatgacatgttgatgtgatggaaaaagactgaaatttggattcaaactttggatctaaacacagcctaagatcatttacaatgcaagacgaggcgtgtggcaatgtagagccacgtaggcggagtgcatacgtggaagagaggaaggggtggggctcccatgacttgagctggttcgcgtagcctcgtttggctccgataacctcatcgaaagaaaccagcttttgtcagaagaatcgtgggaaaaacaagagaggaagggtagagactcgaaggaggaggacgaggcggcggcagcagggttcatcgccagagacggcgaggaagcggcggccagggcgtcggcgaggaaaccacgaccacggccatcctcacgccgcgccccgacgagccgcaccgttgtccacgtcgccgcagtgaaggatgagatggcgcaacaaaagctccggtacagagcaatttcagataataaatgcattcactaattaaaatatctacataactagtacataccaaaccaaattaatgccctatttggactgcaaaaaaaattcagatacagctattcaggccctgcaaaaatcagttcctagctgcatcccaaacaaggccgaaatgctctctgtttttgcaatttcaaaggggtactgtacataagtatatatcatccagtgttcatgagttcatctgcatctgatatgatgttcaggcatagggccattgtgcatgccattctgcattattggatgaggcctttcatcaccaccctgaaacccatcgtttccaactttttggacagcttgatcaggtgcagggttgctgtcaatgacaatatgaagtggccttgattcttcagtggcagtgctactagtactgcctccatgctccacatcatgaacatgagcttcgatcaattttacggtccttgagatgagaaagtatcttgaggtatctaaattttacagtaaaatttttggtatcttgagatactttggtacctagaggtatcaaattttgcactagaaaatataataactctaggtactttctcaaggatggtaaaattaccctactaattacacaaaaacttgttgaattcctccatggatgcaccgtgcacatctgaaaattttcagttgagtggtgtacagtaattcccagaagaaaaaagtgaggtgattagtactactggttgctaaatccatggggttacaccggctaatagttactgttgacagtacaaacatcaaaagtttaataacatgttaaatacattggtttctagcaaaatatatgttggttattttcaaagcatataggtttaggttaaaaaaagagtctagtcagttataactgctaaccaagttagtttcaaaaatcattagtaacttctatgaacgagggagtacatcctaactgctgagaaatttctctcttgctacgtagcttgtgtgatccgatgcgtcatagataattacgcagaaggttgattttgggtttgaaaattccttccctcgaagaattcagggttctgcacatttcgctatttagagctgtcaatgtttaggtctacaatcagtatatcttccaagcgaagcaacctgactttcttgcaagcagaaaagagtggacacacgtactgattccctgattcaggctgtgtttagttcacgcgaaaattgaaagtttggttgaaattggaacaatgtgacggaaaagtttgaagtttatgtgtgtagaaaagttttgatgtgatggaaaagttggaagttcgaagaaaaactttggatctaaacacggtgtcaaatgatcaacaagaaaagttagcattgcttcaacttatcacagcctgtatctgcattggggaatctcatctgacaagtcacaaagttcatcatcggttcatgtttttatctcagtaactggtaatttacacaatattttacatatttacatcgacgcaataaaaccgtcaaaacagaacaactctagatggtgaataaacccactaaaatatctactcctacataactatatccaaccaaattaaggccctaatttggattgcaaaaacattcagatacaactattcagaccctgcaaaatcaggaaaaattcccgggtcccaaaacaaagcccaaatgctatctgattttttgcaatttcaaaggggtactgtacataaccacgctgacacatatcatccagtgttcatctccatctgaggatgatgttcaggtaccgggccattgatgcaattctgcactggatgatgcctttcattgccaacacttgcctgcatcagttgggcatcctgacacccatcatttgcaacttcttggacagcttgatcaggttcagggttgctgtcaacaacaatctgaagtggtcttgattgttcagtggaactgctactagtactgcctccatgctccacatcatgaacacgagcttcctttgcgcatttggcgcaaattaccctattcacaacgcttatcaggagcatcagagcagagatgcagccactgatgatgaagaggccagagaaactttggagtgtgagagggtttgagtcactgctgctgctgctgctgctagggtttgcatcacctcctgtggactgttcagatgagccaaaccacttctcttcaatttttgaaccttcagtctctcctgtaaggttcaagatagctgtagagagatcatgcaccagtggagaacctagaggaaatacctgaatacaaaaacatgatgcaaactaattagacaaaaaagaacatattgaatttctccatgtaagcaccacacatctgaatgtttttcgagaacacgcaaaaactttgcgcgatatactaattgtcaaaaagaaaagaaaattgaagaattctgaatctaccaaagtgaacaagattgagaagcttacaaaaccaaatccgggggtcttgtagaatcgattaaccatctgaaattctttctgatattgggggttggataaaaaagaagttaaataagggatctcgtcgacgatcgccgacactcctccattcatggacccctttctcagagcttcagcatactccttttgtgttccataagaccttaacctggatggcatgaaccctcgttttttcaggagtgagccaacaaatgatccattttgatatccaacatagtcaccggtaaggaggagctgatccaagcttttcaccgatggtcggagcctctttgcagttagcatggatgacaagcttgccgtgtagctctgcactaggatcagcactacaaagcaccatatcaccacaacaatttttgacaaagggctcttgataatttgacctgtttgaacattgaaagaaaccaagtaaacctctaatgatgcaattacaaaggagcaattttatgatctttggtgaggtaccacaatttccggtatgaaataaccatacccttttatactaaaatactaaaaatatacctaaaggagaccaaaatttacactataaatgtcatacgtctcgttacctttttcaaagtaaaaaaagatctcgttataataactatgtgctttatttatgtttggaaaaaatgtacaacaagctgtactctctccattcatgaataactagcactattgactatacaactgtcttaccttgaccataaattatttttaaatgatcatattgtaatgaatgaaaagttatatggttatatttacgatgcaacacagtccgataatataactcgttttcaagtatttattaagacaagatcagcgatccaaataaaacatgaatactaccggcgtcaaatatttaggaactggaggagtaaaagtagtaactatattaccatgagaaaacgtcagggtggagaaagcaaagtaggaagcagtgctgagctgcctcacacttgatccttggtactccgggtttcttggctgctcaatcatccacacgacgaagccggtgtagaagaagaagccgatggtggcaagccagagatccctggtcagtggcttcacgaaaatccattggattggcttggagtcgttctcctccggcaccagcagcgacacaccggacgacgtgtatggcatcgtgaattccacgaggttttctcggtcggctgtgatggtcacgtcgcccactgctgcgctgaacttctgaagataccataagacagaagatgtatgtcagcgagaattcttagaaatgtcattcaaagggacttggcgtaaattattagtccctgtttgacaattggcacatatatatatttttttaaagctagctatttctagttccagaaatctttatacctaaatatgcgaatatatttatagcaattgaatgagtcattttgtttgtattttataaaaaaatatacaatttcaattcattataatttgactttacaaactctagttttaaactgatttgttttacaatttgtatgctcttatgttgaggctgcgatattatatgatacttcttaattagatttcccaaggaacatacggactttactaattattttctataaaattttcggtaaaattcctcaattacaaatgatatataatgcggttaaatctaatatctcccatataaaagtgaaaaatataaagtgctcttttcctggtaaattggttaagcttatgcctttgatttgttttagttttcttatatttaatataatcagccttgttaggaaaaaataaatgttttagaaacataaaactattgtttttactactatctcaattttaaattaattattgttttagttttgtcttaattccaaatatgtttatctttgaacatcaactgatttctgtaaaatcgtaataatttaccacacatgtgaattatatattatgaaagtattattcaagttaaatctggaaacataaaccttattgtgttaactatattagattttagatttttagaaatattgatagtcaaagaccaaagtttgacttaggactacaaaactagaatgaacaaataacttaaaatggagggagtatagataacataattttataatttttaataaggtaccctggagagctatcatattttttacatgtagtaccaaaaattttacagccccggcatatttgtaaacgaaaattaatttgtgaataaaactttttatatgtgtttttaacaatataaaaacaaaggctgaaaaataaacttcaatgaaaaaaccctaaaatcagttgcaaatttaaggttgagatttcaaattttagctgataaacataagcataagtgaaaagatgaggcccctcgtgtaaaatttaggtatctcaagttaatttcttaaggactaaaaaattcaactaaaaataaacaagttcgtgggagtaattaaggcttacccctgaagatacattgcgtacaagatcatcatacgatccgtcaaagacgtggaactcgtacttccggcgaggccgcactctagccatggcggcgttgaagacgtcgatgcagtatccggtgatgttctgcctcttggtgtccgggtcgattctcacgtcgacgaaagcctggaacccggtcttccgcggcacggcgatccgcagcacctcgcctgatgatgaccttctccccgccaatcgccggcggtcgagacgacgaccagtcggagcgccggcgttgtagcggcggccatggggcggcgagccggcggcgcgccgtgctgatgagaatatggcggtgaggatgccggtgagcgccgccctggctgaagtgtgatcggcgccgaacggcggcgccgtcgccgttgcatggtggggtggatgatgtgatgacggcggaggagcaccgccggagatggggaaggtgaggatggggacgcggtggtggcggcgaaggcgggcaaccacggccgtatccgcctccgtggtgacgatgatggcctgcacctgtgcgttcttgataaggtcttcggctgcatacacaaattaacacagcccatgcacatacctttcgcataagttacacccacaaataagttattaatcaaaatatatgtcgatcgagttagtagctagaaaagatgtaacgggatgtaagaggtaatttttaagatggtactctctccgtcccaagatataacaatttttagtcttcagaatttgtgccaaaatataacaattttttcactaacattttcttcccaaccaatcataaccctccaccgttcacttttctcatctacctccactactcattcaatcacaaacctctaccactcacttctacctactttcttaagaaccgtgtccaacactaaaacttcttatattctgagacagagggagtatcatgttctttagtgtaaaatttgatactttaacatattgtacatcgagatactaaggtttttgcatattttcttgagtactgtgaagtttctctctatatatgatcccttaatttaccaaaccaaaataaattctgaattaactacatagtagcataatactctctccgtttcattttaagtgcaaccatgagtttccgcgctcaactttgatcgtccgtctaatttaaattttttttataattagtatgtttgttgttatgagatgataaaacatgaatacttcctccgtcctaaaatataacaacttttagccttaggatttgtcctaaaatataataatttctccaccaacattatcttccaatcaatcacaacccttaacattcactttttccaactagttccactaattatccaatcacaaccatccaccacttacttttacctattttcttaataaccgtgtccaaccctaaaactccttacggagagattaatactttactcgtgacttatgtttttaaattttttcaaaaatttttcaattaaaacaaacgatcaaagttgagcatgaaaatcatggctgcacttagaatgggacggagggagtataagggcagtcccaacccataacactagatatagtttccataaacaccacatcatcaagaaactagtactagacactactcttccaatgcaaacaccactattccatacttcaatttaatgctacttatctcacatgatatcttggatgttgggtagaaaccatgtctcatacaagacatggtttccttctctttcctcatttattcacttgccacatcattttttatcctatgtgacaacttatttaatgctatggacatcatcctagttattgggttgggaatgccctaacataacagtttagaatttagttaggttccttaattagtacatgatgatattcatttatgtgcatcctttatgggagacatgtatgtactgtcaacatgaactttttttataaatgaagttttgtttcgacgcctgcaacgatgcgcttgctactacctcgctcacgttgcaaattttctttgactttacggtggttacacacgcgatttattccagtttggctgtcaccatctgccaacgcggttgtatatatgcagtttaattttctatggtgtactgatatactagtactaaattactactaattaattaacaagtgtgaggggacttgttgggttctgcagggcatattgtatttttggctaggccgtatctgtaaatttgtactgattctaatcacctttagttttatattttgaagagaaatatactactccagctatatatagttttttagaaacactggtttgcaaagaagtttcaatggttttgctgaattgatgtccaagagatgtattcctaagatgggattatatataccataatatatggtcccttatacttataatatactattctatcgctataactcttcaatgacaaaaaagaacttaagagacctggtacaactaattaacatatttgggtttttctacaaggtcgcaattttgaattttcattggtgtgcatgttatcttcaacttacaatcttacacacaagtgaaaaacatcgtgattgcgacattttattacttatttaatttgaaattttctccaaactcattactggttttagagacaaagcctgtgggtcatgatacttctggtcggttccacagtctatttatacacactactaaaaaatcgattttccgacatggcgatatgtgtttttttcccaggcgggcatcgccctcagagacaaaacggccgcctacgatattagcaatcggggccatgctagccgtccatctgcgaagattgttttttgcaggtgaaccatataagatgccgcctgcgaaaactatcttcgcaggcggaccgtatttttgtgacggtattttggcctataggctagctcttgagtctggtagtgactctattgtccgtttttctcactctaatatactgtttatttaagttagcttaatgcatgctatgtctgaaatttgaactacgaaatcaaaaacgaaaaaaagatgcaactattttaccggcgcgtgcagctgcagcaccatcgtctccacgcgagtccctcacccgcagctccaccaccgcggcggagcccggacgatgtcgccgccggtggaagtcctccaccgccatggaaatgccggcgaggctcctcctcccctcgccgctcgtcatgtccaccacgacgcccaccctcaccggcgccggcgacgccgccgccgccgcattccggagagcgagcagcgagaggaaagcagcagcaacagcgagcagacggcgacgctgcctgatccccatgcaatgcgacggcagattaattctcgcacacctttgatcgagtgataaattagttgctgtgtgtacgtgaaaatgcagtgattatatatacacatagctatatatagctgttacagcagtggagaaatttcgtcgaaattttcggtttcgagctgaataggatgacgtttcaccagttcattttcttttacatggggaaagaatgtgtgatggcgttttacaattgttttttacgctggagacatatcactagattttgttagtagttcgtattttgatcaagtcaaattgaatttatatacgtacgatcttatcgatctgttagaaaaaaagatatgataatgtttgcatataacgtagcaactaggggacctgatattatatacgtgttgcgttgcatgtgtgacagctgggaactagaggaaattaaattaaggttcctagtcgaacatttttttaaataatccatttcttggtgtttaatggaacattaactcctataaaacatgacatacacaaaaccacatgatcaacaacttttgaccttaagatcatgttagtaaaaaataacagccattggatctagaagttacttaattaggggtgtccgtgttcggtgttcctatgttgtgctacctgaggactgatgaggtcactgagacccaaaaatttttaatcttttgttgttttaacctatattaagcacattattagcttaaaattagaatattatatatatactatcatatgtataatatttttttgtttgccactctaattacttattatctatttaattcaatcattaattagtcatccttttatcccccgcgcttctagcaacatagtgcatataagcatattaatgcataaatagcactaccttttccatcgtaatctttcttcatacggctatgattttttttgggttaattctcagagtactaagtgcgctaactataatttagtttatatatttttcacaatagatccaaatttattagcatgggaatgatgaatggtaaatgtctttcctttctaacaacctaactcaactggagcaagcacctaaaaatatgccactccatctctccattaattattaaatttttaaagtttttagaaagagttccaagatgtacttaaatcatcgcaaatatcgatcccacacgtaatatataaatatattttgaaactaatattttctattttaccaaaaagaagtttcgcagcaacgcacagattctcactggttatacttaatttgctcaaccacacccaagaacagtaccatgcatgttgcgtgagttcatgaaaggacggcaaattattttcaagaaagaagattttcaagaaagaagccagagggaactagctagcgtggaattcttacaaaatccctcatatataaatatgattatatttgtcctgatctgtggtcattgccttgcagcatcgctgtcattttcagaataacatacgacataatgtacaagaataaattactaaactataggatttaatgaccggacacaaacatttatttaccgacgaactgttagtattttctcccttgatgatagtatttcaaacccgccattctaaaaagtttccccgaaattgcaccatatgcaagaggaatgttttgaatattctcaccacgtacgatttttataatagatccaatgtattgggtttttttacaaccaataagaaaatggattattgctctagctaacaatctgatccaagactccaagcaatttagtactataaaaacgaaagaaagaagtttcttggaaatgtcaaataattggaagaactgttttatatactcttattctagttccgaaatatatccagtaatgtcaactatgaagctaaaataaaaacgttccacatctcattggtcaatctgatctgaccgtgacaggttccacatctcatgatctgtcattcaatctctctcccccagtttgattttatctgtctataatattgatcaagattcgaactgtcaaagaatagcaagaagtaatcagaattcagcagtctgtcttccctgaaacttttcttcataaccaagtcttggttttcataggtgactgactgaatgcatgacttcgcaggcactggacatgtgtgtgcaatttctcagaatctctagacttctggtctatagttccatggtcaggtctatagacttgttcttgcagttctgattctgactttctgaccagtttgtgatgcccccaggtacatatatatagtaagaaaaatctgggtattgatcaatcctacagttaaaatttcaaggtatcattcatctggtaggctggaagcaaatcagtagttttttttatctgcagagaaataataatacaagagtagatatattttttggggggggggaaacaagagtatatatattgcctttggaaagtagaagtgacaattacatttttgttaaagaatatcaattgcaagtgataaaacataagacgtgatcagttactaaactatgcatagaactatctaatcaacacggcctgcggtgaagcatggctagttgctgaatgggaacatcccagactaatttctgcagcagattattggttaatacctacaataaatgaagagatggagcattcttgtttttatatttccagagcacgctcagcatgaccatgtaattcatactgtctgggtggaatttgtaggcacagggccattctgaattggtcgaggcttttcgccatcagcacgttcgacacttccatggatatcctgggaact

SEQ ID NO: 4672 - DNA, 68532 bp, Oryza sativa
gatttcatcggaatataattaatgtagcatgggagaatgtgtgcatgctaagggtgtaattggcatggtgttttaatcgatatatacattgtgggagaatgtgtgcatgatgtcttgattgatgtgatttaaattatcattggccttggcgtataaacatatatgatgatcaatttgggatggaaggagtaatgaacaatgaatcccagttctagccaggcaaaatattcttagaatcatagaaatggatggggtattacatcttcgattaaatttcacaaaactacagatactatgaccaaattatcacaaaactacatatttaactcagtgtatcacaaaactacacatttaacatcaaatttatcataaaactacacatttaagatgaagtgtcacaaaacacatgtttagtaactaaattatcataaaactacgggtttagaaccaatttaatcacaaagtaataatgtttatagctccaccataacaatggtgctagggatttaaactccaaaagttgtagttttgtgataagttcaatattaaatatgcatttttgtgatacttaacctaaaatctgcagttttgtgataaatttggtactaaatgtgtagttttatgatataactccttaaatctgtagttttgtgataatttggtcaaaatacctgtagttttgtgaaatttactctacatcttctgataaaaaaaacacatgttaaaacatggcctgccctgctatcattttttttcttctgttactagttcctgccaagatttcattcaagtgacagtatatctgctggaacttgacctctctcattttcaccctctctgctagttgtatgggggcattaaaacattcacagtggtgctgttttatcttcattctcgaatgtgactaatttcgtttatacttatgtgtatgaaataacttggtgtgtgttcctattgcagttgcaagcttggtgaaggtaagataattctctgcgaggaaggcactaagcacaagttgcagaagcttcagcttaactatccaaggttagcttgcaagattgtgtttgccattgaaattggcattacaaggcacctttatgccgactctttacttactgccttttaaagactatcagagtcatcttttgggggaaaattcaatttgaatcatttacatgtttaaattatacatcgtgtgtattgttccctcgtcaacttaactttttgtttgaacgaattaaagcctagaggttctagttttaagacttggcacttagctaccccattattagtgatccacttcggtcattggtggagccttgacgtgagcggagaacttttggttaatctagctggatgaaaacttaatatgcacctcttttatcatgtaaaactgtactgatgattatttttcttgtctggcagtgacgatgtaacttttgccctgaaggaatccccagatattccatggttgtccaagtacctgtgaagtttacacttgcagcggttgtactttcccagcatttcattcatctactcctggagttggagagcaacgatcgcaactacttgcccttgatcagcagtaagtttgaacatgttcccttgttcattttttcgtacctttgcagaagtttgaaggccatctagtattttcttgtcatgaaccatactccacactggagcatgcaacactaacaagcctagcgcatcttctgcagaatctcggaatttatgtgggtccaattgttcatcttccaaaagatatcgactcgaaggatgccgctgcaacaaaatgtaaatgcagtgtcgcaccaggactgtaacatatgtatgattcgaaggagattgtaggtcgccattttattttcgccaatctgttgttacccaagaaactttgctctggcagtgttgttttctcttgcatccctctgttacgtactcccttcgttccaaaaaaagacaaaccctggtttccgtgtccaacgtttgaccgtccgtcttatttgaaaaaattatgaaaaaaattaaaaagacaagtcacgcataaaatattaatcatgttttaccatctaacaacaatgaaaatacgaattataaaaattttcatataagacggacagtcaaagttggacacgaaaactcagggtaaaactcagggtttgtctttttttttttacggagggagtacgtgcgagctgattgtactactgcacatttgtaactggttacctacaaatcatcatcaaattatctgttgtgaaacattgacaaatgtatgatggattgatgatatctgttaaaacattgacaaattatctctttttcgcttgtgaattcccgtgggatattaatctctcgtttggaattcacgcgggctctctcttcttcgttttatagcttggacccatcgccttcctctcgccgccggcgagcccattaccaatggcgaacgcgagtgcaacgcccaagacccctcgccgccgccgccgcgtcacgttcctggctaggacttgccaccgcctcctccgcttgctcgccactcaccgcctccgccgcggtggccatggccttaactccatcagcgccggtgacgactcccctccctccggtcagccgccgcgaggccgggacgcggaggaagccgaagcgacccaggcggcggcggcggcgcaacggcggcacgaggagcgacacggcgacgacgacgccgccgccaccgaggaggcggaggcggccgtggcggggaagtactgggcgcagcggcgcagcctcttctccctctacgaccgcggcgtgcggatggacgcggagggctggtactccgccaccccggagcccatcgccgccgcgcaggccgcccgcgcgccgccgggatccctcgtcctcgacgccttcgccggcgtcggcggcaactccatccagttcgccgccaggcacgccgccgccaccacctccatctctctccatttgcaacctcgctcgctaaccaccccgtctcccctgcaggggttgctacgtggtcgccgtggagatcgacccccggaaggtggagctcgcggcgcacaacgccaggatctacggcgtcgacgacatgatcgagttcgtcgtcgccgatttcttccacctcgcgccctccttgaaggtatgctcatccctttactcaatgatactgaaaaagaaacaaaaaaaaatgaagcgtcaatgcttcgcatttaggttcaactcctaaatttagtttcaggagttaagtttgaaatggagttctgaagcggcctaaacccagctctatctccctagtttaatttgtgagaaagcttcacccggcttggctcctattttaggtgaagctgaaactgttcgactgagagctatgccaaacatgccataaatgacgaaacttgagcagagctccagttcgtttattttctcctctaatttatttactctagttgtaaacttgcaataacgttcggatgtgcgtttctgaatttcaagctggatcaaagttttttttaaaaaaaatggattctgattgttcttgttgcattgatcaggcagatttggtgttcctttcaccgccatggggagggccatcctacagccaagctcaagtttactcccttgatatgctgaagccaagagatgggtatgttgttttttttttttgccgatttcctgtcatatccacaatatgaaaaataatgtgtttaatcatgcagatttacaattttccaagctgctcaggaaatatctccaaatatcatcatgttcctgccacggaatgtggacttaagccaagtagagcaactttcttggttgtcttctccccccttggattttgtggtacgatctgtttcataacctttttcttttttttcatcgagcatttaaaactttcaatatgtgaaaaaattgacatggtattcctgttgttttatagagcgaagagaattacatagaacatagattcaaagggataaccgcctactttggaggtttggcacaagaagttctgaagcaaggataaatttctttctaaggtttcaatgtctagcttcccctgaaattctggtctaatatcttgcaaatgccccttagttggtgtctcaacgcaagagaagctaaggcttgatggtagcccaacgtttttatttgattcagtatatggaaggtatatcccatatttttggttcactacaaggtctcaactgtgtcggtggcgtggtgggagatttggtattgtgctgctccacaaatttggcttcgattatttggcattctggccttttagcaaattgctaccatcattgtcaagattgcccctaactccacatgcagcgaagcagtcctatctcgtcaatgctaaatttagaaaatctataagcaaccccaatttactggagaaaaatacatagagggaaaaccaccatcactgcttccattcccttcagcaacaaagaaatagttcttttgggagatggatttttgtccctagagagaatgtccaatgtcgtctaaaaagtcattaaaagagctttaaaaaaatttggtaagatagaacttttaaatttgacttgtacaattagaattttacaaaaacaataaaattaccgtgaattacgtgttctatttgaagtcaaatttattatttttgtttctgaattgaccatgagtttattattatacagagtcaaatctattgtttttgttttcagagtcaaattgaccgtgaattatgtgttctatttgaaacctgtatgtttatggtgtggtaccatttttattattttttgtgcgacctaaaaaaaccccaagggaatggcccctcgagggataaataaactttcccattcttttgtcaatgtaaactttagaaaacctataaacaacctaatttacatgacaaaaatacaacaagggaaaaaaaattaacaaaagaatcaattcctccttccatccccacaaaccccccaacaacaaaaaaaacaaaaatgttcaacacatatttatatattcactaatgctaactatactaacaatttatataatcgtcatcacaagcggctcctgaatgcgtgagttcctctgttgtagccgtagtaggagaggtaccaccggacgaacttcttgagccccatctcgaggctggtcgtcggcttgtacccgagctgctccctcgccaggctgatgttggcgtgggtgaagggcacgtcgccattgccgggcatctcgacgacgtgcctcctcgccttcaccatcaggcacctctccagcatcgccaccagcgccggcaccgtcaccggcgacgtgttcccgaggttgaagatcctgtacggcgccgccccgcgcttcctcccgcccccgcccgtgctccgcccagccgtgtccagcgccgccaggcacccccgcacgatgtcgtcgatgtaggtgaagtccctggtgttggaatataaagtgaattgtccatcttttctcaccagctcaagcttttgagttgaactagtcggtgcatgcaactcaatatggtatcagggttggaaatttcggaacgaaattttcgaaatttgatcatttcagacccctccgatacgatattatttcagctgaaatttttaaatttctacgtgaaattttggtaatatttgctcaaattcaactaaattttgttcaaaatttcggaccgaaattgaccgaaaatttcagcatttcggtgaggcccgatcaaatcggcctaaccgataggatcaaccctgactggctgactcaatatggtatcaaaagttagaggtcttgagttcgaattctggctgaattgcagcccacttctattccatgcaacttaatacctggcgatgtcgacgtgatcacggccccggtagacggtgaccggcttcccctgcaggatgttgcgggtgaagaagaagtaggccatgtcggggcggccccagggaccgtacaccgtgaagaagcggaggccggtgatggagaggccgtagatgtggttgtaggtgtgggtgatggcctcgccggctttcttggtggcggcgtagagcgacgccggcttgtcggtgcggtgcgcctcggagaaggggacggcgtcgttgagaccgtagacggaggaggaggaggcccagacgacggccggctgcgggtcggcgtccttgcaggactcgaggagggagacgaggccggcgacgttggagcggacgtacgacgaggggttctccatggcgtagcggacgccggcctgcgcggcgaggtggaggacgtgggtgaaggggacgacgtcgaacagcttggcgaggaggcggccgtcgttgatgtcgccgtcgacgacgaacacgccgtgcgagcccaggagggcgcgccgcgccttcttcagcgacgggtcgtagtaggagttgtagttgtcgatgccgacgacgccgtcgccgcgcttgcggagggcgagggagcagtgcgcgccgacgaacccggcggcgccggtgaccagcacggacagcccggcgccctccgccgacccgggcggccgccgcggcgacgccgacgccctgatctgccgctcccagtgcagcccgccccacgacgccgccgggaagtagcgcgacgacgacgccgcggcgtcgccggcgagggagcggaagctcaggtacgtcgccgtcatcgccaccaggaacagcgcccacaggaacatggtccccgtcgacgcgaagcaccggtgaacctgccggctcatcgccgccgacgaccgctgctccaccttcaccttccccggcgtcgacgggtacatcacctcggcctcctcctcctccaccaccacccgcatcctcctcctcctcctcctcctcctctcctcacgcaaccaaacaacacaccatcgattcagctcgaacgagatcaaatatttttgagttccgttgctcgaaaaagaattagaattttgagttcttgctgaattttggtggttttgttgttctgagaaatgatttttttttgttttctttaatttttttggccgtgggaaatgggcgggagggattagtggagcgtgcgaaggatgttgcataaatagcggtggttttgtgttcggaggctcggcgatgatggtgggggtccctgtaatttagcactgtttatttttaggccatatggtataacatttgaggatgttttgaaaatggcaggaccatcatccattgaatgcattagggcatctacaaaggtagagtcagatatgagctctacgttatctggagactagcatcctacaacagttagagacaatatggtctcaactttttcttacttttattttctttctttcaccaccatgcaacaaaatttgctctaataaatgctaagagtcgactctgagctgttgtcatgcataacaaccatactcctttctctttcttccatgtcatcaaacttacttgcatggcaatagagagagaccactaataaacaccgttgtacatgcccttatgcatgagatttgcgaagaaatagggaacatatgtatcgaggtttgtctagcattttaatcctttccttatgccattaggccaataccatatgccattagttggtttcagttttgtagtataacctaaacaaaacccactatatttagacttggtgccaatgcaatgatgtactccatccgtcccaaaaaaaggcaaactctgggtttccgtgtccaactttgactatccgtcttatatgaaatttttttataattcgtattttcattgttgttagatgataaaacatgattaatattttatgcgtgacttgtctttttaatttttttcataattttttcaaataagacggacggtcaaacgttggacacggaaaccagggtttgtctttttttgggacggaggtagtacctattatcatgtcatgcgctgaaaagtgtagtctgccgtttccgagcatccgagtgcctctcttttagcacatcaaaatgtgatggaggctagaacaaatttataaaaccgttgaacttagtttttttacttgatatatgtgttaagaaacttagagcttgaccaatgaagacatgaaccaaatatatttattgggtccatcaccaaacttttcatatatggatttgcactactgtccaaagaggagaggaattactcatttgtatacttgatgaaaggattggaataagagaaaataatctcacctctaaattttgtatctccactttgctcttaaattatacaaccgtgttgtactactctctatattatcaagcacgaagctataagggagaccaaggtagaagaaggaagagaaatctcttatacgatttgcactttaagaattggactaagggtgtgtttagttcacgcaaaaattgaaaatttggttgaaattggaatgatgtgatggaaaagttggaagtttgtgtgtgtaggaaagttttgatgtgataaaaaagttgaaagtttgaagaaaaagtttggaactaaactcggcctaaaaaatgaatttcttgtatcctccttgtttcgttttggtgccttctgacgactagccgattcgattcaccggcgactagccgattggggttttgggtgtgctccatggtaaacaagaagtcgatgttgcatgtatggagcagagacgacgtcggaccgtgccatcgaacgatcaggccatacatgacggtggaaatccaacccaacccaaatgcaacggtagaaaaactgtactgtacacctctccgtgctcagcagcatcgaggagtggacaagatgagcccgggcgtcctcctcatcatcgccatcctggacgtcgttttttttttaaatgagggtaaaagctttgcctcgtatattaatagagatggagaaaaaacaaaacaaaattagaaagggaaatatttacagggcaagccaaaagagctaaacccgcaagaattggccaagagactaagtgatatctccaaaaattccaaactcttgaagctttgaggctccagccttgacccaggctcgagcctcctccttgatcttggcgatgatggaagccggcgttaaggtggtgtttcggaagattattgcgtttcgttcgcaccaaacttcccatgaaaccaagatcaccagtgctcacaaaggaaagcggggggtgttaggagtgtctaccactacgttccaccattgctccaccgagtcgcagtccaccgagtcgtcttcttcctcttcggcattctcaacctgctggtgcagaatctcctcagacagacttcagagttcaaaccaaattggccctaaattttcggcatatcgagtggtgtgctctgacgctcagactccgcttgttttacacacaggggttcagactttcagttgcccctctgcagcaacagccaacaagcccacccttgcagaagctttgtcgctaggaatctagtttctgaacttttggaaattcggaatgtcgtcgagatgaacaacacatctgcaatctcacctccctcttgcagagttttagtgttctccattttttatttttgcccttgtctagatccacatgtaccaaatctagaacatgaacttcaatctgagtatccagtaaaacctatgacatggaccctagccaaattattcatgcttttaccaaatttcgagtagacttcaaaccgaaccacactaaattttgagaaaattgcatatctatcattgcataagttaggattcgctcaactactatcacttaaatgggcttagctagaataccataattaaccaatgtgtatttgctaaaatactatcccggacagaaataccctggatcttcttcttcatccctccctccaatgactgaataggtcgccagtggccaccgccggctccactgccgcgccatcgctcacgtcgtctgggctgggcaccgttgcgcatcgccgccccaccctgactcgccggctgacgacaacctcgccccgacaccttgctgccaccggcaattagggcgttgccctccctaccatcggtccatcctggtatgtgtcggcgaggcagcacctgtgaagccggcggtggccgccagcaacctcttcaagcatgggagggaagaagatgagctaggggcatttcatttctagatagtattttagtaatgatcgattgtggatggtattctagcgaagtccattttgaataattgtatttttatccagtagatatgcaattttctcctaaacttttggcctatctggacgtgtcaggggatggggtgacacattgatgaatggtgtgttctgactctgcttgttttacgcaggattcagattttcgttgctcccatgcaacaacaagcccacccttgcagaggtttgtcgctagggaatctgcaaaatttgtttctgaacttttggaaatccggaatgtcgtcgagatgaacaatacacctgcaatctgcagtatcagtatgctccctcttgcagagttctccaatttttttttactgacatcgtagtttgatactctgtgcaaccataagtttacgtgaccaactttaattgtacgtattatttaattttttttataattagtatttttgttgttatgagataataaaacatgaataatactttatgtgtgacttatgttttaaagttttttcaaaaaaaaaattaaataagaaggacgattaaaattgagcacggaaaaatatggctgcaattaatatatagccgcaatcagtagtttcattgcattgcgtacatcagcatgacgtcatcacctaccatctcttcttctctacgacgtcgcctcgtataacaacaagctcttcttcttctcgtgttaccatttgtgacaacaatggacacgtcggcgtccacctcgccgccgccgccgcgctctgtgctcagcaccatcgaggacaagatgagcccgggcgtcctcctcatcatcgccatcctcgccgtcgtcttcttcctcttcggcttgctcaacctgctgatccagaacctgctccggatgcgccgggcgcggcggcggcggcggcgcgtgggcgacggcggcggcggcgtcggcatgggcagcccgacggcgttccagggccagctccagcagctgttccacctccacgacgccggcgtcgaccagaccttcatcgacgcgctccccgtcttcgtctaccgcgccgtcgtcggcgccgggctccgcaaggacgacccgttcgactgcgccgtgtgcctgtgcgagttcgccggcgacgacaagctccgcctcctcccgacgtgcggccacgcgttccacgtgccctgcatcgacgcctggctgctgtcgcactccacgtgccccatctgccgcggcagcgtcctcgccgccgccgccgccgccgacgacgacgacgactcgtcggcgtccaccccggtagcgcggcgcgtgctcgactcggagagcctcggcgagacgttcgccaacaatggaggtggggacagcgaggggtcttctcccaaggcggcggcggcggaggaggaggaggtcgtcgaggtgaagcttggcaagctcaagtgcatcgacggcaatggcaatgccggcgacctcgccgtcgtcaaaggcaccaccaccagcaacgatggcgacatcggcggcggcggcaggggagatcttggacagagacggtgcttctccatgggatcctacgagtacgtcatggacgagcacgccgcgctccgcgtcgccgtcaggacgcccaagcggaggccgccggcgaggtcgaggtctcgccgccggctcgcgctgtcggagtgcgacttcgcgggctccgcctccaagaagggcgcgtgggaagcggcggtgatagaggccgcgtcggcggacgccgcggcggcgaggctgaacagggacagcttctccgtgtccaagatctggatgacgtcagccactaggaaggaagatgtccggacggcggcggaattggccggcggagggaggcgtgcggcgtcgttccggtggccggcgatggccgaggccagcaagaagcatggcgggatcaacgacgagcgccgcgacgtcgaggccggcggcaatggcgactcgtctctcgccgacgagcggccgtcgttggcgaggacggcgctgcagtacatcgtcggcggcggcggcggcgggcggcagcagagcagccgagttggaagccattcttgaaccatttggtttgcacattgaacacagaaaaaatgtccccttattttttttcttttcattgattttttccctacttttcttttcttttccaaaatgattatagtgattgcaaagcaacaaatttgtgaagaaaaaagcaattgaagcaactgcatttgtgtgttagtcatggtcatattaattagttaaagagacaaaaggcattcttggtcttcattggtttgaaatatcagattgtagtgtaacataagccaggttgatttgcttttaaagttcagcagaataggaggaacttggaagacactcatgaacaaaagaagcattggttgtttggatttgtcaggttgacagtgatggaattaaatcaaattagcaaaccttataacaaccactgaagattaatatttgtatcatatgtggcaatataatttgtcttatgcatcattttaggatggcacgaaatttttatctgaataaacaagtgcagaacacttggcttagctgtctcaccactgcatctgatctactcctaacttactaagcattcttggtttaaactgaaccaagaactggctaatacagacaaagtgtatacaggcatggcaatgcaactatgcaagtgagagaagtggattctctctaattaatgacataaacaaatcagccagtcaaatccctcattaaagaagctgaacccagtgtctgtttgcataattgctactactactactaagcatttagtgaaagtgctggcaacatttgacttgcaactgcctcatcagggtctggtgtgcatgtggtgagaaggtgagaggaagcttgattatcggagtttcaaatacaaatccatttttcttgccatgttatgcttgatttcatgagctgttcttctgttggagctgagtttctgtttgagtagtggactcgtgtgcaagatagtaatactgcatttacaggctgttgcaacttgcaacagtacaagcacttcgctccttttgtccgcaggctgttgcaacagtacagatgtgcaatactacttcactgtgatgtaggtgcacaaatttataagagtttaaataccaaccttgatgatgctgcggcaccgtcagatttttgtctgtttagtcgtcaggtaatatttttggcagatcaacaatttcattgtagcatggatggaatgaaattggatctccctattaaagaatggtggctgaatgcctctacctctgtaccttccctgaaactttatttcagaagatagaggttcagacttcagagttacaattctaataataggtttgctaaaaaagcttaagctgacaagaaaatgtggatgatataaagtagaactttcatgaacttttgtagtagcttgcgttgtgacaagtcacaatcgatatattttgcccttttcaatctaagaaccttcttgtaatatctgtgcatagaatatatttaatttgaaaggaaagtaaaacatagaattgcagaatggtagtttgtattgtgcatttgtgccacctaggtcactaagctaagctggcgagtcaaattttttagagagcagaggaccacatacagctacagtaaagcgaacttttgaattcttttcgcttgttttaacccaagttcacggtgtgttcatgctggatgcatcattagttcacaaatccgggtgagctaaagctgaatgcgaccggtcaatcggcacaaaagcatgtttggaattgaccatgttaggagaacaggagcaaagctagcatgcatgcatcatcttgagtagatgacaaggttcggacacaacaagcaaagcatgagtagttcagtattagcaggtctgaagaccatggagaattggagatagaagaggtcaagaaaaggagaaacaggtctgggccatcttcagaaaaaaataatcaaatataagtaccagtttacattacacaatatagaagcttgagagatgatcagtgaagtagcttaaaagattggagatttaagactgctagttgcacatgagtagttgaggaactgtcagcaattaccatgacaggttggagattttaagtttgaaatgctatccaataaacaagtgtggtcactcctgcgcatcgttttttttttaatatagtttgatattaaagtactgaaacatagttttagttttttttttgttagacaagttgcaagtgatgaacgtgagttttctggttttcttccacaattcctgcaattaaattgattcatgtataaatccagcaaagttaatgcataatatctactccacgaagaccctaaaaatttctaccattctgacagactcgacagaggttctctattgaggtaatattgcaaataaatgcttgcataaagaacagaactgatgcaaataaaaaggttctgcatattatctttttctatcgaaaaatgtgctccattgtcttgcccttcactggatttctgtacaacaattttaaattttcttttgaaaaagaattcatggattgaagtgtgggctactagatttaccagtggttaatcactgacaatgtttttctgccttgccatggcaagattgaaagaacaaaatttataactaagttattttcggtttgttaccctttacttacaaaatcaaataggctattcagataagcatatctggtgtgcttgtaaactcctgcatcctccgaaatcaaaataaaccaaaagaatccctgatcaaagtgatcatcaactcaatgtgccatagcccataactactactcctccgtttcaggttataagatgttttgactttgatcaaagtcaaaccgcttcaagtttgacaagtttttagaaaaaatagtaatatttttgacctaaaataaatttattaaaaatatacttaattatcaatttaataaaactaatttagtaatataaatatcactatatttctctataaacttaaaacagtttaactctgaccaaagccaaaatatcttataaacggagagagagtactggtactgttcatcatcagttgagcctgcaagctgcaacaacccccttgtcccatgctgccgtccccaatctgaacctcatattctcatcccatctgtgcgatcgatcgatgcacgcgctacatcactatcatccttcgaccaaatccccaaagcgtcactaatcctttttttttttgtcggcgtggatggagtcactcgcttactcacccctgcactttgacaactgacaacatcaccaggaaagagaagattatggccccatttgatttgtacgaaaaatattgaaaaattagatgattttaattctataagaaaaatagtacctattaaggtctttgaaacaaatgattgaattatttcctttcaaatccctatggaatagataatactatgaagagattttaaagaaaagttagcaagagcttcaatatgttgagtctatttttctcatctgattcctaagtttttcttttagcttattcaaataaccatttatgtattttgcaatcgtttattttgcagttacattcatgtaaaaatattacgtttttcctgttcttcctatttctttttttcaatcttttgcttcaaatgagccataagggtcccgtttggacgataagattatagattattctaactttgtgataacaattgtttttccattacacgagagacgcacgtgcacacacaccactacataggtaacaccatactcatacacccacgaatgtgttatgcacatgtttaaaggaacagaaatcaacgtcacatacttggactctgtggccttcacttattgggaggcaattatatagtaataaaatattagtattccgcgggagaagagaaaggtccccattgtttggcttatttcctaataagccaaaacggcttattaggaaataaaaatgaaattgtgggtaaaacttttgtaaatgtgttttttttgacttaaaagccaatttgaaaaaaaaaactacgttgaaaatatgtcaaaatcaatcttaaaattaagcttgaaaatttaaaatttagctttttctttggtttattaggccatccgatgaggctgaaaaaataatccaagacggcttggcgatgaacagctgcaaccagtagcagcaggcaggatgttccttcgtacttccagtgtagaccagccttgttttatctgggcctcttcggcctgggataagcccaggttctgctcctgcaggcaggaaagccggatgttccatacttccattctcgaataattgacacggttaattatgatcatgtcattttaaccgcattcttttaaaataattatattaagtaatgaatagaagttatatttatgattatacaacgctcaataatataacatgtttaaagtatttattagaaatgaaaattagttaatgctaaaactaaaataatatcgatatcaattattgaagaacagggacgaaatcatccagacaacactaatttacactacacaccacctttgggaagaaatcaggccagaggaaggtgtgctctgctttgggatcctttggaacaacttacacttgacaccaccttcccttcccttcgttctgaagcccttagagaaactgaggcaacggcgaaagatcttagggctcctttggaacaaagattcttagaggaattcaattctataaaaataccttcttatgtggtcctttgtatcaaaatccttgaaagttcctttggattaactaaaggcttcatcttttttgcttatgtttattcttatcaaccaaaatttaaattttcaagcttaaacttggagtttattttggggtcttttcatcatagtttattttttagcttttttttagaacacgtgtataaaaaatttatttataaattagttttcgtttgcaaatataggtattttaactgatgtggctttaaaaacataggtatttgaaccaaaggtccagtctcttagaaaaagaatcatatatatcaatcggttcatgtgtttttcctacgctccacctaactaatgattcccataactttcttattttttttaatctatagggacttctttaaaacatgggaatatgaaaaacacatgattcaaatgtcatcgcaccttgaatccaatggaatgaaaaatacataaacccgttaggatgaagcataggaaaacacataggatttagagatgtagacagaaaggaaaatttctaagaatttggagttaatgctaggaatccttcaaaattatcatgaaacatgtcatttcatagaaatttcaaaggagttctacagactcaatgctttgttaaaattagtctcataaaaactttttctatatgattcaaatctttttaagtttctctacttttcttttgttgtaaaggagcccaaagatttaaggtgataagacactttaattctgtatttttttttcctatccaacattataagaagggaaaattacaaaattcacctcataagtcacttgaattttgacattccacctcataagtcattttgctgcaaatacacaccttctatttagtttattgtaaaaatcacccgaatgcacacgtgcgtaaccgaatcaattcgttatcgctgatgtacagttaccacaggctaagctagtcaaatcaatcgtgtccaagtgcttgcattagacttagggggtgtttagatccaggggtgtaaagttttggcgtgtcacatcgggtattatatagggtgtcgtatgaagtgttcgggcactaataaaaaacctcatccacgcatggcacgggtcgcgtactcgcgtggccctcctcgctgccgtccattagccgccggaccttgctggccacctccatgtaggggtggtaatgggcccaacattttggcgtagaaattatgagggttgggtaaaaaaaggtttggctgaaatttagtagttttttgtgctaaaaaaatttaagggttaagatggattgtgaaagaacccacgggtcttgacccattaccacccctacctccacgcgtccgacaacaacagcggcgttcggcccccggaggaggcggtccacgcgaacgccagcgcagaggatgtccgccacatgcttcgcgttcgccgcctgctccgccatcaccggccacgtcagcatcggacgaacggcggcgaggctctccagcacggagttccagccggcgtgggtgacgaacgcgcgctgtggcacccagccacggacgatcttcccgtcgccgccactggaccggccgatggcccagaggcaggcgtggccggagtccactaccccgtgccggccgtgcgcgagcgtgccgaacgacaattctgtacttttttttattgagtgatttctatagttttcttgttcttttcgaataatagtattttgacacgataattctgtactttttttttattgaggtcctgtttggttcccacgcaaaaacttttcaccctgtcatattgaatgtttggacacatgcatggagtattaaatatagaagaaaacaaattacatagattgcatgtaaattgcgagacgaatcttttaaacctaattacgccatgatttgacaatgtgttgctacaataaacatttactaataatagattaattagacttaataaattcgtctcgcagtttacaggcgaaatatataatttgttttattattagactatgtttaatacttcaaatatatgtacgtatatccgatgtaacgcaccaaaatttttttatcccagtacaactaagggctcgcgaaaagaaaatttttggcgtcacatcggacgtttgaccagatgtcggaacgggttttcggatacgaatgaaaaaactaatttcataacttgcttggaaactgcgagataatcttttgagcctaattaattcatcattagcacatgtgggttactgtagcacttatagctaatcatagactaattaggctcaaaagattcgtctcgcgattttccccctaactgtgcaattatttttttaatttatctatatttaatactccatgcatatatcaaaaattcgatgtgatgtttttagaaactaaatggagcctaataaacagtgcctggcgtgcagcgatccggtgcaggcgtgcagcagcagcactgccagtgccagatgctgagatgggggaagtataaagtacaatctccccattcagcccaatcatgcaatcttcatcttccatcgttggattgagaaatagacgtctaaaattcgtccacgtcaccatgagttaaaaattaactcgcagattcaccgtgagttaaaatttaatgagagttaatttttattcaaacttaaaatgacatgacgtcgatcactcacagttaccactgtgtcgacgtgttctacagttcgctcaacacttgccactgccgccattcgccgagctcgccgccgccgtgccgtcgccggcgacgacgtagcttgaccgcagctcgtcgaccagccgccgcagcgcctcccgcgacgcgccgccttctcccaccgccgcgcgcgccgcctcccggacctcctcggccctggcgcggatcgcgcggccctcctcgccgccgtccatcagccgcccgaccttgccggccacctccgcgcgcccgacgacgacgccgccaccgcggaccgcgcggacgccggccccgatgatgtccgccacgagcttcgcgttcgccgcctgctccgccatcaccggccacgccagcatcggcaggccggcggcgaggctctccagcacggagttccagccggcgtgggtgacgaacgcgcccaccgccgggtgggacagcacgcggcgctgtggcacccagccgcggacgatcttcccgtcgccgccggcgtccaccggcggcgaccactcgccgccggaccggccgatggcccagaggaaggcgtggccggagtccactagcccgtgcgcgagctcgtcgagctgcgcgtcggggaggtgcgcctgcgtgccgaacgacacgtacaccaccgaccctggcctcgccgcccgctcgtcgagccaagcgacgcagccttccgggtcgtcgtcgtcgtcgtcgtcttcctcctgcttcgtctccggcgactcgccagcggcgaggaacagtgggccgacgagccacgcgcgggatccggggtggtagaacgactcgaggatggccgcgtagtcgccgtcgagcgcggcgaagctattgacgaggacgccccagctccggtggtcccagtcgcggacctcgtcgtggaggaactgcgtcaccgggtcgtcggggttgcccccctggatcacggcgtccgggacctcgtcggcggtgatcctcacgtcgtccgggaagccgggcacgtggaactccgcgccgccctcgacgccgacgtgtggtcgcctcgaggcgagggtgaagcagagcgccagggagaagggcgacatgccgttgaacgtgaggcggcggacgccggcgtcgtccgcgactcgctgcgtgaacccgaggaagaagtcagagacgagcacgagcggcggcggcgacgggagggacgcgaggaactcggcgaagggctcccggagcagcgccgtggcgcggaggaacgccgggaagagggactgcgacgggagcgcgtcggtggactcgacgccgggcgggatctgcgggtgcgccgggaacgggatggcgacgacgcgcaccgacggcgacggcggcaggcggcggcgcgcgaaggcgaggttggccggggtggtgacgagcgtgacgcggaggtggtcgccgtggtgcaccgcgagcgccgcggcgaagtggaggagcgggatcatgtggcctttggacatgagcgggaagacgacgacgtggtcgcggccggccagggtggcgccgtcgttgccgccgacgccctctgcggcagggcgtgtggcggcggcggcggaggcgggcatggtgttcgacgaagcgttggacaatgggtagtttggtgagctacaataattggcaacaaagtgcagtaacgaaggctttatattgtgtaacttgtgtttgcatgcttatggttctatacttctctataattttatatattatgcggtgtttgaaaaggagggattaaactcacaaaaattttagtctctatgggaggggcaaaagctgtctagtctctactttccaaacaccatcttagatgatgccctatatggcaatatttcatatgaatttttgttaatattatactataaacgatggatagaaatattttgaaataatgtgaaaatgacatggtagatgaggatttgatatgcttgcatattagtaagctttaaaatatacccactttatcccattgcataataatttctagagtttagattttggttgttctaatggtagatacgcacaaatgaatatgcatagtgatagtgttgacaaactttaagttgctcaactgtaatgaatatctccgtcaagtaaactgtgacaacacctaataagtcaatttagtatattaaaaagacaatattgatgaggtcactgaaatcgtgagagcataactctatctctcgatttctcgattaaattaatcgtgatatctataaatattaattaaatatgtgaatacgctttaaatagtatcttaaaaaaatccaaggatttattgctggtccaagcatgcattaattaagaaaggtacactcatatgcctgcgatgccgacttattggctataaagttttttttcagccttctcttaacccacacatataatagttagctatttataattaatacatgacccacttgtctttctcacaattttttggttattgtgtccaagtcggctgtaagtttacagcccgcttctactctctctcttctcttctctcctccacctcagcatttagccgacttacagcctcttattatacttgctcttagtcgttattactacctctgtccccaaatattataattctagattatttagcatatactcacttcatccacaaaagttgcacatattatttttgtcacaaaaaccaagaaaaaattaaatcatcttcgatgttacaaaatcaaggagtgaatgcaagcatgcaaccagtgagtatttagatgactccttaagttttaatcaaacatttaatttatctcatcatttaagtcttgaatgtataaagactacaaataagaacaacttatttgaaaaaaaacttaaatatgaaatatgtcaaacttttgtggatggagggagtattaaggtttcaaaagaaaaactatggtgcccttcgtcaaatggtgcataggtaaaagttggggagtggttgagggtagaatatagagaaatttggatgagaaatcattgatgagaccattagtactttactatgacaactgttttggggcaaatttgaatactaaaaatacaattattatgagatggacgtagtactctatataagtacaactacaaacgaacatgaaggttgaactccgagttccaaattaacttgatactaccttctacaccctttgttccatagaaaataaatcatagctataaatctggatatgtgtgtcaggttcatagctatagttgaactttttctcagagggagggagtatgctgagtacaactataaatcttcaactcatttgatgtgttgtagtagataatctgcagtggacaacatactactcactatatctcaaaacataagaaactagtactggatgtgaaatttcatagtattaagattcgaagtactacaatgtacaatgtgtcacatttattactagattcttataatttgggatggagatagtacctccgtcattttgggacgaatggagtagttattaagatcggaccgaatcagtggtccaatcggaaaaaagacaaaaccaaagcctcagccgattcggtctagctaaaagatcggccatgcaatcagatcggagaaaaaccggttgaacccacgttgacgatttagttagagacacgtacatatttgagccgtgttgaatcggtggtcgaactggttggagtaccatactcattgtaaaccgagggctcaccggttcgacttctggtccagtgctaataactatgatagagagaattgcttaaggcagctagttgtattactaaaatgtcccatttttaggatcattcttaattattaacttctcagcgagtaggttattagcttgtattttaagagcacgtttttcatggtacgtacttccaatataatttttctttaaaaattaaataaattcaattttaaatttataataaataatatttaattaattactcgttaatgatcacctcgttttatgtgtaccagctgattagctcagccttgcctctgtgtccgaactccgaacggggcctcatcgtcatagttgaccactaatttcaaatacgaaacgaggaaatccaacaaatgtgagatttactcctgtccggcagcatgtaccggccagtagtaccgggagatacaagatcaaatctgactgtccatcttgaagggatacgattggaaatagaaagagcaagaggagcggaacgattccggagtcgcgccgccgctttcctccttgcgctctttcttttttccctccctgaatcgcttctttctcatctgttcctccctccgagcacagaaacggagcagttgccccgccggccgatttgatccccatccatctgccgtcggcggccacggtactggagaaaacctcacggcgcgctcgccccgcatgcagtgtcaggagcacaagcagatggtggttctttgccttcatgcatgcttaagctctagcaaaccagatgatgacattgtatcaattgattcaggcaggaaagaaggcgctccactcgctggtaccgtgacttcctcaaggatatatggatgctcctcggcaatgggtttggggcagagctcgggaattcggtcactggggagttcgttgttgctgagtggatgtggagccacagtcgcgacgggaacgggatgaaggtgctccgtagcagtgacgggaagaggagacgccgctgcgatgggccgccgcgacgacgggaagcggaaccaccgccgctgcgatgggcaggggagccgccgctgtgatgggccgccaccgcgacgggaagcggagcagccgccgctgcaatgggcaggggagacgccgccacgacgagagccggagcagcagccgccgctacgacgggcaggggagatgccgctgcaatgagccgccgccgggacgggaagcggagctgccgccgccgccgccgcccactggatacggatcccgccgccgccgcccaccggatgcagaccccaccgctaccactgaccggaatcggatgcatccctacacgaaaagacaaaattacccatccacccctctatctattccggtaccacctcattggcaaatttgtacctgaggtaccggataatttccaccgtccgatcgagctgaataaatggctgagatttggtacctggctagtaccgtggtacctgctggataggagcaatgctcaacaaatgtaccttgttcaacgtagctaaacctggccaaatgggccgtgccaagccgggccggcccgagcacggtagtactgtagccggcccaggcccggcccggcacgccagcctgtgggccatgccggcacggcccgttatcccgtgccgtgtttaggccgatgcctcagcccgtgggctggcacggcacggcacgtttactgtagcgtaccggcacggcacggcccaggcatggcacggcccaccggcccatttatttttcctacgattttctaatttttcccatatatttctcatattttttatttttttccacattttatcctatttgtaccatatattttatgatatatttcctaaattttcctcacatttatcctatatttatcatttttttcctttatattatgttttttctgccttttttcttttttttcccctcaaatttcaatttttatgggccacatgtactagtgggccggctaccagcccacgtgccactacagtagccgtgccggcccggcacggcccagcaccttcttgggccgtgcttgggccgtggccttggcacgtgggccggcacggcacggcccgctataggagccgtgcctaacgggccgtgccctagtgggccgtgccgtgtcgtgctgggccgggccgcccgtttggcctgctataaacgtagcagtacactagtacagtactacaaacttgacgagggagaggaccgaatatgcagcaatcagcattggtaaaagcttaagcgcatgtgcgccaattgacatcccctgtgatactgcagacgacatgcgcaagtatgagcattatcaaccttcgagacttctctcccaccagtacactaactaaaagttatgtaatgttcccaaccttttgaaatgaataaaggtttaggctggcaaaagccagccgtagttcccttccgaagggtataagcatcgagatttctgacatggctctgtttggatttaagagatattttttagccctctcttaaatagcccaaatagctcaaaaagattcaaaagggtgagctatttgagagctatttggaaatagcccacccaaaaaaactatcccacccaagagggaagaaaatttggtaagacttaagtcctacgcttatccgaaagactctgcttcccgcacgacacctgtccgcacaaatcttaagagtagcgaatatctcttttgtaccctttcttcttcctccggccagggacttggcgacaaatccaactcgctcttaggaccgagggtccagcatcttcagacgtagcaaggtccgggggcaaggtctggagcagagtttccggttgccaccgcacccgtcatgcttcttccatggaaaatattcacctgacattgttgttggtcaaaggtaatggatgaacttgcaatgcactagaacttgggaaaacatcaaattgatagatgtcgccatgtcgatgtgtgtgtgaagcctctgtatacgttgcatcctagtaaatgattaggcctggttgtcaaaagagaaaaatgattaggcctgaccttaaaacctattgacggcggttgggttgagcacgaggtcgatgccgctgcgcctccttggcgccccctttcttcaacacatcgtccagtgctgctagctgtgacctcgccgtggccagagatgccagtcaaactgtgggcttgatgccttgccggcggccggccgggtagtacgaagatgggagattggagaagagagagaggaaagagaactgttgggagaagagacttgctgctctaagattcgtttggacaggtgtcgtgtgaggaagcaaagtctttcggatgagcgtaggacggaagtcttaccaaattttcttcccccaatagatgctaattggggctattttaggtggggccactgaaaaaatgtcttttctctttatctctctccatgagaagttacgttaaaagccaaatagctctcaaaatagctattggatccaaacaactcagagttattttattggaggactatttacttgtgctaaaaaatagctctcaaaataactcttggctagttctctaaacagggctattaattgatggagtcatacacccacgactttattcatgaggccaccatctaccacacaaaaactgtttcgtactattccaccgtaccgaaattgttccgctatagtattaaggctgtgtttagttcagcgcaaagtttggattttggttgagattggatatgatgtgactgaaaggttgtgtgtatgacaagttgatgtgatggaaaaggactgaagtttgaatccaaattttggatctaaacacagcctaatttttggtaggtgttgctggacaactaaaaaagtcacataaatcattgttgccacttgccatgctactattgcttgtgcaataacatttgctgtgcttatcacatagggatgaaatgtgaacaagttattagaagttttttttatgaaaaattaaataaaaatgaactaaaaaaacaaaaatcaaaatgtatagtatcatattggctataatgtatattttcgcttcaaattaataataactagtccaacctattatggcagtggtagtcaaatcaatcttctcacaagtcttaaaaataaataatggagtgtttagatctagcggccaaaagttttggcgtgtcacattgaatatatggacacatatttgaagtattaaacgtagactaataacaaaacaaattacagattccgcatgtacactgcgagacgaatttattaagcctaattaatccgtcattagcaaatgtttactttagcaccacattatcagatcatggagcaattaggcttaaaagatccgtcttgcaatttacatgcaatctgtgtaattagtttatttttcttatatttaatactccacacatgtgtccaaacattcgatgtgacagtgtaaaaaattttgccaggggatctaaacaggccctaagtttgttactatactctataaaccttgtggtcacaaattttaagtttccatgcacattggaaattctcatctcccaaccacggatgcaggtcgtttgcagtactgcacatacagtactgcaggggatctcaattgctgcccaatcacacaactactagtagcaactagcataactgcaagatagatgttcagatggcccaaccgaacaagccaactatctctcactctttctcaaaaaaaaaaaaaaagagaataagttcaccgatcgtcactcaactttatgttgagtttgtttcacatcccttatctccaataccagaaatcttcacccctaaataatacaaaaccatgcaattagagttccacaacagtatgtatctccggtttcgctaacgtggtatcctagtcagcgataaaaaggcccacatgtaagttataagagaaaatgtgtggtcttcatatcttctctattctattttcttttctttcttctcctttctttggtgagcccgggaggtcgccgctggcagaggggggggagaggtggccggcgagcccggccgagctccgccgctatcgacgccgcctcgagcgcccaacaaagccatagctaacctcgcctgcgtcttctcggcggaggcgaacgcccctgtggcgggcgtcgcaccgcaccactctagactacctcgccagcgagggagtcggaggcgagctccttgcggatgccgatctcgctattgcagaggagctcatcaagccgatccgctgatgtagccgctggcagccctggccagcccggccgagctccgccgtcaccacctcaagcacccactgaagccgcaggtgacctcacccacatcttcttggtggaggtagcggtgaacacccctgcggcggtcgtcgcaccgcaccacatcggactacctcggcggtggggtgagttggaggtgagctccttgtggatgccgacctcgccattgtagagtccccgcccgttgacgaggtcgacgacgtgaaaggatacgagggagggggcaggcagacgcgagggaggagctcgtcaagccgaaatgctgtcgctggtggtcccaacgtctacccctccggcaccggcaaccatgatgagatcccactctagctcgtggaacacgagtgggaggctacagagggcgaggcgacatgaggtgtcggtagcacggcaaggtttggttaggatgtgcagagctggtggtggtggagggcaatgagttcacgagcggtcgagggtgccggagctgctgctgtcggtggtgccatcctcctcaccggctgctcttcctcaccgtctgttgctgggcgctgcccgatgatatgagcacagaggagagattgagagagagaggggggagggaggggggggtgaaagggaaatggtcattgacaagtgtgcgtcgacatatgctacgtcaacaaaaaccgaggataatatggtccatattgctaagggacttatttaacatggtttcgaatacttgaggggtcaacatttctaacattgaggattagggggacgtcatgtagactcgatctgaagttgaggtactgagagtgaacttattccaaaaaaactgaaaacaataagcccactatgagtccacgggcccaaagacccaggcccaaaccgcgtgccgtttccctgcacaagcccaaccccacacatatcatctcatcccatctctcccccgtcttctcgaactctccatctcgggatctcgcccacccaccactccaccccctctcctctccgtgcgccgccgcagaattcctcgccgccgccgccgccgccgccgccgtgaggtccatcgagatcgcgaccggagcaggtgggtgatccgctcccgcctctcgcctcccccctcttacctcccctccttcgtgatttccccggtcccaaaccctagatccgccgcacggccccttgcgggattagatctatcggtctcggggggcaggtctctacgtcgtttttgtgattcgttgtttaatccgattgtatttttgttttcttttggcgatttgataggtgcaggttgcgatggcccgcgtgtacgtcggaaacctggatccccgcgtgacggcgcgggagctcgaggacgagttccgcgtctttggagttcttcggaggttagtgactcgccccacctgtggtatgtattgtgtgcgattgtttcggttttctgctagagctgcgtgcgcatgtggaatcatatgggggaacatagctttagcccaccatcggaacagcaaaactcgttctagggccagggcctgagtgacctatgcagccacatttatgtaacttttggggaagacgattggccataccagcagtgcacggtgaaattttaaatgttgtaggcttttctgaaatcctgttccgaccctagtagattttactgtaatagaagaggtagagagggaatttgatggattcattttactcaagattatcttattacaagtcgttatttatttatttattttgagatgtattgatctttctagagcacaattacttcccagctatggcatccaggctttagattgcagtgtacccatctacctgacatcaatggcctccaaccaaacactagacttcaagcaccttggattagattttatcaggatacaaattcaactcattcagatatctacaacacttatttggctaatttactgtatgctggagatgcttttacggtttttctgttgcctaactttttcttattttcttgatgtgctgccaataagtttcttacctgaggccatgtatttgtattttgcacccacaattcaaattatgtttgatgctgattgtcctgatgcagtttgcttatttttgttttgtgcaagcagtgtatgggtcgcaagaaagccaccaggttttgcattcattgattttgatgacaggagggatgctcaggatgcaattcgtgatatagatggtatgtgaatgcttttatgagaacatagcctctgtcagttggatctatcacctctgagaatctttctgctctgattttcttttggtgagttacagggtggtctttgcttgcaaaaatatcttgtgaaagttaaacttctttcaaaggccatgatatatgcctattagtgacaacatgtgttaccattatatctatactttgttttagtaccagaattatgtgaatgtgatgtggcctgctgtttagattatgcttttcctcccagtccctctctctcatccaccaaaacacctccttgcactgttatgttagagcaatttcatgtttgtgcattaatcacttggacgtataagctgtttggacattgtcaagagggtcaagatcctacatttatgggggaagtggggtgaggcgataaggcgtaaaacaaacagtagtgacaactctgaatttctaatttttaaatggcttcttttataggcaagaatggatggagagttgagctgtctcgtaatgcaagcagtggtcgtggtggccgtgatcgatatggtagctctgagagcaagtgttatgaatgtggtgagactgggcactttgctcgtgaatgccgtttgaggattggttccgggggtctaggcagtggaaggcgtcgtagcaggagccgcagccgcagccgaagtcccaggtaccgcaggagtccaagctatggcagaaggtaatcaaaatgtcaaataactgttacactgttgcaatagttaaaagctttttgttactataagttaatggtcacaataccattgttgggactgttggttctgctatggatgtgaagtgttagtggtttgcaaccctactcactctttgatacaactaagttatctttctgtattcattgtaaaacattatatgacatgcacacaatttgttaatttagggttgcctatggtccaaatttacaaacactaagataaagcttgcaattttttctattcagtatttatccacctgttgccatttcccaacatctaggatagtaagtgctagcaaagaatagtgtagcatttatgccctgttttgtgtatgtaactagtatatttacacgaagaagaataacatatctgataatgttataaatgatttgctatgtgagcagaagttacagccctgcagggcgctctccaaggcgtcgtagtgtgtcaccggctcgtgcacgcagctatagcaggtcaccacaatacaaccgtggccgtgatgaatctcctgcctatgataacgggtaatgcagatttcagtaagcagttgtcattttactgtttctaactgagttaaccattttcatcgttcgctcttcgacaatctctaatatgttccatttatggtgtcagatatcgccgcagcagaagttagagctgaacctgatgtctaaagactgctgttacaaatgttactttgtgggttgtcagctatgaacaatgccctactccaaatatcatcatcaactctggactttgattaaggttctcataacttatctaccttattatgctttgtgtttgaagttatattactcgagaaacttatgattggatgtgtattcaactaagttcaactgtctttctgtgtgtcaataaggcatcggcctgcactgcttaaacgactcggccgactacggctaccagttatatcttcgtggttgtgttcttcgctcttcattctacgcgcgccctcgcctgcttcatgcaaacgtcatacagccccattagttgctgcctacaacacctcttcgtgatccatatacttcgttgaagatgctgctcatcagaaaacagtaatcgccttcttttatcgtaataaaaatttggtcatattgtcttcggaacaacagtaagtgcagcatctggaagtattggtgaaacaaagttcttcgtaggcatagactccagaaaatgaatctgcaatccgaggagctgcagtattcagttggatgatttacacccctgcccagtccgtcacgccttgtggcaggtaaatgaggtcaccagaggagtgctttttgacaaggccgatttcagctcagcaagcactgtatctgtgcaagcctgcttaagattttgttggatgcagccagaggttttgctctccatgatcttccttctgcactcgctcagcctgcctcagcctaccctgcgtgctgccgtctagccaagagccttcgccaccactgcttccccgacgtcgccttcgtttccattgcttccccgacgtttgatttcatttgcttagcatttgttcgtcaaattaatgtggtgaatggttatttcttagggatctacgggtgaaaaatgccagatgttattctatttcgtcgtcgaaatgtgatcattattcatatcatcgcatgccctttgcactgcattgccgtttcattatcccgactcggttggttgtgtggccaagatgcctaaccgaccatcaacgtcaagatgctcactgtagtgtaagacacgagcacatccaaaaggctggtggtgacatgaagaaagctgacgtttcttgccgatcaactgttggttgccgttcgcctaccggttcatgttgcgcgaattgtcccaagatcgtgacgctgttctccgttgcgccgttcgggttaacctttggcacacgatacgtagcgttcctgaaaaaaaatcgatacaatctcgcacgaaaacggggcaaattcctccgcgttcaaatccaaacagctctctcttgagtcgcgactcgcgacggcgggacatgagccgacgaccgggtggtttggttggtgccgcgcacgcagatgatgcaggtgggcgtggatggatgatgtatggggagaagaaagtagagtatggaaaggaggatgggttggtgatgcgaggcgccgccgcatcgcaccaggacattatcccgatcgaaacgggctcaataaacaaacggctcgaggaaggaggattaggtagatgatgatcgatggacgatccctttgctttttttttgtcgaccttagctggggctctgccgccgatatattgtattaaaaaaagttccatccgatgttaaatttttatattttgggaagtactactccgtcttaaaaaaaagacaaaccctaacttcgaacctggagtgttagacacgcatatgtccagattcatattgtcgaaacatgaattcggcaataataaaaggaggtagcgcacgagacctaaaagtggatggatgcagagacaaaggatttagacaggttcaggccctctcgatgagaggtaataccctactcctgtttggggatttgaatccgccgggtgtagtatagatctgacgatcaggttgtctcatgccccctagagggcctcctgcccaccttatatagggtggggggcaggattacaagatagaaaccttaaccaatacggtatcggtttcctaaatctactttacaatattatcaaaccaggactttaggccgttccgtaacatacaaggaaacgtaatacccaagtcatgatctgttacatattccatagatataagttatcccctatagccagtcggataactatgccatgtgggtatggggtacccataatctccacagtagcccctgagaccttcacagtcgaaaagataatcttctctcgaactagattactccaaagctgagtgcttcaatcatcttcgccatggtctccgaagtacttttaccaaatatgaagactgtggagggctgaaaaataaagtcagatgcatcaactagatgcacctaataggtgtagccctcgactatgcggttaagtgaacaaaccaagcatatagtcaaggaataaataatccaaccaaccgagtggcttcgataattgtagtcaaccaagcgacttaatattaatatgtagcatatgcggtgtgaatccctgaataatatgatccaagtgatataccgactgctttgtaaaatatgatgagtgtaacctaaagttggctacatcattgaaaattcacatagcaaaatagctataaagaagcttgtatgttgtgaataaagaaatttccaaagtattgggcatacgccatgcgcacactgctttaacagatgtgcttgagtccctagaagacacatggttccaccacacctggaaatatatggcatatgtggtataaaatccgagtaaataaactcataaaggatttaccaaccgcctagaaaatgaccacaatatataatcagcctaagccataatattggtcaataaaaatgcacacttacgtggcgaaaagcaacgatattgtatccaatcaattgcttaaaaacccaaacagcaccatgactatattaaaaagtcagcggggcagctatataaagctttactgtttgacaccttttaagatgcactgtaccaactcctaaaaagttgagtaactgcggtataaaaggattttaaggtattgggcacttgatcacgcgcactttggcctaagcaaaaagtgcctaagtccctaaaagaacgtgacaggccacacctgaaaatatgggctgcagacatattaggcctaggccaaaaaatatgccttcgacaccctttaaaggatgacgcatgtaacatgcttccgagtaataaatcttccgggtaatatagaccaagtgtagctcatatgaatagcttctgatctgaatgattatcccttatgggatactccaaaataggtgtaacaattgaatcccgactggcgcaagtattcggttgatagcccttacggggaataataattggtccagtctttgagcatagaaaatagactcatgactatgaatccatgtggaatgtatccggaacaagtccaaattggagatataatcctcacgcttgagttgatgagcccctgagcatatagcttgtccttctgtcgtagtcacaatcgtccattgatggtagctgacgcagttggcatatagacaagacgaccaatatagagataatattgcccaccagaggtggcaacaatactggtggtagtgaagatagtgataccaatctaaagtaatgaagtcgcatagtcatggaggcgaagaaaccagtcggcggcagacagatcaactaacaatgaagatgaaggaacccagcgacaaaattgtgtagccatggcagcaaaataatcagtcggtgacagacgaggtagatcaaaggtgatgacaaaatccaccaatcatgaagatgaagaaaatagttgacgacgacaaacgcaaccgacatgatgaagaagacgatgtcggtgatccagccaatagcagtgtaccaaccaatgataatgacaaagacactcatcagcatttgcatagtaggtcaaccgtgaaggtgaaataataagtcggcgaaaacataatcatccattagcaacagcggagatgtcagggtcgatgaagcagaggtgctggtgatgatgtcagtgacaataatccatcaaattaatgttatagctgttgtagatgcttcacttggaggagagttgatgttgttgtccaactcgttcaaaccgaaatatttgaagttgttgaagtagaatgtctgttccgaagcaaagatgaagataatgactcctggagttgactcattggcttatataaaatttgtcaaattttgagccttatatttgtgtagcccccgactctttggttagttgggaaacaactgaacatagagtcgagaacacatatctagaaatggattttttttttttagaaagatggagtatgtagtaacttgggggtcatattattttctttttcagatacttcaccagattattacaatggagtgctccacgtctttaaaataccttttcagaatgaactcttttctacttcctccatttcatattataagccgttttgatcgttttaaaatcaaacttttggaaagtttgattaagtttatagaaaaatatagcaacatttatagcactaaattagttttattgaatctaacattgaatacatttgaagtttatttgttttatgttaaaagtattgctatattttttataagctttatcaaagctaaagaagtttgacttagaaaaatatcaaaacgacttatagcatgaaacgaatgtagtacaatgttgtttgagcatatcacttgtttaaattatttatataatttacttatcaaaatatgtaatctattgttataataaaattaataatctgattcagatatggcctacgagcgtatattttagttataataaaatattgaaacaatagattaaataatttacttatcaaaatatttaatctattgttataatagagaatattatctccaatgcagatgcttactcccttcgtcccataaatttcagttttagtattgaagataatatttttaatacaataaatctatacatccaatattagattggatggagggtatatgttggagcctggagaagaaaatgaacttcacatgcgtatgcacaggcagacaggctcatatgaccacacggatccatcacagcctaaaaatgcattcttttaacaaaagagtagttgaccaggtctccgtgtcaatcaatactactactagtactagtagtctagtactggagtagtaccaaaagcagcagaccaaaagaaagaatctctctactcgactaaaaatcacaccttcacccttcatgtcagcacactaaccgcgatatttaccccaaatcccaccgatttaacagcggttagtagtaataataaagtaaggtttggatgcatggacttaactttaatctctatatttagacactaatttaaattattaaatatatactacttacaaaaccaattacataaataaaagtaaattcgcgagataatttttttaaacctaattaatccataattaaagaatatttactatagcatcacatagactaattatggattaattaggctcaatagattcgtcttgcgaattagtccaacattataaatatattttattaataatatatatttaatatttataattagtatctgcacatacgatatacgatatcatagggtcttcagcgaaaaggcccccatcgtcttccccctttccacggtagttttcgttttccgctcgccttcctcctccctctcccttcccctcctcgaactccgcgcggcggccgcggcctccctccctcccgctcgatcccgacagccgccgcagctccccgattcagcgcggtctctgctctcctgctcctctggtggctcacgcggggaaggatccggcgctggatggatgagaggaggatgaggtagtttgtttggtggtttggttgtggcggaggtaagcccatgtttgggtcgaggagggtgaaggacgagatggagctcaggaagcagaggaccgtgaggtgagagcggctactacttgctttgctttggggaatcggggtctttgagttttgagtttgtttttagcttggggggaagttggggggcgcggaggtgaaggcatgacaagggcagtctttctcccacttattagtggggaattcaagaagaattccatttcttgcgaggagaagatgaattcttgagtggatttggttgctggtggtggtcagttggtcactgctgtatttttggactagtgtttagctcatcagttatagttatgttcgatttaaatggttaggtttaatttcttgtgttggattatggataatcttgtagtgaatcccacaagttgtttgctaacttcaggcttaactttgatgagcacaattagagatatatttataaatgagaatgagatgggaaaggtagtctgataagcctaagaagatcatgtcatgctgattgctgatcatttcttgcttttagaatcactctaacaatttctctctctactcctgtataaaagaatctagcaaattaataatagtcttactttttgagtgaattctaatgctgtcttcgtccccagattccacgaggagagagcaaaaccaactatacccactcaccagaagcaggctgggctagctactagtaagcttggcctggggatttcggagaagaacaagatttttctagcagggaatgagctttggtacaagaaaattattgacccatcaagtgatttcatcttgacatggaactatgtcctccgtattgcatgcttcgtggctctatttatggatccactgtacttctatgtacctaaaatctattatggcactccgaattcatgtatcgggagagatacacgcctagccatcatcgttactgtcttccgatcaattaccgaccttttttatgttcttcaaattataataaagttcaggactgcatatattaatccaagctccacgttaggggttttcagtcgaggagaccttgtcacagatcctggtaatatcgcaaagcattatttgagatctagctttgtggttgatctagtggcttccttgcctctaccgcaggtaacttggtttcttccccctgtttttctgtcaagacataacttgagcctttatccatctaattcattgcataattgaaagcttgggctagcaagaacgctcttaccaaacatggaagtattggatctcaaatttcatatactaagatatttcctgctttagttgcgaggttataaatctttgtgtcttttaggtgaaacaatccacataggctgctcaagtccttttagtgttgtattattacttctttaatgcaactgattacattctcttgcattagttaaaaagggcatctgcacttttgtacctgaagttcgaggtatagaagttatctgacatatttctccctttcttgcagatcatcatctggtctgtgataccatccgtcaaatattctttgtcagaacatgacgatgatatactgcttctgattgctctttttcagtatgttctaagattatacctcgtattttcattgaactctaaaattgttgaagttaccggagcattttcaaagacggcttggcaaggagctgcttacaatcttctattatacatgattgctagtcatgtacggtactcatgcgagttctctacaattttactcctttcgccatttaatactagctggcatggttacttcgaatttgtgctaccgttttcttctgttttgctatttggatagtcaagatgcacttatccttttcaggttttaggagcattatggtacttgctatctgttgatcgccagaccgcgtgttgggaaaaatactgtagcaaagaagcgggctgccaaaacagatacctggcctgtgatatacagtctgattcaaattggaaaatcagcaccgctatcttcaataaatgtgatgccactaacaaaacaattgattttgactttggtatgttcacaccattattatcaaatcaagctcccgatcagggcttcctgaagaagttcttctattgcctttggtggggtttgcagaatctaaggtttgactctaaacacatcttctctgagacttgtaattaaggagaagaaatttgaatataagacacatcgtgctcactgttaaagcaaaagaatatacaattataagtcccatcattattacaatttttatctgattaatttgaactattatgatctgattcaataatagctaatatgaagattctaatatattctaacatgcactgtgattcttttttgttaaacagttgctatgggcagactctgactgtgagtacttatattggtgagacgctgtatgctatattcttggcagttcttggtctcgtcttgtttgcgcatttgattggaaatgtgcaggtactttcatggtgtaaactccatttacaaattgttaaaatgctttagttatgaagtaactttgttgttcatttttgatatcccattcctttgttgtctgatatataaatattttttctgaacaaatttctgtattgtaattttacttgcttttgtcaaactattttctagtgcctgcctagatttggtggtgataccatcattttccctctgaactattaatttctgattattattattttttgcattgctacaaactcctttttttgtttgcctaaaaaaagtgcaagcactagaaaatgtatgtttgcaagatgaaacgtaactccttatttcttcgtcactagggctagagggggctattttatgatgttttatatacatgcaaatttaaagtattgtttttaaaaagaacagaatatatatttattgaggctttgggtgagcatatcgccaatactaagtttgttcattgcaaattgtgattcgttttcttgcttctataacatttgactatggctttaggaatggtgaaacaaatttttcctggtgtccaataatggtgaacatgcataaagttttttttcccctgtaacaatcttatatttttgcactcacgcagcacattcctggtacattgtattatattgtattcgaactgatgtgtgatagtaccatagtggatttaaatagcagatgtttgggtttttgtcttgaaggaagctgatataaacaaggcttccaataatatcatgcaatgcattaattagaattgtttttacgagataacatcaacagctgtttatttgggtatttctatgacctgttctgttctagtaactgatttatgattatactagtaaataccattacaacctcttagcttcaaaggcgtacataattttctttaagaaatattgagctcatcacattatattgtttgctagacctacctgcaatctatcactgcaagagttgaggagtggagaataaagcaaagagatacggaagaatggatgaggcatcggcaacttcctcagaaactaagagaaagagtgagaagatttgttcactacaagtggcttgcgactagaggtgtggatgaagaatctatattgaaggctttgcctgcagatcttcgccgtgacattaagcgtcacctttgcctggatcttgtttgccgggtaaaattacctttcttccctttgttttctttacaaaattacaccagttttgcaagctctcctattatcaagtgaccattttaagaaatttagctgtgctgccaggttatttcattgccatttatcaccacatttgaatggacaaaagaagttgacacaagaaaaataaataggagaggaaatgagaaaaatgacaggattggaacgtgcctcttttcgttctatttttcctttccttttcttgaagcaacatatttttcctttctttatttcacattaaaaatagatgggataagataaccaaaaaatggcaaacaaatgctatggatatgctattgttttatcccgtatttttttttgtgagaaggatatatcaacgtcatggttgtctctttctcttctccaatccatgctaatgcaatgacctacacaaaatttgctctgcacatcgaacatattttggagcttgagtttgaatctgctacagccgacatgattcatctgaatcctattgtttgggtactcatttgcagatgcaccttttccttcttcccttttttggccagttacacacttgatactggcagttttttagtaacaggacaattgcaattgcctgttaatgtatctcttgtgaggttgtcattgccattaatgtagcatttcatttgatagtgagatctcgacattctatatcacttactgattctcaccaatctttcataccgcaatgcattaggtcccttttttctcccagatggatggtcaacttctggatgccatctgtgagcgtcttgtatcttccttgagcacagtgggcacatacattgtccgtgaaggtgacccagtgacagagatgctttttatcattcgtgggaaactggaaagctccactactgatggtggccggacgggcttcttcaattctataacgctcaaaactggcgatttttgtggtgaagaattgcttggatgggctcttgttcccaagcctactgtcaacctgccatcctccaccaggacggtgaagacaatcgttgaagtggaggcatttgccctccgagctgaagatctcaagtttgttgcgagccaattcaggcggctccacagcaggaagttgcaacacacatttcgctactactctcaccactggaggacatgggccgcttgtttcatccaagcagcttggcgccgctacaagaggaggaggctggccaaggacctaagcataagggagtcattcttttccaggagatcattcgaagatgatggttcccctgagcacagccttgtgttgaatgcagtcaggaaaggagcccatatcattaaagaacttcctaagtttaggaagccttctgagccagacttctcagctgagcatgacgactaagcggagagtagcttacattatttgctactgtgaaatcaccgtttgcgctgcaaatccttctgcttgttgtcgttccatgatcacgcttcagagtttgggttgacaggtaactgattgttgataggtgaaatgctgaagctcaacttaacacggtgaaagcatcattggtggtatgggagttaggatcttggagacagaatgatagatagtaaccacgttaattttcttttcttcttggtgattgtgttgctgtaggcttagcttagtgattattgtttaccctttggtcatgctgttaatccagttgtaaacttgtaattgtgttggatattgttggcaacagcttgggacctcgtagtagcatattgttgtattttgactcgccgagcaaattctagcgtctcggcgagtacaccatgtttctcgtttttgagtgtatatgtaaatcacaggaggaacactgaaattgtttttcattcattctgttctactgcttgctggtaatagtaattaatctctgttctactgctcctgttcggcagcacagaaattgctctgttctacttctatatgaaatttgtgcgaaatttctactactaaaccgctgaaactctctgttcgacgcaagctttgctcaggctgatttggattgcgggtcaactgaaatttggattgaaagatacaagataaagactccatgcgaaacctgtattactactattgaattactgggactgatgttggagtacactacagccaggtgatcaactggtctttcacaaaaaaaaaagttaattagcttccttcactgcaccagctattttgctgatgttagaatgggagtcaggtaaaaattggattggaactggtatggcatttcaataatttatctgcttaaagatgaagcttaactacatagctactatatctatgcttcagagctactgaatgatgttacttgtgaggatgtgcctctacatcaggtgcaatcctctttggcatcttcctcttctgcatatacttcgcatatgaataccagacacctccaaatgtattgatcaccaatccagtaacgttgagagtatgcacttccacacctcccagcagaacgaaacccagggtctgaaagagccgacgaagtgagacggtataagatgtcaatgttttggaacttcgaaaacacggtgtttcagtaatttggttagagatagaactgcttacagtagatccaacacccttgagaactcctactattgttgtcgtcagagcggagttcactatcgtgcaccaaaacatggtgaaattcaggacgatacccatcaccagcgaaacaagaagaatagcactgaatgttagcgaggccgtctgcattgcaagtgacaccaattatgtagattaggaaattggatccaggaaagcactgcaaaacagattgctatctttgatgtcctacttaaatttgataagcctgtattggtactactaaccttttcagagagtactgaaagagaataggggaattctcctgttgctataatgatgaaaaacagaaagggtagtgataatacgctgttataaaacatcaactcaacggaggaaagaccatcctctgctcctgatttctccacaagaatcaaatacattgtctgcatacacactcaattgtcagttacagttagaaatccaaacaattatctgagagcaacaatagtgaacatattacaacctggaagaagactgatgttagagccatggagtatccatacaagtcaaaggaaaaatctccaagagctgcaataaggactccagcggccgtgcagatgactgaaagggacacctaaataaatttgtagtagtgaggaagagcaaaatatttttgaaggaaagagccaaatatggtggtaaagatatattccttcccaaggggatactaatatactatagttgagtccattgaaaatcttcaaaggattgcatggtaaatcttgcaattcagtggcaacattaagttgacctattcaatgttgtttagtgctctcgtgattttataagcagcatatggatccctcaagtagctgactggcaaaaaaactaggggagtatgatttatttatttttttttgcggggaaggggagtatgaattgatgatgacgccatcttagaaggccaaaatcttgaattgggacttctatcgaaatatcctacctaactttattaggacaattcaccttgtaatgccactaaattgactttcacaatccaaaagtaacatcttgggtaggcattggcatgtgtaaagtaaaaccataactctgtaaaacctagtggagaaaagaaataaaatgactaaaaaaaatgcactcacctgtgttggtggtttcccctttccccgtaaacacccagccaccagtacagcaaggggagtgagccttttaattgcaatatacataggaatgttaaccccttttaggcttgccagcgcaaatgcaacatttgcattgtagaagatcgacagcggaagaagcttccttcctgttgccatactgaaatcttttcttttagacactcctagaatttgaccaaaatgtatgataagtgctgtagctatttgctgcagaaatagtgatattgaacaaaataatcaggctcagacaaacataggaaaaaataactttttttttgttgtcactgatgaatgatggctgatgtttgttcataattatacctgtaaggtgagaagagtcattgagtgagcatactgcataagaattgctttgttcacgaataccattgccatagatgcaattccataggagaaggcagcagataagctgcaagagaagataaagagggaaatggtcagaacttccaatacatttcctacttcaattaggtctgaaccaacagatccataaatgtatagaaaactgcaatatttgtggctggcctctcatcttctgcttgttgtcttgttagccacaacaaaaaatgaattttaaaacttaattttagagttgattttgaggtttttttcattgtagtttattttctagtattggcttttaagctgtaaagaacacagttataaacattttgcccataaattgtttttggttgctcagtttatttttccacgtttatcggtcagtagaccaaacaatcagagcttaaatctcaggaattgatgacatgataacaaatgcagtaatgatgttctctagtttccaataattaaataatcaagaagattccccccacggcatctttggcaatatcattatatcaatagctcgggatgatgaaatctagcgcgttttatttaatcatcatgcacaggcatccgtgcagcttaactaaaaaaatactagtagaattgcaccacactgcgaggctagatagttgactacctattccttttaagtaatgaagcaacctgctttctcaagtgaaaataagtacttgtaaactctaaagcctaatgcaggatgttcttaaggggaaaaaaaaaccattctgccacctccattagcctgcagaatgctcattgcctcattgcaatgccagatgggagatggccttgggccttggcaggtcttgatcgatgtatgcataatgcacgtgtttgcgtcttgaagaaggggactgacatctcaagcaaccatcactcactggaatacactttttgtcccctctttcttggattcgtaattcacagtaaatcaagaaacaatcaattcaatcaccgaatgctacagcccgcgagccgacgcagcgatttcccctcattttcttggattcagacttcagaatgaatcaagaaacatcctccgccgaatgctacagcggtaagtccaacacagcggctgtcgaaatcaccgcaaagaaaaggaaaaaaaaaacagaaatcttgacgagcctcatccgccgcctacgaagttcttttcccaatcaacaagaacatggccaagaagaagaggtgggggaaaggggagagctgaaacaagaagaggaaggagaagaagaagaagctgacctgaggaaggagctgggctcgccggtctccgcccccatctctctctcctcgagctcgcggttccgacaaggcggggtgctctacatggaccggagcaagacaggtgctggggaatgtgggtggggggagatctggagacggagggggagcatcggaattggcgggggctggggttatatcaacaaaatgcgcccaagtgtccttctcaaattaatccgttaattaattgactaaccttttctctcttttttttttccaaaaaaagaagagtattgcattctacaaagtacaaacattctctttttttaacttctaaacgatgtattgcatgtagaaccttttcttatatagaagttatttctaaaaaaaagttaatttaaatctgttttttaagtttatataaatcaattgagtagattttcagtaaaccgttcaacctatataacaggtattatgactggtgttatataaaactcatttattatggttttataaaaccccgctcctatatatatatgtgtgtgtgtgtttagcacacatttacttaagtttttaaaatataatctatatggaatttttaattgttgattttaactacgatttaactcttcactactttcaatatttttcacatatgataaaattaattacagtttgaataaatgtgagatttaatggaatacttagaccatgaaacatgtggttatatgtcacaagttataacaatatggctttctaccattttttaccatgaaagtaatgatttctaaaatttattactttaattaatactcagttaattatgtattaatgaattttcttgtttcgcgtgccgcttaaaatcccaaccaaaccttacgaacgaacgcagccttaattaactaattgaaggatcaatctaacatatgatttgatcatgattttgttaatcggtattatgatcatctggttacatctagatataaactttagcatttaaatcaactaagacatgtacattctaaatattgaagagtgttccaaagcgtctaaatcgaacatgtatataatattaaaatccagccacacaaatacacagataccgtgccagtggttatatttaaaaggagagaataattgttctgaacctgaactatatattctaatctggaaatgagacagtggcttacaagctattttagagaacatattctctaaatctttgtaaattcaactaaaagatggaaagtatccatacctgttaacatgaaaaaatcatgtcaatattttcacaaactgaattacatattttggcatcattttacggcgcattgtagtataaaagaattgcactgcccatggagtatcaagaagtcatttcaactctgccgtttcttctctaatctcgaaaccgcacatgacctctgaggctctgaagctcttctacgcaatcatcacattacatgctagtagatgtttatgcacgatctatttctaggatgctctcaaattcttgcataagattcagaagcagctactagcatttatctttgaaatggaggtaccaatcgtgctctttcaaaaaagatacttcctcagttcctcttgcttgattcatcgatcaccagccgtagcatctaattaatctagctttcttcagttgacttgcagtaccaatgccattcctcaaaggatcaacgtgtcgcctccatgaagaacacatctacctctgaacccaaggctggatgatgacgagtcgacgcagctgctcttgcctcgcagcctcgccggattgtgtgtcaccgaaccatttcctatctatccgtgccatctcctcctgcaccgagggcagcatgaaggcttgctatatatatgtcgtgcacaatcggcgatcctatcggaaatgcctgaaagaaacacatcacaaaattgatcaaatcttgttcactaacccagtaaattaactggagtagatgatgaagtattttaacagacgagagagacttacaaatccgaagcctcccaacttgttaggtcgggccaaccatgctgtaaccttgacaataatttgagaggaaggccttcaggtagggtatctcgtcaaatacagtagataccgcaaaaaaacccattttcgagatatttaactatttatcgctcttagatataacaattaactatttatcacctgtattcatatgccatagacatatggcacataaaataaatagttaaaagtcaaatatatttttagagcccctcctaagggagtcatcatactcctcccaacgaggcataaccgcacaaattctctccttccggaagcccatttcctcaagccagtgcaccacggtgtagcccttttgatacccgacgtttgctgtctcttaggagatcttggacgttggttgctgctggctggagctgctggaccgtcagcattgattgccaggtttgccgtgtagcttgaggtcagaataagcgcgacaaacacccatacgatgactcaaaatacaaaacctaactttcccatcgcgtcgcccacgcacaggcgactcaggggcgacaacgaaccctagcagccgccatctatagaaaaatctaattgttgtattctgatatttcctgatctattacattgaccctctcatgaggtatatataggagtacatataggatagagacttggagtacaatacaaataaaaatagatttatctctatgattctatctctagtactctatcttatctttaggatatatcttatctctataatttgtttttgactcttatctctaactaacatattatacttctaacaccacccacaccctctcctccacctcgctgctgctggagctcgccgccggaaatatagcggcgagcgaggacaacagtggtgggcttcgatgacctctcaattcaggcgcgaagaacgggtggcgcaaggcagcgacgaagatggtgcggcagtagcgacggcacgcgacgcggtggcttcccctcgaccttggcagcgccagatccaacgtctccttgccgtgacaacaaggttggcggttgcggcgacaagtcacaatgcacttcagcgagaaccattacggcaacaacccttgcagctgtggcggcggcccttgcagtggatgcacactgaatgcgcagagatgtagcctagagggggggggggggtgaataggctttcctgaaattttctcaacaatcgcagcggttaatttaacagggcccggaacctcctggtgaagaacaccggaacttcctggcagtgatgagcagcccggaacttccggagttcttgggccagggcccggaacctcctggtgaagaacaccggaacttcctggcagtgatgagcagcccggaacttccggagttcttgggccaggaacttccgggcaacagagaaaattgaaatcggggatgtaaaacaggtcctagctagagacaatcaggcacaaggtagcacaagatgtaaatcacaagataccagcagattcaaacacagatcatgcacaagagagacaaaggcgattttttcccgaagttcggatcacacggatcctactctccgttgaggtgttcaaagagccgggtctcgattaaccccttgcctcacttatgcaaagatcccagaagaagtccacagccttcaactcaacacttctaggtcattttctagaattgagtgaccaccaagatccaactcacaattccttctagaaaagaccacaagtgcaagttgctctacctaggacaacctctgaaaactcagcacaagaatctttactcacttacctcgtttccttgcggaggtgaggaaaaccttcacaaacttttccgggacatccacaagatctttggaagctcacaggcgacacctaaccgtctaggagaagatctccaagagtaataagcccaagtgacagcccacaaggtatccaaagtgctcaaacaaacctaatctttaagccatctccaaaacactcctacactctaatctaatctctcaatctcacaagataggctctagatttgagtggaggaagcaaaggaagcttgggagtggctagaaaaccctagaacatgaaagagctgaagtggaatggccaaagggtgacctggggacgaaatccatatatataacggctaggtgacgtcatctagccgttactcacaagtttgaactggaaacctgccaggaggttccgggcaaaagtgccaggaacttccgggcagcacttaggaaaaaatctagctaaacttcggtgcccggaagttccggccagaacctccgggtagccctctctgtcccggggagaaaataaactttggtgtccggaggttccggccagaacctccgggtaggcctctctgtcccggggaaaaacatttccaaaaaagattccaaaaacctttagactcatggatatgactcagagcactttgaataccctagaaccacacttgaaacccctctttatagtacggttttttctaaactcaatttcgaaagtgaaagacctagtctaatcaccttcggtgtttttcgcacttaggaacattcaaattggggggtctccttgcattcttagccatcacaacttgctttgggactaaactcctgtgaataaacttgataaacacgttagtcccctttaaccaccttgtcattaatcaccaaaacccactagggggtttaagtgcaccttcacacaccactctggcggcggcggcgcttgtggcggatgcagatgcggcaacaggggcagctccgacgaatgcgtagtgtggcgttgggaatggatctaatagggatgaacgatgacacaaccgctagccgctaaaaaaaactttggcaattgggaccacatgtcgtgtcgcgcacttgtcacgtcctatcgtatccctcaacaatcaacggacggattaagattggtacctcacggtacatgtatctcgagatacaaaacaagacaaccggatatatgtagcctttttaaattaggaacttagccctcaaacaacccagtctgaaaatcgctcctatgaagatttgaactcagtaccttagcatgtgtttggttgcaggggcgggacgggtcagaaggaatgcatgaagtgggttgaacccagatggaaatattcctctcagatccgagtttggctcatccgccaaaatctcccggaccaattgaacccacctgggtttctctcccatgttcttccccagggcggcaacgcgtggggcgaagcttgctgggcagcacacggcgcacgggacggagccatatttattaagaccggaccggatcgggaaaaactggaaccagagcccttaccggtctggtccaggtaaaagaccggcatgcaatcgacccagccatgaaccggtgagaccgcccggttttgaggtaaaaccgctattaaaccggaaataaaatcggcgctgaaccggtctcatactgctgtatgtgggatgggcacgcgtgcatgggtgatggtgggggaaaacggtctcgtggcgctgaaccggtctcatactgctgtatgtgggatgggcacgcgtgcatgggtgatggtgggggaaaaacggtctcgtggctgctgtatgtgggatgggcacgcgtgcatgggtgatgctgggggaaaagtgaggaaaaatatgggtaggtgggattcgaacccaggaccacataggagggagttaactcgccaaccatcaggttactatgcttcttgtgtttttgatagaatgagtaatgcatttaatagttattgaaccgggtcagaccagtggttcacctggttgaaccagtgaaccattgaaccaagagcctcaccggtttgattaccggcccggtctcaataactatggacggagctcgttactcgtggacgggcgcgcggcgcgaagctcgctgggaagcatggcggcgcaaggggaggagctcgctgctcgtcgacgctcgcagctcgcggacgggtggcggtgcacggggcggagctcactactcatcgacgctcgttgacactcgtggctcgcggacatggggcggcacatagggcgaagcttgcggctcgccgatggatgccgacgctcgtgactcacagacgtgtggcagcacgcgggccgaagctcgacaacacgtggacgggcgccgccgctcgttgctcgcggacgtgcggcgacgcgcgggccagagcttgatggcacgcggtggagctcctagcgcgcagacgggtggtgacgcgcgggatagagcttgacggcgcgagcccgctaaagtgcggtggagctcctggctcgtggacgtgcagctgcgcgacaaagcttgcgggagcacgacggagctcgcgacttgcggacgtgcagtggcacgcgacgaagcctgcaggagcatgactatgtacggcggcgcccgacgaagctcgacggaggtcgacagtgcgacgcttggcactcgcaatgtgctcaatcaaatgccttcgacttgatcccacctaatcctccaaccaaacaaaaactaggaccatcccatccctcttcaaccaaacaagcaacttggatggacctattccaaaaagagaaccgctagcgcacgggatcccttgagggattgagagtcatgggatagttaaatgaatctgcccacaccaagctttagtctcctagcacgctacctttttttttctttttgttaagacatcgcatgcggtctcctatcgtaaggccatggtgtcagggttatggatatcacatacccaatagtgatcaactaagctcggtagggcccaccacataccatgccttatacggaatcatacctcgtatatagaagaagttccggataaggaaggacaaatagagttctatatggaaacgacaaggactactcggattgtatccatattggtctcccaagttctacttggacaagggggcatctatgggtagaaatacaagccccccctaggaggaggggacagatcaacaagacacaacatatacgcaagccaacacacgctggcagatctcgacatcagagattagcctaaatataccccatccggtgcctacggaggccggcaagagggatctagcgccatctctgatcacgatgagttcatattcgaggaggagactaccccgtcgttaactacgagttggttatccatgccgccaagtcgacgacaactagataggttatcccaaatattgaacttgtgtgattcagatgaataaagagcaacaccggtttaggccaacaggatgtaggggtattacatgttaaataaggggctcgaacttgtataaaaatccttgtctccatctcttttacctcaatctcgcatataccctggtaccgacgatccccataccatctaaataccatagtcatggtaccacccgtcgacaccacgtgtagccaccactcactgaaaaataagctagtgttgtttctgatgtgaggtacaaggcccgacctagcaggctagcaccatacacaatatatctgatgcctatatatatcagatctggaatatatcagatctggtatcaaatatcatgtccggtatctatgagtaccaaacatgatacctatatataccagagctggcacttagatatatcatgcttaatactcatgatacttatatgtaccatatctgggtaccaggtaccatatccgatacctatatgcaccagagatgatacttagatgtatcatgcttaatacttaggtatcatgtttgatacacacagttaatgtgctagtatcatccttggtatgctggtaccaccactaccctaaaagcaaccaagatccaaacaacccatttatctgtttatccatccatcgatccaaaacaacaaaaaacaaagacaaaagaaggttcaagtctagcaactatggagctagaaacgctgttgccgacattatacctgatcggcgttgtcggcaacggccatgctatgcctcgcaccgtccatccatccatccatccatccatccatcccaaaagagaagacacacaaagacaatatctaaatccggtagcaatagagctaaaaggcatcgtcgctggcaaggaacctgccttgcttgtactccctatcacctacatagtattccatggcaagctctccccatcctccattgtcagcatcatcatctccatcctcttcctttctccaaagaagacagagggcacgccatcaaagtggaagaagcataggacaaggagaagggggatcgagcccagagcaacactagtgtgggggaggtcgacatacacggtggatttgcacgaaccttcaccgacatgatggagtagggggaaagacgagcatgaggggaacaaggagagagagagagagagaggggaggaagatgagcttcccggaggtccagaggataaggccccgtttagttccccataaaatttccccaaaaacatcacatcgaatctttggatacatgtatgaagcattaaatatggataaatgaaaaaactaattacacagttagggtggaaatagcgagacgaatcttttgagcctaattagtctatgattagccgtaagtgctacagtaaccccacatatgctaatgacagattaattagtctcaaaagatttgtctcacggtttccaggtgagttatgaaattatttttttcattcgtgtccgaaaagcctccgacattcggtcaaacatccgatgtgataccaaaaaattttcttttcgcgaactaaaccagccctaagtaatgtgtgtgtggtggcctgatactctgatttgttaaatgaattgcatcattaattaatttatcccgttgggacatgacactgttgtgtagattttctgttccaaaaaacagggtggcgccaacctatcctaaggagtctccaaaccaaacatgcttagggtgctactcagatcaatataaccactaggctatatgcactctcacggtttcttgtctttataggtaccagaaaacagaacttctttaatgtacgtgggcacgtggctacgtattattgcttcaagataatatatgatgaatctcgctcgcctagaacgtcattgcaaacattattacattgccgttcatcctaattagtatttgccgcttgaaataaaactacacgcgttgacgcaattaaaaagacattgacttgatcggtatacgcatcagagagcaagaatactacaggcgaactatctcgatccaatagagtaattcgctgctatatcgaattctatgcatacgttgttttccccaacgccatgattaataattttatcgtaaaaacaaacactcaccttctctcaatataacagtgttttaatagctggttagctaagacatttaaagatcaacgttctcaaatactcctctccatctacttttgataatcatatttccagatctaaaaaaaaatttttgataggcatatttcaattcaacaacttatcattttaatgactttctcggatttaatgcatgactattcattcttccacacatgattggctacatgggtattgagaaatataaatattaatgaatcgcttgtttacgaggaatgactagtagcatgtttaaatggataaatagaattaattatccttagtctgtgtgccaaaatgaaatataactatcaaaagtagatggagagagtactaactaatacgactaaataaaattatagtaggagatttgcgttcggaaaccctgtgtttccaacacaagctgtgtgcacggaaaacgaaacggctcattagctcatgaagtatttgctcattttttttttccaaaagtggatcaatatgatttttttaagcaacttcgtatagaaacttaaaaaaaaaaggtcccgtttagcagtttaaaaaacgtgcgcacgaaaaatgagaagggaaagttgggaacacaatgttccaaacacagccttaatagttcagagtttttttttttgacagttaatagttcagagttgagatcgagcatgttgatattctacaaaattaacccaccggccagcggaagaatactccgcgaaatttcctgcgacttgcattgtacaagtcgcacaagaccaaccgcgtgtctccagttaaggtactcctacgtgtatatgtatgccattcataacacgatcatcgatcgagtaaactaacttaattacacccgatcatcgagcgaattgaaagaacaagctagctagctaaacacgatcgagttatcggttatggagaggtggccgcttcccgttgctgcttcggcagctgcagtagctcgcctttctcttctggtcgtgctttgcggtgccatcagtagggcggcggcggcggcgccggtgagggtcggagttgtgctggacctggcgagcggcggcgagggaaggaggagcctcgcctgcatttcaatggcgttggacgactactacggcgccaacgattattctaccgccgcggccgcgcgcgcgagggtggagctgcgcgtcagggactcgcgcggggacgtccttgcggcagcgcacgccggtgagtgcagctactatacacatgaagctagctagctaagctagatgtaacgtatgcacatgctactggagaaatggtttgtagtcccggtttgtaacatcctatagtcctagatagcaaaccgagactaaagatccgggacggttcaaatacccgggactaaagatcgatctttagtgtcggttggtaaaaatttctatattctttcttccctacgaaaaatttctctctgatcaacttccatcaaaattacagaggcaataatgtatacaaaacatatctctaaatgtaatatgataaccaaaaaatattggaggatgaagttactgaccttttagatacctccaatttgtatataatcaccaaaataaattcataaaaaatttcggcaacacctcccctcctcaagaagaaattttgaagcttggctcaggttggataaaaaatactctctccgtcccataatataagggattttgagtttttgctcgtaacgtttaaccactcgtcttattcaaatttttttgaaattattaattattttatttgtgacttactttattatctacagtactttaagcacaacttttcgttttttatatttgcaaaaaaaattttgaataagacgagtggtcaaacgttgcaagtaaaaactgaaaatcccttatattgtgggacggagggagtacatatataaaggaagctaactagtcctggttggcgttaccaacccggtgtaaagatccccgggatctttagtcagttaggatctttagtcccggttggtgttacaaaccgagagtaaagatcccggggggcctgacatagcctaccaaccggaactgaagaacacatagtctcgttgcgcttaaaaagaatttttagttccggtttttattggaaccaggactattatgtaatttggtcgactgatcaaagatactttctccagtagtgacagtggtgctggcttacacggctggtcggctgcacatgcatctgctagctacctcagtataccggagaaaaccaacttctgatgataaatttgtacaagtgtttatctaaatttatttttaaaagttgctttttttttcttttacagagaaagtatgcaccaaaccgtttttcagttttacttaattttgtaaaaatattccatcatatttattattttgattacatgcatctgtttacaatgttattgctaactacgtatcctcgatctattcctccgtgtataagtaatatgtgtatttctcatatctcttagttaaatacatgttgaattttttttaatatttgttgagtacaaaaaacgttttttaattattacttggtataatatctccttaatctgtcgaagtctgtttgtagcttctaggagtttgtttgtaccgtctagaagaataattgttggaaacaagacgattcatttcgtcgtgtattattctccttagatcgacatccatgttacacgttattggggacgttgcaggagtgtccatgatggaccccaaatttaggggaaaagatgaaccggtgcgcatgcctgtgtatcgtaagtatcttcactcttttttgttctctggcattcatctagattggggagatctttttttgggaggggggaggggttggtatttggggtagtattgaacgaggaggaggccggatgcaaaatttctgcctacatggagtgccatgtcggtggtcatctccggtcaaatgaagtttgaacctgctatgattcattaaaccgagttgatggatttagatacgtattttacaagtttatagatctaagtgacacctccgaattttgataagtagtatctatattctttaatatttgacgttgattagtttaaaattaaaataaccaatgtaaaaaaaagcaaaggaaatatatttttgcttatcgaattgtcactcagcacgtacgtcaaaaccacttgggtttggaccaggaagaagaacggttttaagagttaagggtggttcaatatccgatattagagtttatagttgtttataaacaaacgctaattgaaggggataaaattaaattaatggactacttatcccttctcgttgtccttgcagttgaggagttgatgaacaagaacgcccaggtcgaagccatcatcgggcctcaaacctcagccgaagtcgagctcttcgctggcatcgcgatccgcaaccacatcccgatcctctccttctcccctactacctcaccggcgttgagctcaccgccgacacgcttcttcgtgcgcaccgctgccagcatcgcctcccaggccgcgcccatcgccgcaatcctcgatgtgttctcgtggcgcgcggccgtgctccttcacgaggactcgctctacggcatcggcatcctcccggcgctggttcacgcgttccaggtgcaagggcagctgctggcagggtcgtacggtgcgcgtggcgtggtggacagcgtgtccgtgccggccgacgcgacggatggccgcctcgacgcggcgctccgtgccgtcaagatcatgccgtggcgggtctacgtcgtgcacatgctccccgccctggtcgcgcgcctcttccgccgggccagcgtcgccggcatgatgtcggagggctacgcgtggatcgccaccgccggcgtcggcgccgcggcggacggccttagccctgacgacatcgagcacatgcagggtgtcgtcagcctacgcccgtacgtgcagccgacgggccaagtcaggagtttcacgaggcggctcaaggcaaggtttcgccgtgataacccgggcatcgacgacgaagacgacgacgacgacgtcgcgcacacgtcggcgtcgctgctctggctgtacgacacggcatgggcagccgccgccgcagccgatcgatgtctccaccagagcagcaacgcgagggaagaacacaacacgacgacgtttctcgatgctctgctcgcgaccacgtttcaaggcctggccggaaggttcaggctggtcgacggcgagcggcaggtgtcggcgtacgaggttgtcaacatcatcggcagcggcgcgaggacggtgggtttctggacgccggagcttggggtctcccaggacatggcgcggcgccgccccaagagtggcagcaatgaggagctgaagcaaatcctatggccgggcgagacggcggccgtcccgatcgggtggagcgagtcggcgaacgggcggccgctccgcgtcgccgtcccggtgaaggtcggattcaaccaattcgtggcgatccgaaggcaacaaaaccagacgagcgccggcggggcaatgatcacaggcttctgcatagacgtgttccaagcggtcatggcgaagctggcgtatccagtcgcatatcagtatgtgccagtcactgacaacatgttatcttatgacaaaatggtgaacctggtgcatgaaaaggttagtgtctacttaccacctccattaatttgcgtttacttggcagcattaacttttattgcttcaactttgatcacaaaatttatttttaacttaaatgggtagaataccattaatatattttagaacgaaggaggtacgaaacaatatgtgctacaagtataggccgataaagggaaactattctaatccctcgaggggatgttccctcgtttgctaaaaaaccatctaaatggttatgaaaaattctggaaaaatttgacaacattcatacaacacatatatacaacttcacaaaatcttaagtccaaactcaactcacacgtcgagatataaaaaagacaaattcagcgtatgaatagtagcgtactgtttatatctaaatttgtcttttttgtttctcgatgtgtagatcgaatttgaacatgaattttggtggactagtaggtatcattatactctacattgtcaattttttttagattttttcacaactatttgtatcgaatttggaagaaaaatgtatacgaggggatatcctttcgagggattagaatccactcccgccgataaacaatgacatgccactaaaataatttatcctgaccttgttgaggatagaattgtattaagatagaacatttaaatatactaaaatttaacaaatgcatccgtctcaaaatataccaatctaatactattgtattgtagaaagccgatgtggttgtggctgatatgacgatcacggcagaacggatgaaactggtttcattcacgatgccattcaccgactcaggagtgtcgatggttgtggcggaaaaggagaaggcaaacaacatgtggatcttcctaaggccactaactccgggcctttggatcactagcatggctttcttcttcttcaccggcttcgtcgtgtgggcaattgagcacaggatcaacccccgattccatggcacgccatgtaatcagttcggagttgtattctactttgcattctcgactctagtcttctcccatagtaaaccccgttcttgcccccccccctttttttaagtactccatcattctaaaatatagtaatttagtactccctccttcccatattgatcatcatataaatttatacaccaagatcaaagataatttaaatcacaacaatcaagataccatgcacacgttctctcacaatgcatgcatcggttaaattataatgccaactacacaccttagcatacacacattctcccgtgctgcattaataattgtattctgatgaaatccgtgtccatgcggttatatgatgatcaatttgagaaattttaaatttcattgtatgatgatcaatttgggaaggagggagtattgaattagaaacaatctagtactacgatatctgtccaagttcatagtactatattatatcaaattcaatactcgattactatattttaagattggggagtatattattatatgattgcacaattttgttactattcccttttgatgacgacactaatcctgatttaattttcagaggagaagttggagagcaacctgtcgaagctcgtggtcatcgtatgggtgtttactgttcttatcatcacgacaagctacacggcaaacctaacatcgatgttgacagtgggacagctgcagccgacgataaacgaattaaagaagggcgactatgtgggttatcagcagggatcattcgtccaaaacatcctaaaagacatgggattcaatgaggacagactaagggcatatgccacaattgaccagtatgccgaagccctaaacatggggtcagataacggcggtgtctcggcaattattgacgaagtgccctacttgaagctctttgtgtctcagtactgccaaggctacgccatagttggtccaacgtacaagagcggtggatttggattcgtctgtccttatcatccctttcaacacatttcacacaacataatttagatagaaaatggatttatggtacttgagaaattactgaaagttatcaaaattttaaactacaaaatatggtactccttaattcctcaagaatcgtagaattttaccaagaaattaacacatatagaaagtggcagttagctcatactttgttcttatacggtaattctttttttctaaatttaggggtggccacgagtggagcagcttgagcttaagtcccacacgtgccaaaagaaacacaaaggaatttgctgatctttagttaaaatttgtttaagaagctcatactctagtgatttagccctatttatggttcctggcttcgccctttactaaccgatggggttttttttctttttttttcaggataaccgaggaatactgttgtgccttttttaacgtagctagctgggattttttttatatataaaaaaaggttaaaacctggactatgcatccctttggatgcacacatccgagctagctaggatgtatacagaccatggtctatgtttttttaactatctgaaacacatgcgagacacgagggcgcttaaatccatttttttaaaacgattcatagggcacttagtatttatgtatttttgttctttcactaagttgttaatggtgcagtaacaataaaactaacaagttatatactaccttcgtcctaaattataagaacttaaaattagattagatatttcttagcataatgtattggaataggaagtattagaaaatatcttatttatttatacgttcttatattttgagacgagagagtaaatgtttgtgcgtgtaatgtcatccaggttttcccggtggggtctccgctggtgccggacgtgtcgcgcgcgatcgtgcagctggccgaggaaaacaggctcgcgaggatcgagaacaagtggttcggcgagcccggctcctgcgcgagaaagagcaacagcaccggcgacgacaagctccggctgaagccgaggagcttcggcgggctgttcctcatcaacgccgccgtgtcctccgccgcgctcctggcccacctcgtcgccgtctcgtcgctgccgacggagctgcggcggcgcttcgccgtcgtcgtcgctttcggtgtatccggccggcgtggaggtggagcgccggtggcgatggctggtggcggcgcggaggagagaataagcgagccgcatcagttggttggggaaccaccgaaccagaaccactcagctgcagggaccagctcaacagtagtagtacagtagttgagtacacaatagtcaaatagtagtagtaatcggctgatgcaagatatcacctcggaggcatcatcctgtcccgttctgtagtagtatttttcttgttttatagatgagtattggtaattgttacacgatcctatcaatacttcaataggttgttgttttataaatactagcaataacagcgcgctacgctgcgcgtgtgtttaagatgatgaataaaaggtagttttcagctggtaatttgtaatcatacatgagataagatttatatgtaagctagcaatttgttgtgcacacataatttagcacaaaggcggaccaaattataggtataaattagctagtatggatgtatgattttctagctaaaacatcacctcattgttcctgagcccttgcatataatgattgcacatgtaatgaacaaacattcatctagtgaacatacacatctccagattcctatcaaacaaaataaaacatatctctagactccacatatatagcatgtgcattttttggaatcccatgtcatcagctccaattgttttggttatctagatacctacaaacaaaggacttccagaaaagataaaccattaataatattgattggcaccatctgagaacaaaaagagaccataaataagagtgatagtatcaagaacacagaataacccataaggtacatattgaacttgatgatttctcaagcagcactgctagtgataacaattgagaagagcatgcatctactacagacatcacacctcttgatctgtctctactctctagtgtacctactacacatatatagaattctaaaaaagtaaatactatctaaatgcccaaaatgtagataaaaaagaaaacatggactattcatatcaacaattttagccatttacatctggtattgatactgccatttatattcagcgcatatctcgacatattgccatttagcttgttatacatagagcctgactgacctaacgaagacaatataaatatgtatatttgtgatctagtaaagttctagctaatatcaaaatcttcaaccgaagtatagatttttttttttgctaaatgtgcaacattccttgtaattgtcagtaagttccataacccttgattgacacagtagtattggttgttgtgtaagaaagatcatataaagatgtagccttttaccataaagaaatgatttgttggtaccgaatgcaacatcttaaaaatgtaatcaataagcctaggattgggagaatggactcagaataagcttgttgtctcataatggatatagagatgaaggaactaaggccccgtttcttttagcttaagattattataatctagattattgagtcagattactataagctagattgttataatatgtagtagaataagcggttagttgtttctttcctagattattagaacctagattattaggtttgcaagtctaaaaaaggagtggggtggcatggtgggtaatttttcacccaataatctgaaaaaagctcacctaaatgagcttatcagattataataagctaggctcgagattataataagctacttcaataagttgtctgtttctttcagcttactcctaataatctggattataataatctcaagctaaaagaaacagggcctaagctaataaaaatggagatacaaatgcacgaataacaatacctttgaatggacaaactgaaaggttcaatgcgatatataccaagattgccaagttcggagaatctttgatgacatatcaatcaatattcccaacataagattgtccaaaagtatatcatacatactctgtcattctgcatataaaaatagtgggcagcaaattaataaataaaatactatctgatgaaaagggaaggaagttgaggagactcaagagatgcagcatctgcccgtagcatactatcatggaaatgcggtgagtatttagaagaccaagattattacctcttagagaagacaacaaagaatttccatacggtccaaatagaagcacaacaattggcaagtggctgctgaaagaagatatttcatcaatatggaacttacaataagtagcaaaccaagaacagagaagagatatcatgggattcgtatatatcagctacatatacatataatatgtgaaacatcttatcggaacttagagggaggatcgatggtttaagtagtggtgcataactgcatatcatgctgtgttagctgactgattcgcagaaggggaaagatagtggatgcgtaggaaatggcaacaacaggccagattaattacaacctgcatgaaagaatgaacacaacaaagaattaggactgcacaagggggaagaaatggctgttgaaatgaactatctgagtttggaacacaggttgctgagaaaaaaaataatttcatatggtcaagtttgattcattctaccctggcacattatagttaaaatctggattatataggcacttaagcctcctttaatttgcattcagtgaaacattatcaatggatcgtagttcctacactaagaactacctcatcccatatcctattatccccaactggctgtcaataactgaaagcctacttggctgttgaaataaaatatctgagttttggaacacagtagctgctctaatggtatataggcttcaatttgaattgtcacattttagctatatgactatgtatgtagcatgttaagcatattctgctatcaataactatttcaattgtagaaaaacactataacataagtatatggttttttgaacgcctgaatttgcacacctcaggagagatatcctacttccccaaaatgcattagtgctcctaaagagagaacctagctagtgcttctcagtatacctctagctaagaggacaaaccaaattaaggaacaaaaataacatgcaaaaacgttccatggccaccgcataggtcaatgatagctaaaatttcagttctaaataggttaggatgacttcatatgatgttttaagaaaagtaactaattcgtatggagggaaaacagaatttacatagatatgtaccactccatatgcactggaggaatacctgcatctagagagggatacctgcatctagagaagcttaataagcactgataaaaaatacagtagggcatttacattatgctctgaaacgctttgagatggatctgcactgtaatctttcttagtgtacatcttacgcagggaaaaaaaggagcacaaatatgaacctcaaatcagtccaagaaagaactttaccttggcaaccaactgcaagctagcagagaacagctgggacttgaataaatgcatgaaagtcccaactgcaagcagagaaccacatgggggcagcggcgttggtactgcaaaagaacagatgccaatcaggaggaagcctttggcagaagtgaggatgtaagagccagaggagagattggaggtaccagaggaagcgatgacgtgaacatggcctttgcagcgtcgagctggccatctggctgcgggagcacaggcaagggatgcggggaggtcgtccggccgtcggggtggacgcgagatcgacaggtgcacggaggagctgagggagcgcaggaatgagcgcgtgcaaggcggcgtgtccctggcaccggaggacggaccaagggcgactggatcaactggtggggcgtcctagaccatcgcttccggcggcccctgaaccagatcgagcacctcacctagcggagtggagagcgcaaaggagagggaagcggtggccgcatggggatgaatagggataagagggcggtggcggctcgcgttcctctcgtccacgcagcgacgatggctcgaagagcgcgggctgcgcggctgcgccggcagcggtggcggcggcgacgaacgcgaggggaggagaagggagaggctgcgaagcgggcaagagggctagggtttggtgtgggctagcgaaatctctgccgtccgttcgcgatccgacgatcccacgggtgtgaaagggccgccatggcgggacacgtgtatggccagatcgatcgcaacatgagatcggacggtggggagcggagacttgcgcgtaattaactggaaattc

SEQ ID NO: 4673 - DNA, 12269 bp, Oryza sativa
tcgaataagccaacaagcaaacagccaatcagccaaaaaaagccaatgcaatgcacagtcaaatcgacacgacatcaagtatcggtaattttatcgatatcgataagaaaaaagataatcttaattatcgatcgtacaccattgtagcacatacagagtactataggagtatttacgcaaacctgcggctggcggctataaagtgacagcattgatgcatcacttttcaagacaggaagtacatgggcagtactatgaatcgatctgcttaaaataactactactccaggctagtaccactcataggagtacgataaaataaaacaagaagggttaatggactccagagtaggaaactggtcagccaaatcttacgtaggtacccagcatgtagtggagactggatgcatttcaaactaatggccttttttagatcacacctaaaattttacaccttgttatacatcgaaagtttaaacaccttacagacaataattaattgctacatcgaaagtttaaacacctaaagtattaaatataggctaaaaaataattaattgcacagattacgactactttacgagataaatcttttaagcctaattgctacatgatttgacaatgtggtgctacagtaaatatgtgctaatgatggattagttaggattaataaatttgtcttgcgatttacagacgaatacagtaattagttttttattagtacccaaacacccgatgcgaacaccccatgcgacaccctatataatacctgatgtgacacgccaaaactttacacccctgatctaaacacccccctaaaacaatatatacatggattgatcttttgtgaaagaactccaactagttcatttcaaactaattaaactataaaaagttgaaacgaaaaaaagagaaacaaatttgaaaaatgaagaagcaaagtgagttcttgttagaggacgaatttagcttattagctacacggaaaacgagaaaaacaattagtatatgattaatcattaattgtgtattaattattaaaaatttaaaaaatatatttattgatttttaaagcacttctcatatagaaagttttcacacgagacacactattaagcagtacgaaaaacatgctaatgggaagtagttaattaatctcaaataattaagcgcttagaataggccctaaggccgagttcatatatgtgcttttcactgcatggaaaacaaggtaaggattgaggtatatgattatttatttgctttttaaaagaaactttgattaaaaaatctcaaaaatttacactgtctactaattcggaaagtgtgctaacgacaaaagaggaaacttactgtttggagctgaaaagaatgcagcctgaggcgaagcttcttttagtccacagagtggactttctatctaattaaaggagggtttgttcttggaaatcagggatgcaatataagtatatgtggattataaccatgtctttaatctcatggaagttaggcagacttatttaaaaaaacaaattcgacatatatatttcgtgaacatcatgcatgcatgggttttaagattatgtatattgtatctcaacacacacctagctagttattaagtgaagtaatttaattagacctccaagaaatacaggatttttccaattttcgcgccgattggacagattcctacgaaagtactgcgaattcttcgacgaaacatcaaattatacatcgtgaaaaaaatattagttactaaaacagttaaaagaaaatttataagaaagtagcatacaaagaagcaacatcagaaatatacagatgaaacatcctgatgagaacggagggcaacattaaaaaaaatcataagattaaaaataaaaaaagtgaaaaatagtcaaatcgtatcctatatatttgaaatgtttctctctcatgcataaaacatagaaattcattggtcgaaagatatatatttctttcataaaataaaattatctgatatatttttaaaaagattttgattacaacaaatacaattaatatatttgtattaattgtaaataaggtatatatacttcataattaatacctctatctctctatatatatgtatgctccctaaggaacaaggatcacagaaaaatatgcaagttttgtgcagcgtgcaggtgcttttttgataatgaccatatagctcctagatatacggtggtgtcagtgccatatcgctttacatgaattttgtagcaacaatataattagctgatttccatagaatttctggacaaaaaaaagaaatccttttgcttccaaagcgctgtaagagatggctgcttgtgttcatgcctctgttaaaagaacggccaaaaaggaaaagggaaaggtgtatagctagattgcattttgttgtttgaattatgcctacctagcatgcattgttcagatatctatgcatgtccttgtttgccagaggccgaccagctagcccaactagcaaaaccgaaaagaaaatgttgggtcagtttctaccaggggataagaaaagcagcgagcatacaattttaaataaaagcagggagttaggattcaggaagcatcatgcaatagccggtagaggggaccaaattaaaagaaaacatatgaaaaaaacgagagtgaagaaagcatggtaaatgcaatagagcagagagagagagagagagagagagagagagagagcaacagcagtagcaaaactacggccaaccgtgcatgactgggttgtgttacattgcatggttcatactgcaaatggaagctaaccacaagcaagctgagccgcaaagcgagcaaggtagcagtcacaaaccctatgtccctagtccctacctaatcctagcttagcttgggaaccagaaaattagctagtgtagtagctgttgatcgatcaacaaacgtacgagtagtagtactaattaaaagaagtactacacagaccacaggtttcatggtagcgagatgcatggaagctaagaacacactcaaccatgggagataattaaaccatggttcatggaagtcggtcgatcagctcccgatcgagtcgatctcgaaggatctatctcacactctccatatgcaatttgcattgcagagaaatgcatgctcgctcactggccgctacagcctacagagaccgacagaaagcaatgacacacatatgcacgcaacgctagctgcaactgggaggggagtactctgcatgtgtctgtgtagcgcgcgcgcatgcagagacccggcggcggcagtggaaatatatatatatacataatcaattgggcagggagaggaggcttagcttagctgtgtgactggctataggattaggaggaggaggcagccgtgggtgggctacgtagtggccgcggtagtggccgtggtagcgacgctagtgtgtgcctctacctttatatatagctctctctctcccgcgcttcgctttgcatgcgcttttccacccagcgtccagcgattgacctcgccaccaccaccgcccttgtctgatcgcgtgcgtgcgtacgtgcgtgcgccgacccatccacccatcgcgccgcgcgcgcgcgcgatcgagagccaccatgcgcgcggcgatcgaacagctgagagtccaggcggcggcgcgcgcgcgggggccggcggggcggtggatccaccgaggcgcgcgcgactaccgacggggcggacagggggatcggtcggccagccgaccggccaccgaggcgggagaggcgcgcgcatacgtacgtggagcatatggatgaatatccctgtatacatgcgtgcgtaggagtatgcgcgtgtggccaggttgagtacttgagttgcggctgtaactttccgtccgagtccctttgaaaaagtcaaacacctgctctctcatgctccttaacgctttagagtttcatattataagactttatgtatagatttattagtatctatataaatatagacaatgctagaaagtcttataatataaaacggatcggaagcactattatagacagtgacatgtgaagtaataaaaaggtgggacccacatatcagtaacggtaatggtactgatattatgatagaggattctcacccggtctaaacataccataccaaagctaaaaacatcaatttttttcatccaaacagttaagtctctaacgttgactaataatgaaccggagggagtatatttttacgaatggactaacttagagtggtggagcttggccttatattaggaatgaaaaagaatgagatttggagaaagagaccctcgctccaaatattttttaagaaaaaattataaacgtattagggattgaaccgcacatcccttaccattgccttataagtgcatgttcgacctacaactgatagggcttaagcgctatacttagcatcataatactatttaaattttacaaaatcatcacataatttcttaccaaagaataaaaaccccggttccttcggctataggcgtacgtggattttacctgactccaccctggctaaaaacttttattttcttgctggatcgactgaacgcataataatcctgataaattagaaaatggatccacaggtcaacacaagcatcgttccaattccaacaggcttacaatgttggcgcaaagactttggaacctatagtagttctgccgctatatatagttttttgaacgactcgcacgagacaatgcaaagttctattgatagagcaggaaaaaattataagattacaaccctggagagtcataaccaggagaaagaaaaaaatataccaccacccacacactggcagcgccaacacacacgaccaggagaaggttagctccggaccggctgccgctaagcgtgaccggccgccgctagaccaacaaaggaacacagacgagatcgccctacagcaagggggtgccaaaacgacgtcttcaagaagagaagcgacggaagaccgccgccgccgtccatcagggctcaaaggagccaagactgggctttcgcccggcaatcacccttgaggggtgagacagcacgacaacgccttcaggagggggaattcatcgttgtcggtccggccaaggccgagctaggttttcacccgccgctcaccacctgcgaatctacggctgatgcaccgatgctccaccaccactcaaactctgccgacatgtggccctgcaccgacgcccccgtcggccagccttcgtgcgccgaagaccgtgccacacccaccggcagctccaccacgcaccgaggtcgcctcttccaccaccagccgcgcctctcgcgccaagccggtctcctccaccggacgcgcctctcgcgccaatccggcctccctccatcggctgcgcctctcgcgccaagccggcctccatctccgccgcccgcgcctctcgcgccgagccggcctccgctgccatcggctacgccactctgtgtccagccggtctccgacccctcctccaaacaatgctgcgctagccgatgcaaccgtctgccacgccctcggcaagccgtccgaggccgccatgcctcctcccaccaccgtcacggtcaccacctcaccgtcgccgccgtcacctcacacccaactccttccccgcctccactgccgcatccttcgacgttgccaccgtctcctcagtcacggccgctgcaagtcggccgccgtcgctgatgccgctgttactagccacgacgccagcagtcgtcattgcaaaccgccggcaccgccaacgcaaccgccccaacgccgtcgccgagctctccgctgccgtcgcgaccaccaccgaggcaaaaccatctccagcgcctggatccggtcgccgatgccagcctcaccgctagatccggcctccgtcgccaacctcaccgccacctccatccccgccgccatctccaaccccgccgccgacgcccccagcaagagaagcagcatgccaccagcacgcacgccatccctgtcgccgtcgccgcctcccccgccaccgtcgtcgccttcctcggcgccagccaccaccaactgccgccgccaccccaccaccttccatccccgccgccaccaccaccaactgctgccaccacctcacaccgacccaccaccggcggccttcccgccagatccggccacggcggcccggatctaggcggtcttcaccgtcccgcgcgtggccccccaccacgatgggagaggaagacgaagacgagggtgaagcctcgccgccgccgtccttgcggccgcgcggctttgccggcgaccgctcgggcggcggcgaggcggcggagggaggaggggggaggagcgggcgacgccggcggtttccgcctcccgtttcgcctgtgggggaggacgacgcgggggcgcggtcttaatagccgctatatatagttgctggcgtggccaagagaatcgccccgccctgtctgacctaagcagaagtactaagtcttagcaccgtcttcattgtcaccgagcttttgcagcttgccgctaaataagctaatcttattttgctcaaatatcgatcttacaagcattaaatgatattgtacttatatatggtcatctaatttaggcttgctagaacgaggctggcaccaaccattttgaagatctcaggttagaacgagaacggtggtaaaccttgggatgtcatttatagaagctttgactgaaagggcttcgacttccttgccattctggttaactggcacatgtaaaataaacattgaacggagttctgtcacaagtgccgccaacagtagtgggacggattctgcaagaaggacggcaataggtggaggctaatataccaatcctgtctaggctagccatgaagtagctttttcaatcctccccatcccacacccttcggtgtgttatagatgtatgctatttttttctaatatattaacatgtaaagtttttttatgttcgcggaaaaaaaatctcaagttgatagtaaggctatctataggtctgcattgaccctgccatgttatcatagctatttgtaattgcaccgtcagaataattgacactgatatacattacattctaaaatacattaattatatgtagagttgacctccggtttatctccagggataggtttcacaaatcagtttgttaaattagttttccaaaaggacgaaatgcgaagattacacaggtgagtgcgacctcctcgattgagacatgcatagttacaagcatatcatacacatgcacatgcggtttgggtgggaattgtgagtggcggtcggagattgcctcggggacggggctccttccaagattgagtgccgccgcctctcgcatagcatgcctatactctcccagtgctcttggccggttatctgatctgtccatgtcgatgtctcctgagacctgagtgcctacgtgtcatgcgctgctattccaacctggcattctggcagttcataacgaagataccaaaacattccatgcatccaatgcaagaacattccatacatccaatgcagtatgcatattactccctcgatcaacaaaagttatacatattgggttggtttggtttgtggcctaaataggccttaccaaattttgtcagtgccaaattttggcaagttttggcatgactaattttggtaaggcaaagttgtgtttggattgaagccaaaataacttaagttcactattgaaatggcctattttcttagatatgccaaaatttggcttcaaaccaaatagatactaaacactattaaaattgtcaaatattggtaagtctaatttaggtctcaaaccaaaccagcacattacttttaacaccaagaccaagaagaaattaaatcaccttgaatgttacaaaatcaagtagtaaatgcaagcatgtaaccaatgagtatttagatgagtccttgaggttctaataaaacatttaatttatctcttcatttaagttttaaattcataaagattacaaataggaacaacttatttgaaaaaatttaaatgtgaaataggtgtaacttttatcaatgaagggagtacaaagtactgtacatgtactagctaagctactgtaattgtctgcttcggtatctatcttgtcgatcgtagtgtcattgctagtggctcgtatagatcgtgggtttgcactacttcatgcaaaaaccggtttgttacgtacgctgacgtcagatgatgtccgggcccggcagcaaattatgctccaataatcaccggatggagttcatcaaatcattaatcaattcgagcggcttcttcgactgcaaatctatgttgattacaaccacacaaaggcaaatactatatctaattaattgacagaccacagatgaattgccggcagcaggggacgactcatggccatgacgagcggtttgttggtgatgaattgatgattcgcaataatttacttgtacaccacaaacataaactgcgaattgtcacctcagtggtgcattagctctgctacccaattcagtgctccgtaatgatacgagtatctggtctctgatacactactgttcctctacttgggcgcacaactctgaaccatgcatctccagagctcagccgctagctcaccgatcagatcgatcgatcatttcctgatcccacttaaacctggcttagtttcctaaattttttttctcaaaaacatcacatcgaatctttgaacacatgtatggaacattaaatatagaaaaaaacaaaaactaattgcacagttagtggggaaatcgtgagacgaatcttttgagcctaattagtccatgattagctataagtattacagtaacccacatgtgctaataacagattaattaggctcaaaagattcgtctagcggttttcaggcgagctatgaaattagtttttttattcgtgtccaaaaaccctttcaacatctagtcaaacatatgatgtgacactcataaattttcttttcgccaactaaacaagcccttaattcagcgcaagctatagcttcaactgtggtcgctcgtgcacaaccgtatatactaccgccctacctagtaagctactaccatttccagccagaaccaaacctaattatggaaccaatcatggatgtaaaatgcaacttattcttcatgctcacctctagttttttttttttttgcctgcccaactgttactggctatgactcatcagagacgattggtatagcttcaattctctctctcccttctcgctctctcccgctttaatttgcgcccacaagaacactatccacggctttattttaccttttttgctgcaaaagaacatgtttgagcaggtatttcttagttggttaggtgatgcttgtttcttggcccatctccacaaacagggaaaaatataatggcgtacgtacaaatcagatgcgtctctctgaagcacttgatggtagtaaaaaacaaggtttatgtttggagaaacagttagtttactgttgatgacaccttttaagtcgtcttgagtcgtcaaattctgccttgtggatggcattattaggacagaaagttatttggcgtgcgtccgtatagcccagagggggccctgaaagtttttctttaactttgtgttcttgttttctgccgcttaattatttaaatggcacctagctttgtaatagtacgttgtacgaaacttttgattcaactttgaggcaatgaggccatctagctacccattattgcaacttgccataatctgagatcgagcgtaatgttgctgccttcagcaaattgctaggcattgcggcctcatgcgcctcccactccttaaatgacaattaaatagttgttgaaattttagagtttgattttagatttaattttaggattttttttatagctttcgttgcatagctctctttttattatcgctaagaagacaaagaagtagtctaccttaaattgtttttaaacatcaaacttcataacctctgcagctagcataactaagcatatatattaccaaactcacaaattgccaatctaaaattcaacaagatctctatggaaaaacatgatattgtgtacgacatgtgtttgtcactgtcacaccagccacgcatgcaagcatgtgacaaacagtactgcttgatccatggagcaaacataattaagcaaaccattctacatatatttcattagttctcgcacaaatcatatattactattacatttttcgtctttctatatacactagtaattaatcctttagttccatgctactagctttttaatcttccttttaaatttatctgcactagtttaattactttctctctcttcttttttttaattcttttttcctctaattaaacaagtcgctgcatgcagggatgaccggagatgatctctatctcaggcatgctcatcacatcatcagtaacactggaggtcctttttctcggtgtagttggggaagccggagctgaggcacgacaccggcggcacggtgggcgtggcggcgttgccgtagacgttccagcagaagggctcgtcgacggtgtcgccggacgccggcagcagctcgacgtcggagagcgtgatgttggtgcacggcacggcgtcgctgcagccgaagtggatgggcgggccgcgcacgtcgtaggtgccccggatgccggagtaggagacgccgttgacgaacacggcggtggtctcgttctcgcagctcttggagaggcagtagtactggtcgatgatgatggggttgcgcaccgcgtccatcctcacgttctcgaacgccaccgccgacacggagccggacccgccctgccacgtcttgatgcgcacgccgttgtccgagtgccggatcaccgcgttccgcaccgtcacgttcgccacgcacgccttggtcccggccttccccaggctgccgatgctgatgccgtgcccgggcccgcaggtgacgttctcgatgtggacgttgagcgtgccggcgccgatggagacgcagtcgtcgccgttggagacgacggtgttggtgatgaggacgtccgaggtgttctcgacgtggatgccgtcggtgttggggctcagcgccggcgagctgatggacaggccgtcgacgcgcacgccgttgcagttgtcgaaccggaagtggaactccgggctgttctgcaccttgagccctcgcaccgtcacgttgttgctgatggcgaaccgcatcgcctgcaaagattagcatcgtacttagcactgattacactgtcactaatcagaggcagttaatacggttaaaaggtcgttgcgttaggccactcaccactgggctgtcacatggtccatgagtgtttcccccctgaagaaaaaaagaaggaaaaaaaatggaaagctattagattcagatagatatgtactccaatattgcaagagtagagatgcaattaattagttgagcttatataccttgtgaggcttgcagggaagatcccaccatttctggcccttgccgtcgatgaggccggcgccgacgagcgacacgccgtcggcgcggtagaagacgagccagttgcgcttgttgttcgccggccacgtcgccggctcgctcggcgcgacgatcgtcccgtcgacctgcagcgtgacgctgccctggcagggcccggtgaagacggtggtgtggatcaggaacgagcgaccggcggcggccagcacgacgcccgcgccgtcgtccgcgcacgcggtgtcccacgccgtcttgagcgcgtcggtgtcgtccgtcacgccgtccccggccgcgccgaagtccttgacgatgtcgtacacggtggccgcgccggccgcgggggcggcgctcggcgccccgccaggcattgggtcggacgacggcgggttggccggcgccggggccgggggagagcgccgccccgggtgaggagccggcgcgccgtggtgcctcgccggtcccggggcgtgcctcgccgcggggcccggcgcctgcgacggcgggtgcgcggcgttgcgcttggcgtgcttggcgtggtggtggcgggcactcctcgcgccatcggcggcgctaatgaagctcgacgcgaaggcaagcgctagaagcagcgcaatggcggcggtcctaccggctgcggcgagctccatcaccgcggaaacctatgaaaaactctaagtgcagaggcgttcgtgcagctctgaactgaatggtgaatcttggatggatggatcgatcgat

SEQ ID NO: 4674 - DNA, 4817 bp, Oryza sativa
agacattgccacactgtgtggaacaattcaacataaatacttccaagtttttcacacgaggggataagtaatagatccctgttatatcaaaaaataaaaaatgttctattttgagcaaagggtgtgtccccatatatttttacgaaagagtgtgttgttttttacccgggggggggggtatgccatgcgtgcgttgcgaaattcgggcccgaatcttcctctcccccgtcgtcgccggggtgaccactgtttctactagtctactagattagtactagtctttctactgccaccgttgtttaatccaaatcgagcagaaaatggacgtgaatctggcgaccagattggccgatcgagcaagatgcgtgcgtgcgtgcgcgcatccttcgcggtcagacattgcagctgcatgcgactactgcgagtgcatgtgtgatatctactactagaattaatcgtgataaagccaccactagctagagaggaggagatcaagagaaaaggctaagctaggtggcgcgcgctttacaactgaattattaaccccgaggggcggtgctgatcactgtactggaagtacatggtagcattcgtgtgcgctggccaaaagtttgattgctcggttttggttttcattgcggtaattcgtcgtggccactagatttctggtggtgctgccgtggtccatatgatccatttggttttaaccatttttctgcccgatattggtgtgcatccgcgtttcagtgcagcactcagggctcacatcaggtcggtacgtacgtagctgctagagattgcacggtagcataaatatatactgtctagctagtagataggtagcaagcctagcatctatcattgcagcttgatagtgttagttagtactagtttaagacagtcatttttgttttgcataaacaaaagcaggcgttctgtcttggcaactcgctcggtgcctggccgaccaaccatcatatcagtaaaattgttggacattttgcaaagtgaggttgtaggctcacatcaaaattgactaggactaggtcaccagaaaacaggcaaaagtctgaaacatgagtatcagactgaataaattgtatagtggaggagagaaacatatggtgcatgctgtacattcagctgtgacacttccactgaaaatagttgaaacaagcagagaaacataaggcttggcttcccctgacagatctgaactgaaccacctcttggtttctcttttttttcactacaagacaaccaaatctaaactgaaccacctcttggtttctctcttctttcttttatatgcactacatgacagcacattcagttgcaaaatcagatatctgttcttggcacacttggcagtattggggagaaaaggattctcttagttcagtgcaagcagctcttgatacggaagtgtttaaactaatggagtacttggttggtggcagaacaaaagagcatcctttgttggaaactggtattgtcaagctgcacgccttgggtggatggatttccggaacaaaagcaaaaggtagtatagcaaattatatagtatatgcaattatatctagaacatactagctactattcagaacataaatctagtcatccgtataaaaacttgcgcacgcaagacgcaagtgcatgcatggcgtgagtgcatgggatcccattgtattcctcaagaaaaacaaaagcacaagaaacaaacgatatggcgtgagtgcatgagatgcatcccattactcttcaaacaaaccaaaaaaaaaaggcacaagaaacaaacgatgtaacaatgctataaaatgctccgttctagcaataacccagggattcagctcagcaattcatgattgaaacggtcatacagacagacactgcctctcaccaaaaatgggttttcattcaggagtgatatatgcgtaccttgattagtactttgacaaaaaacgagacattaattggaatgctccttacgcccttatccatcttgtaatcaaacattcaagctaacagaaatcagggtaaaaaaatggaatcatcgaggcgcatcggtatataaaatatttaatcatttgcttgtaatcaagcattcaagctaacagatatcaggtgtacaaaatcaacctcgaaataatgaggtgatatgttgatacatgccaaacatttcaacattgaacagagttgtttaggtgtttaaaagtggcacacaactatatcacataacaatagaattaactcatgtaagtttatcagagtgttaatacaaaagaatgatcaaatacaatcaaatagcttgtaaccaaacagatgtctccaactcttcacacatagaacttttttggcttagccctacaaactggaagacttaaatctgatggtcggtgaaacctgatagaggctctggaatgaaatatggctcaagcatacatacgtgttctttcttgcttgatacagcagagtgaataaagttctcaagtcaagggcagaccaatatacaagccccaatcaataaccactcactccatgtcttcatctgctttacagaatatgatggtagaaggcatgcccaagcagggtgcacgtagaacaaaattagggcccattcaataatactgcaggccatgctgttctacggaaccaagtagaccaacgtaatacccgattagtgtatgaactgtctgctcataatcctaagaaggcacattgcttcttagcatgctgtggaaccaacttcacaagaaattccattgatgctcctttcagctctgttcaagttcagtagttagcaaatcaggatattgctgtcagggtgtttcagttggtctggcattgacaaaaatcttaacttaccacgaggcttgaaattgaatagtgggggaagagtacggccatttggtaagcgagcatttggatctcgtagttcatcgaagaatggatgaattaacacctccaactggtgcgaggagaaaaaaaggaagatgtaaaatgagtacatagaaacatttacaagagatttcctgatatatgcattaatacttactgcactgcaccggaggtgtggtgagtactgcagaagccgagacacaagatctacagcttcagatggcattcttttatgaaagatctggtgaaagtatgcataattagaatacacattataatttataaatagtaagcaggagacattaactctgaaaataagaggaacaaaataaatgtgaaggctcctaccttgtgccatgggtgagctttgatttgggggaacttaaactcagtgtagttcggattcatatgtttgatttcttcccttgttggagtacccagtacctgaatgaagtacagtaagtctcctgcatgagctaaaagaaaagggggaaactacatagaataatattccactaaactaaatcagatgttaccttgataatttcaacaagttggtcgacgccactgtcaccaggaaaaacaggctaaccaacagcaaataattcagagaagttgcttcaagaaattgggtaatgtatgatgacaactaggttgacttcttacctgccctagaagtagttcagcaagaacacagccagcagaccacacatcaatagctgtcgtgtactctgtagccccaaatatgagttctggggctctgtagtatctagaacagatatatgaaatatttggttcccctttcacctatggacacggcaaggtaaatttaagaatttcagatagcttataaaagatatgtgacctttttttatgaaaacatatgtgagtgaagattactctaattgatacaagggatcataccaggacttttgcactgccaaagtcacacaatttcaactgatgattatgtggattcacctatgacaggaatatcttgtcagacctcattaagctgaaattatcatatacggaaaataatgttgctagtatgcactactcagacaaatgataaccagttaaccacagtacataccaatatattctgtggctttatatctctgtggcatactcccacacagttatgaatgtatgccaaagccctacaaatctgaaagaacagaaatgacaatgaacagttttcagttaaaatcattatcaaaactaatagtgcatagctatagttgtgttgtaaggcgcctgcaaccttacctggtacatataaagtttaacataaatcaatggcatgcgttggctcatcttattgtaatgtctaataacacgatgaacagtttctggcacatattcaagaaccaagttgaggtatagctcctccttcgcagtagtcgagcaaaagtaatgcttcaagcatgcaacatttgggtgatcgagaacttgcatcgtttgcagctcccggttcttgtatctcgcatcttgaagaactttctttacagcaactctctcaccagtttctagacacttagcctgtcaaagataatttaattagtaatctctaaacagaaaggtaatgacagaatggcatataccaatggcccacctggaagacaactccaaatgaaccacgcccaacagcacgctctgcgatgtaactaattgtctgcaatccaataaaaatccagtactataagtttttagaaatagacaaataatggcacataacggcaattttttaataatgtggtagtgtttgccacataaattctatctattgcaacatgaagtactacagtacaaacatagtagtgatcaccatagaccaatgctatgtcagtacctgctttggctgcccatttcttccaccaacagttgtcacaatagtgtgacctatgtccatacta

SEQ ID NO: 4675 - DNA, 24483 bp, Oryza sativa
catcaatagttattgtgtcaagagagattttgagatgttcttcatgtcatgagatatggcttgtgggctgctgaggcctgagagctgagagctagaggctgagggcttttgatttttttttggttgcttttccacacctgtgacgggtggtgagttgaaacctgtcggaggtgtttatcacctttaacaggtatagctcctccttcgcagtagtcgagcaaaagtaatgcttcaagcatgcaacatttgggtgatcgagaacttgcatcgtttgcagctcccggttcttgtatctcgcatcttgaagaactttctttacagcaactctctcaccagtttctagacacttagcctgtcaaagataatttaattagtaatctctaaacagaaaggtaatgacagaatggcatataccaatggcccacctggaagacaactccaaatgaaccacgcccaacagcacgctctgcgatgtaactaattgtctgcaatccaataaaaatccagtactataagtttttagaaatagacaaataatggcacataacggcaattttttaataatgtggtagtgtttgccacataaattctatctattgcaacatgaagtactacagtacaaacatagtagtgatcaccatagaccaatgctatgtcagtacctgctttggctgcccatttcttccaccaacagttgtcacaatagtgtgacctatgtccatactattgccactgaccactacagcttcaacttcctggtacatatgtcaataagagtcaaagaggatggtatcatcataagaattgagtaatattgtgattgatttccagaataaaattaccttatctcttatgctcatctcgctgatatcatctgtcagacgatcagtggctccactagtactcgtttccgggaaacctgatgaagaatctactagacccaccgatgtcataatagccaagaagttttgtaccttctggttcactcctatggaccaagatcctttgttacagagctacacacaatccacctgcaacaacaatcattttagcaggacacataacctaggtactagtagaaaattgcacattagaaacatatatccctgcaaatctactaaataaaaaaatgttaatggttagtcctaactcctatgaattagaagggccaaaacatagttggatcttcaggtacccatgatgccaaactgctgagcacttggttacaccaaacaatttgataagaaataaaacaagctcatattagctttgttgcgctcaattcgtatatcgatgaccctatgaaacactatatcttcccaagttttgagaaatgaatatcttgacagttgggtatacagaagtactgcaaagaaatatactaaagctggagacttttcatccgaatccagatcatcaaactttggtcaaaattaaaagcataacttaactaacagctacttattagaactcatacttttaatcgtcaataaaccttacatccaaattgggggcttttaggcaatgcatcatatttagtccttaaaaggagatggggccaattttgcttgagaccctcactttggaggatcttttgaggctagttttatgtagacatgttgtacacatgatcttctgtaatgaaagtgtacccttttgtacagatgtctactatctgtgtggttcattggtctcatgcgatagtgtatataacacatttttcagatttgagcatagtaccccccagacgcccccatcctcacattcgacatgtattaacatgaaggacttcaccaaagctcgaactttctaagttcttaggtttatacactacaaagaaatgtgtgaggttccgcccccacacactaacaagcaaaagtacatgacacagaacctaaatagctgaattctccctgctcagaaatttgagccgtactgttatagcacatagagcctcttcggcattccaattcaaagcagcacaatccgaattatccctgctcggtaattcgcctctcaccttatagtgtaaagaactctccttggtttttccaatccaaagcaaccacaccactctcttttttaaggtaccaattaccgacaaagacaccattccgaacaataactaaccaagcagatggagattccaaacgaatcgcttttgcaaaacaaataactaaccaagcagagatagatagagagagagagagagataccaacggatcgcttcggcgacggcaacgcaaacccggaggaggaggtagccacggacgcgggagagcgccgtccagcagcgggcacgccctggaggccggatctggagcctggagccgagcgggcgtagtacgtcggcgatgcggcgggctagggcaagcccgcagctgcggcgagggagcggggcaagatcggcgcggggggaggaggaggaggaggaggaggcgggattcggattcgatctaggcggagggcgatgagcaaaatcgccccccttcacctcactaaccctagttcgactcctctcctctctctcccgtctctccgcccgattccaatcgggaaggggattccaatctctgtagccgccgccgctcatgcgcaggccgggctgggccgaactgggcctgtattgggcttctgcattgctgatggccccgaaacggcctgcgacgtggcccaacaagatggctacactgtcactcactcactccgccgcttttcccttgaccccttcctctcgtcgtcgtcggtgcggcgccgccagggaaaatggagtcatcgaggctgcggaggcggcggcgctgccgcgtccggtgcctcctcgctcctcccgttgccgcccgtgcgcagcagctgcagcgcgtcgcatatttctccaaacccacgcagatctccgctttttcccggcggcaaccacgccgcggcaagcaggtgagaagagctcaactcgctgcatgcaagttgctcgatgaaatgcttccatggagccagcttctagtttctcgtgtacatgtacaatttactttttttccgttttctttacaggaattctctgcttcctagatctctaatcatttactttggagttcttagcaatgtttttgggtattggattctatcacttgagaaaatgagaaccgccatcccgcacacaccaaatgatgaagaaatggtatgcatacgtttagtgtgtttgtagcgttgttgacctttgagtaatgtgctgcaagtgagatgaccgattctttgttagttcctcaaggcaaccaacacatgatccgtatcctagcttagattgaagcatacggaactaagcagaaacccgggcgatagtaataagtttattgcatattttctgcacatggacttaggaaggtttcctcaatttttttaatgaactttggagggacttcttcagtttgtttagctcaattttaattcctcggtcagaggaactaagcagaaacccgggcgataataataagtttattgcatattttgtgcacatggacttaggaaggtttcctcaattttttaatgaactttggagggacttcttctgtttgtttagctcatttttaattcctcggtcagaggcttttaaccaaacacgctcaaagtcaagagtccaaatataactatcatagtttcacggcacgttgacagttgacactagattgccagcttgctcatcaaccaaatatcaccatacaatttccagtaggaaaaccaactacatactctataattgtttaacccatcttgttgtactttagtctagttaattgatagttatacatgctaaacccaggactagtattagggtgctagctacgcatacaagatccagaaactgctcacacgttacaggaatcaaataccaaagcatccagtgactgtgtcgctgttcgttctttggtcagaagtcccttacatgcatatatctcattctctttggctctcctcctcgcaacctaccacaaaactcatccttcaagtttccgtgtcttctcgattcagtctcacaatccccaacatgtatttgccatggctcattgtgttactctttgtcttggctgctgcaggtgtggatgacttcatatatgatatactttggtatatgatatacttcatatcttcatcatgttgcatatgtgttccctcataatttgttgtgcaaatgtgtggttttcttaacaactaaaactgtgggtttgtgaaactgtttcttatgaatgtgtggttcactgattgccttttgcattagaacttatagttttctgaaatttatcttactctgtttgttgttcttgcagttctagttataagcctgtgcagaatatgcagaagaaagaagtacaagatacacgacgcaggagatttgcagcaggaaaacatgttctctgtcttaaactttgatggtggaaatgcatacgagcaaattattgaagcgacggagaactttagtgaaaaatattgcattggagcaggtggttatgtgtctgtctatgtagctaaattatcaaatggtaaaaattttgcagtcaagaagataaatgcaacagagaatggccgtttgataaacgagcaaatgttctatcgtgaaatagaggccacaatgcaaatacgccacaagaacattgtaaaagtctttggctactgctgtacagcacgagataagtttattgtctacaagtatatgaaaggaggaaacttgttgacagctctcaagtcctacagaagtgcaagcgagttggattggaagcgcaggttatgtattgctcaggatgttgctcatgccctatcttacttgcatcacgactgttcagatcctatagtccatcgagatgtaacaaccaaaaacattctgctagatctggagttcagagcttgtttatcagactttgggatagctaaaatactggatgctgatggatcaggacacacaaggctcgctggtacaaaaggatatcttgcaccaggtaaacaaaatttattatgttgaacctactgttttgattattatttttcttatcttatgtatttttcttgttgcatgaagctgcattatattactaaaaaatatgctctacgctatacttaatatgcatgaagaagttaccacaatattaacataaattaatatttagtacattttaatctgactgaactcctgatacttcagagctggcatacactacgaaggtgacagagaaatgtgacgtttatagcttcggggtggtagttcttgagctgttgatgggatctcaccctggagactttgtttcgtcgatctcatgccctagcaagaaaagcacaccgatgaaggatttgttggacaccagactcccgcctccagcaggtgaagttgcaagcgagatatttggattgatcacggttgctatacagtgccttcaccccaatccatcaactcgtccgacgatgccatccgcaattcatttgttctccaagttttctagggcggttgatcttgattatctgcatgctgacatcatggagttctgccttctttgaaccttgacctttgtattcattttctacttgtggaatgttcccgaggataaagggaactacacaggtattctacatcttatgcctttgttgatgtgggaaggaagggagctaataggtgtgttgttttacaagaattgctatcatctttctttccccataattgtggtgttgtttatagttgaatatttgttttactttgatattgtatatctcatttaatatgcaagtttacaaaataatgtttaatgatgtaacctatgtttaacaacgttgtagaattgtttcataaattttgaaaaaaaaatcattttacttctcggaactatttcaccggagcacttaaccctctaaactattgttgggttcattttacaccctcaagatattgaaagcggttcacttcactcctctaacgctatctctcttttttgtttttatctatagaagtcatcgcactgaaaatttggtagaaaatatagttgcattcacaacttacgcctcaactttttttatatttttttctcactgtttatgtacgttggaagcagttaaaactgatttaaacatcaacattttaaagttcaagcaaacagccatgaaaaaatttcaaaatatttttgaactttgataaaggtgtcatctatggctctaataaattttagcttaaaatataacttttataaaagagtaacaaaaaaaatagagctgttattaaggagtaaactgaatcatttttaatagtttaaggggtaaaatgagcccaaaaaatagttcagggttaagtgatccattgaattagttcggggagtactaaaatgaactttttttctaaaatttttatggcaattaggaataaatgcaaagtatatatgggtgtaattgcgtaaaaagttgtgtaaattcggtcatgtcagacaaatgtcagcccaaactaggcccgtttaatgctaagacttgtcagtccgaaggcccaatctaacttgcgggcttgtggcctgtgcgaaaactctcgtggtcaaatctgaatatccgatacttccgtttcaaatgcaatccaaggccgaagctgagagagtgcaaagccgagccacggtggaatggcggccactcttttccccaccttatcgccgccggtctcctcctccgacgcctcatagcccccgccccctccccgccggtacggtctcctaccttccgctccctctccacaatgccctccgccgccggttcacgggccacccccgatcacggcaacctcctcatgctcggcatcgagaccagctgcgacgacaccgccgccgccgtggtacgcgcggctcatccccccccccccccctccctttcccccatggcagaccgcttgtagctgtggtggagccatgtctaggatttgttcttagtgccttggctctctgttgcctttgttggttgcaggttagaggcgatggcgagatcctaagccaggtggtatcttcccaagtgagacactatgccccccacctccctgtccagcacacttcatttctgtatatttgtcatgttatattctgtgcgctgctgatagtattgctttgtgcttacaacatttggaaggaagatttactcgtgaggtggggaggcgtcgcaccgaagatggctgaggaagctcatttgcttgcgattgatcgggtttggctttcagtttcagagtttctgttcagaagttgtgcggatcttgctgttttttacatttatgttaaagagttgctaactttttgtactttccttgcaggttgtccagaaagcacttgataatgcaaatgtgtcagaaagtgatctttctgcagtggctgtcaccgtaggaccaggacttagtttatgcctcagaggtatttgatgcttttgtatgtttactcctgatcaataggattatctggtatttactgttatgtcttaaatgctggcatggttctgaattttcagtttgttacagaatcttgtttgcatctttcaatcattccccacaaccaaaaccccgtgttctctctattagttcgcttattttaggtgcagtgcatttttcatcactaacttgtttgccctttagatggtgttacttgttagtagttctttatcttgtgcagtcactcgcaatgtcaacctgtaaaataatcgactgttgaaatgatacattgcatatactactatttacacagtcagagtgaactttattgaatttactttttaaccttgctgagtctctcttacatttctttaaaggctatttaacgaaccatataaattgcagttggtgttcacaaagctcgaaaaatagcaaaatcatttcacctgcctattgttggagttcatcatatggaggcacaggcattagtttccaggtatcgccttggtttttatttctgagttatgaagatgacattctcaactgatgaagcataagttcctttaccagttcaccgccaagcaatagtagatttctttagctcaaacgatggaatgttgtttactgttcatttgttagggattttacgtttttctctttatttttgtggatttagttctagagcacgactagtttctgttgtgaacttttgcacttccacttttttctattgtaaatttgtaatgtccactgggtagatatgttgtgttatccacctatcgtgactggtaggtcaacatgatgtttgctttccttctccttttgtgaacttccaggtttcgatgcgacaacacaaagattgcaatttctcttatgctggtctgaagactcaagttcgattggctattgaatccagaaacatgtatggctgttttagtccttgtgccattgtcttcatcgtacgattaatatgcctgctggtgtgtcaaataaatagtgtatttggcatgctgtttgctctccttgactacagtattctagattaacaagcagagacttgactttaactctcaataatctacaatacttgtttttttaattttactgaaatgtttttatatcaatcactaggaaattaacatgaaactattgcagccgttcctacaagtttagtaagtctgtctcaaccatgcaaggtcattgttctttttattaattaaagaacacctacataggcattatatacaataacctgtgctggaaatgctctagatcaaataacaagaacaacaaagtgggaacaataatgttaacaactaacaagaggttgcaagttgctagaaaactgattgttagaataggtatagaatgtttctgtttctttattggagaaggaacatttttcattattacatgaaacagacatgcaatctcattgattgtaacatttggtctcgtaactcttctgttgtttttgtgctatggtagatcaacagatgatattcctatttcatctgctacaaaagatgacagacaaataagggcgaacattgctgcctcttttcaggtttttacattataggggatgcattttcattattcattaagattttggtagttttctgatgttgacctctgcagtgagttgctgttttacatttggaagaaagatgccaacgagcagttgaatgggccttgaagatggagccttctattaaatactttgtaattcagatatcttgatgttaattaattttaaaatatttacattttacattagttcatccagtgtgttattgactcagttattaaaggttgtttcaggaggcgttgcatcaaaccagtatgtcagaactcatttgaatcagattgctgagaagaatggcctacagctcgtatgccctccaccaaggctttgcactgacaatggtaaaaagtttatttgcatgcccaaaatattcaatcatattattaacaaaagtatttaggatttaatgctattttccatgccactcattgcatatcttcattttttatgtcactctacattatttatttaattttgtgtcttggccctatgttgttgttatactgtttattttctgtccttttgacttgttgaactcgagcatttgaacttatttttgactgcttcttccgtacagagtacagattcctcctaattattcttaagcaatttgcacataattctggcatatgcttttgcaggtgtcatgattgcttggactggtattgagcatttcattgcaggcagatttgatgatcctcctgctgttgatgagcctgatgatttgcaggtaacgtgacaaataaatatgctcagttgatagagttgaacaaaacaaagttcaccatcaagcacagaaaacttttttgcttcttatgacttggtagtttaaaaatgcattgatacacgatcaactctttgctgctacaataaaaaaaaggtcttattaaaaggcaattggtgtggctactgacaaggaggaagagtataaagctaaaccgatggcatttcaatgaacattgaaatgtgaggcttggatagattatatcgtgttcttgatcttaatttgggtagatttggcatatatgtccttgtagtcccaagtaactgcatttggcactatagttgaaggtcggtaattccgtttacctcaagtcatccagagtcttttttttttttcaccctcgactcccaaatctcaatactcaaatctcaaaagtagcaaattacctgccaaatttggttttgttggcattttcatcttgtggtctaccatattataagctttgccatatggtcatcgaacaggtgagcttgtgttatgtcaaaatcgaatccaagccagtcaaacagtcaaaccacattttcaccatcttccccatccctatagctgcctttatgttcctcctcatgtctccttcaatttgacacccagggggattgatcaaatcggcttggcctgtgagcagagctagtcagtatttatgatatcagtagccatgtgatggtggcaggtcacgaagatcaatttaggagttattttttatccaaatgtttcctataattaatatcatagaagatggaattcgcacatcgtcagaacttagaaccatgccgtctaattttcttacattaaattagaacacacttcagatcgacctgctgtgtatttatgttatggaaggaatcttatacttggtaattttactctactcctgacgttaatacagtgtaagttctatgttttataagactgactggctgttatcatgcctgataattgtcttaactggtacagtatgacctgcgtccaaggtggcctcttggtgaggaatattcagatggaagatgtgttgcacggtcaatgaaaactgctcgagtccacccatcactcgcatcgatgatacagggttctgttcattagtagtttagtgaaaattgcaggagcaatacaaagatcctgttgatatagaaattggattgtgtttaggaagtatgctatactacattgatagtttgtatattttggtatattccattcacttttatttagttgactcactctttgaggtatcagtaccagacacacaaaagttacttctggcatttgtattgtttggactgctatcctttacattgataatattagcaaatacactctcctaaacaagtggcgttcactggagagaagacacttcctgtttgatttcagttgaatgcttgcattgctcttttaatatttttgcgtgtaggatccctcctcttccgttgaaaaagcaaaggcaatgccactcatccaactgttgtgaagctaagaacttgatgcatttgcccattgaagctagtgtttccatgtgccatgtggtttatcagtttcagttttagtgattactgaggcgcggcttgtttcgagtgaatagaatagctcgcaatttttagtcgcagtttagttgaaaccatggggcctgtgtgagcagtacaatttgtctgaaactttgatgttggtttcggggctttgggcttgtgcaactgatattagtgcttaatgcctgaaaatgcaaaatgctttctatactttaaacagaatcccaaaatttgttttcttttgagtcatccttatccagtccttgatcattggataggcatggaaaccagtgattaggaaagtacgacagtgcttgctttccctagccatttcagttttcagaagctcgaggcactattgaagatagtatctttttgtttttaggatcagtgcccgataagaaattagaccaaagtgataatgtgtgcagtgttgcatctcctttgggcagagttgcttctcctttatttgcatccaaagcagctgtttgtgatgtgccatcaaagagcgcgagcacacacatacccatgccgctaaacagtgtacgtcaaagcttaatgagttggatataccacccaacagttatggagaaatcaatcataatatctgaatatctgatacagttttggatatagcatcttcaaagattgtaaccttatcttgaaatatgtaaaaacaaaaaaggaaattttttataaagaaaataagaaagggataaaactagcccggagaggtcgttgttgtgccttcagcatatactattcgacagagatttgcatccaagttgcaccctgtgagcaattgcctgataaacaaccaccgaaagatcaatcacaatatctgattctatttggacagaatctttctcaagagctcggagagtttttttaaaaaaataaaaagattccttaaagaaattgtagaaatgaaactagagatgtcgatgaagttcttttcaggagatattttcccagcagaaaagcaggtatcgttactattccaaaaaagctaggaagcatttgattgacggggtcatgccccaataatgccgcccttaagtggtagctgtgtgcctgtgtgtattcgggtcggggatcccctggagttcactccaaccccacccgatggatttgatcaaatctcagtcgtctctttataacaacggttgagataaactaactaattcccactagtttttcttcttcatcctaatatttgtaacaaatcaacgaatactatatatctgaagaatatacaaactgattttacttgcataacctataaattttatggttcatccacgatataaaaatcatattgggcttgtggctctaatgttttagcaatatttttgtgtggatatggtttgtgcatgtttacacgtacttcctccgtttcagaatgtaagtcatcctagtatttttcacattcatattgatgtagattcatttaacatcaatataaatgtgtgaaattctagaatgacttacattatcaaacggagggagtactaaatgtttaacatagttttatacatgaccatagcttcttgtttggagaagaagagagcgtgcaaactttgttaatgttgttggcacttggcagaaacatactcattaggaacataaaaagaagaaaaggtaagtaattttcattcaagcatatgtgattgagggagttaattaatataagttagccataggaaacaattgatggtatgaatttggtcaaatccacctggtgaagttatagctaactctagaggatctgaagttatagctaactctaggagatctggaccgtgtgtattcatgtgtttgatattttgctgctcagttgataccctaattcggatgccaataccttttcgctattattatctttctagcttgacaacaagtgtcccctgcagtctgaaagagatttcaggaaaagaaagcaaacaggaagagtacaagatacagcagaggatgaaggaaaagaaaaagaaacggagttacgtcagcagggcgtacccaaattcaacttgcaggtgtgcaggtggattagttcactatatggtcaatgagacgatgactctccatggattagttcgccgcggcgcgctaactaaatctagtccaataatgtgtgtgattgttaggtactagcaccaactgtttgatctttgggccaattccctatatgcccatgtaatttcacctaatcccttctacgcccttgaaatttgtttgatctcttatatacccctgagtttttatttggatcccttacatacccattccgttagttgaccattagtttgaccgttagttattgtagaaattactttattgtccttgttatattgttaaaagctagaaatgttttatgtgtaaattatttgagttgtgaaaaccaataaggaataaattactaaatatttgttatgaatttttgaaaataaaacattatttcattaaaataaaaaaagatttattgtaaaaaaaagttatgcataagatttgaaaattacctttcaacaaatatttagtgaaaaaagattcgttgtgaaaaaacaaaggggatataattagtttatcacaaattagaaaacaaatttaaaatttttaaataaatttcagatcaaatttgatgaatttcgtatatcttcccaaaaatttaaacctaaataacatttagtttttgctcttaattttctggtgaaactaatgtatggatttaatcataatttttaaaaaaataaaaaataataagttttattttttaagttgggcattaaatgattatattgcttgtattttgtataagtttatttttcatatgaaaatttattgggtaggtaccacacatatgtataatatgggtaatatagtcattttaaaatatttaacggtcaactaatgatcaactaacggatatgggtatagaggagatcaaaatgaaaactcaggggtatataagggataatgtcaaattcaggggtattgaagggattgagtaaattttcaggggtatatagggaattttctcttgatcttttgggtgtgcagtgtgctaacatcttggtgataaactatgtgcaaagctctggtttacccgactccgttggccgggtatacgcatacagaccgatccgcgtgccggtgtcaggggctctgcctgcgcctacccgcgctgtaggctgtagcgatggcagtcatgtcaccacggtgcgacacgaatacacgatgctgccgagtgcgaactcgctctgcctccaccgagagagcagcgtgtggcacacgtgtcgtgcggcgcccgacgagcaaagctgttgtacacgcggagtacgcacgctcctctcggcgcctcgccgaagcgcgcgagttgcggtggtacacttgttcggacgctacgctatctgcttcggctcatcgcgcggttccgcgacacgaagcgtaatacacgcgcgcgagccaaaatcgaatcaaccaaccttctgcaacgccttcttttcttttttttcccggtgaaacgcggccgggcaggcaggcggccacgcacacgcacacgcacacgcacacgcacgtacactggcgcgcgcggacgatgcttttcccgtgtggcggcgggagagaaacggcgggtgggcgggtgggcggcgtgggtctccgtggcgccgcccatgcagatgatgcagtgtagcacggcacggggaacaccgggaagaggagaccgaagaagaggaggacggtgtggttccggcggcgcgtggcgtggcgtggctgggcagtggccacactgctctgctttgactcgggggtcgcgggaagcggaagctggtggtttttgctttcgttgggcgccccacgtacggggttactagtacgggaaggcgcgggagaaaacggagaatcgcaccggttgactcgacgacgacgccgccgcgtagggggggaaaccgaaagatgaggcagggtggcgtgcagggtacgcacgcactgaggggcgccgtcctcctgcgcccactccacggatgacggatggatggagagctgccctgcgccgagggggaaagggcccctctgacttttcgcatcggctctaattaatcccaacaccgttgaaaagttacgcacgctagctacgccttgatccttttgattgtttgattgattgccatttgaaaaaatgcttccgtgggtgtccggttgtatataaagaattactgaccatagttcacttaaagtagaagtgcatatcaaacttacggtgaatattggatctgtaccctctaccaactatagctattagcagacttggcaaattgatgttagggggataggggcacaattttctctccgccgtttttcttctagtcaatatgcctagttattttctgagtattttcgttaataatcacgagaggctccccgcaaaaaaaaataataatcacgagaggcaatcggtcacgaatgaaactatgaaagcatgagctcaattgtatatagcaacaagaaaaggctaaggctgtgttcggacccagggttcccaacacctctccatcgttttccgcgtacacgcttttcaaactgctaaacggtgtgttttttgcaaaaagtttctatacaaaaattgcttaaaaaaatcatattgattcatttttgaaaaaaaaattagctaatttctaattaatcacgcgttaatggaccgctccgttttccgtgcgaagaagatttgttcccaacctcccccagcaaacacagcctaaatactcatgtgtttatgctagtatttaggggtgggcataaaaaaaccgaaccgaaatgactgagaccaagaaattcggtcctaaacagtaaaagaccgaattttattcgatcaattcggttagtctcatcgcttaattgaatagatcgaattaacaaaaaaaaatctaaatgtaacctataatccactaagttcaatatgattaaactctaatttccacaatcctacttcttctaggcatgcaacctaataagagtctttactcatacgtgcttacttttttttatgttgaaaattttcattatttctttgcatataaaaaaatattgtggaattttagtcaggaccgagaccgaatttgtcgatcctaatatttttgtgttgaaattcggtcttcacttttcaaagatatcgagaccgaaattttcagtcaaaccgaatacccacccctacttgtatttcgaaattaacatacatcatttttttaaaaaaaatatagccgttatgttaataactgccagtgtaaatcctttacattcctcaactactaataacgacgagtataaccgtacgctaaaaattcctacaccacataacggaaataaacggcattcctaatcgagtttcttcattaaaaaaaagcaaaataaaacccctaaaaacggacggtctccggtctccacacgcgaaaggcgtgaaaccagtgcacgcatcacccatctcgtaagccttagccaaacgaaacacacccaacacaacaccacacaaggtcggcaaaccaaaccccacacacggccacaccgtcgcgcgaacgcgcacgtgccggtaacaccggtacaccccccgcgcgtcgccacttagccaagccggtcgcggccacctgccggtcacctccgcccgccacccaccggctaccgcgggtggggtttgggtgcgcgtggccccccacacgcgccaacgcgcgtaaataggggcctccctcttttatctcagccgctttgtttgtttctttctttctttctcctcttcggatcacgcaagaagaagaacaagtctccgtgttcgtgttcgttgtatgttttccccggaaagaagctttgattgcagccgagtcaaaatctttcgagagagagtgctttgcgtgtgatcgagagaggtgttgttggaagcttggttggttgggggagttcttggtttggtttgtggggggtggtttccggttggatttcgcggttggggaggacgagcgggttgttgagcggttcgggggaggaggcggtgatggtggccggggcggaggtgatgcatcaggtcgtgccgctgctggaggcgtcgttccaccgccggtgctccgtgaagggggtcgacgaggtgtcgccgccggtggaggagatgtcgccggaggctgcctcggaagccgccatcgaggtgcctgaactggtgagttcttttttctttttcttaataagctaatagggggctttggctatctttttcagtttgacgattcgctaattctagagctgggcaataactcgtgtttcttgattttttggtaaataaatattctaataattgttagtgttcctgttgttaattctagaatttttcttgcttatgagttgaaaaaacaggagttttttcttttgctttttaatcttggtggaatttttacttgtgattgtggcaaggtggtgagtacttactcgagtaataaaaattaatccaacaaaattggcagtacggacgcaataccgtgtcgtggttggattagattacggttataccttatttgttcaagtattgcggacttttactttgaaattgaaattcgcacatattgagtccatatttgaccaattcagtattgaaatgttcacgtggctaaactttttggttaatctagccagttagatattttcatgaaacatccctaagaaaggatgaaaactatttgaatgattggtcggtgtgatggtgggaaactcaagactaacttaaaaggtggaaacattttccacgagatgcagtgtagaatttaaaagctgaaaacgtttcccacgaaatatagtgcaggatgtctctgtttttagtcggcatactaaagagggcatgctgttcaccttggatgagcgtcaccataattaactcctttttgtgcttaatgcagatggttaaggcacccgtggaatcactacagttttcccccaacattcgatctggtagctttgccgatattggacctaggcggtacatggaagatgaacatatcagaattgatgatctttctggtcatcttggctcactgttgatgtgccctgcacctaatgccttctatggggtatgcaagaaactaataagagcttcaaccgatttttatcatattttgtactgcgaattagttgattacgccgttgtatttttaggtctttgatggccatgggggtccagatgcagcagcctacatgaaaaggcatgctataaggctgttctttgaggattctgagttcccacaggcattagaagaagatgaatcattttatgaatcagttgagaaatctatccacaatgcattcttgagcgcagaccttgctctcgctgacgatttggctatcagccgatcatcaggaacaacagctcttgctgctttgatatttggaaggtaatgtgaacatgcaatacatatctgtgtatgctgcagatcaccatgcattatgcttgtatgtgtgctcatttctgtttccatcatatgtgcaggcagctgttggtcgcgaatgctggggactgccgcgcggtcctgtgtcggaaaggtgtagctgtggagatgtctcgtgatcacaggccaacatatgatgcagagcatgaaaggattaccgagtgtgggggatacattgaggatggctacctcaatggagtactatctgtgaccagggcattgggggattgggacatgaaaatgcctcaaggctcgcggtcgcctctcatcgccgagccagagttccagcaaaccacactcaccgaagacgacgagttcctcatcataggctgcgatgggatatgggacgtcatgagcagccagcacgcggtgaccatagtccgcaaggggctccgacgacacgatgaccccgagaggtgcgcgagggagcttgccatggaggcgaagaggctccagacctttgacaacctcacggtgatagtcatctgctttggatctgagctcggtggtggttcaccgtcttcggagcaggcgccgatcaggagggttagatgttgcaagagcctgtcttcagaggccctttgcaacctgaagaaatggctggaacctaatgagtagatgatgatgataatgggcaggctttttgtttcctgctgtgtaaataccttatgacggctgttctcacacagccagcaattttgtagggagtcgtttttttttttttttttgttgtttgccccttcatcgatgtacatatatactttatcgggttcacccgttcatgtattgttaccgtgccccctcagtgaaaatttgcagtacatttgtcgacttgttctttccagtttattctttattgtcatgttcaattggttatactgcttgattagacttagctagattgcctatccaaaggattgaagacaatgtggatttttgtccttcattgtgttctgctcttggtttgcatccaccttagatgtagacagtactttctgtagcatagtagcgtgctactctagaacagaggaatatgcagtaacctgttggatgtagaatgggttgtgacgagaataggagatcttatgcaaattccgacagagaaatcatggagcaggagtaacaggcgaaaaaggtttctgctctactccacggtagctgccatcaccgtgatggaaaggaaaacaggggcagccgcgttgtttgacgaggctgaaaagataaggagtttccgcgaccgcgcgacggcgcagttgagttgaagatcccatggctttgacttttgatcgactcgcgttgtatttacctgcctacttggtcatcagaagtacacctcggaagtgttacaaggctgacctgaatttgtaatgcttgcaatgagcgttattttcgcccccaaaacatgcttacgaagtcaagtctggccgtcaccttgcaatccaaaagaaatcgtagaaacattacatacatgaatttatatacaagttcaccccgaaacctagtcagagtatgacaatattgcgaccaatattgtctttttggtgtggtgtggatctctcataggtaaacttgtccaggcacataaacttgtttgattgttgtgcaaaagacttgagtacttcagattcaggggacaggggacgcgtcacggcaaacgtgtggaccgggggctctgcgaattcgtcgtcggccatcaccgaccgcggtgctccctgagggctgggccatgctacggccggcgcgcgtcggctggcctggttggagttgggccgcatgggccgagatggcgcaccgtttatttgctgcaagcaacggcagcaaccagtccggactccggacacaacacctaccggtcaaattgtcaagtggtaactcgacaagaaggcagcaaagccagcaactagtccctgtgtggctgtgtgcacttgatcactttgatgagcgatcgctcgcatgatctccttgagcttaaacccagcttaattagctcctatggcaaccctcagctatgccctctgtttcgccatcgtcgctggcgccatcgcggcgtccctctgggcgatgctgtcctcccgcaagcgaccgccgtcggatggatcgtcaccaccgcacgcggtggacgacgccgccgccgcatcgatcggttcggccggggcctccgcgatgtggagcagccgctggagcggggtgcgcccggcgtggctgctactcgcgtccagagccgccgccgcggtcgccctcgccggcgtgctactctgggacgcgctgacctacgacctcaccatcatggtgtactacacggagtacgtgtctagtgtcaacaataaatcgcgtagttttcttttcccatacctctctatctcgacaacaatatttaatttagtcttatttacaagtaaaaatgaattgatttcgtcccatcaaccttctcgcagatggaccttcatgctagagatcgtctattttgtggtactttctccacctcttttgcaaagttttcacgtactctatccgtcccataaaaaaatccaatcctagagataaatctagacatagtgtatgtctaaattcttccctagaattggattctttttggtacagagcgagtacgactcaatcgatgcacgcgtggaacttgcagatagctacgctcttttctgcatacggatgcttcatgtactcaatgcaccaccgccatgtcaccatgctacccgagatcgacgagagcttggtaggactcagcggcagcctaatggagatcaaccatggcgccgatcagaagggaggagctggactgaaccagctggggcgcttcatgcagattgtctaccaggtcagcagttatatattttaaccttgatcgtttgtgctggctgccgcagtgcagcagcagcccagcttcaccctgttgatgctgctgcaaatcaactgttctgtgtagatctgtgttggttggctgcagctgccgcagcaagcactaccgatcagaccctttgcctctccttcaatttcggagtgacacggagatgatccatcatccatggaactcgtataatctctctggcgtttcgtcttcaggtcttgggcggcgcggttgtgctgacggatgtggtcttctgggctctgatagtacccttcatgtactcctctcatttcagcctcaatgcagtgagtgacagtatgttgcagtagtcagtgtacatatatatcagctagagatgtgcagtcgtgtagaaaataaaaacaaggattaggcttaacattctttttgcgaaactaattaacctaaccattgagatatgctccatcgatatccatattttcatctgacctcagttttgcaggtgatgggctgcattcactctttcaaccttgtgtttctgctgatagagactactcttaacaacttggtactcaaaatcgaactaaacaaacttatgcccaagcaatttcgttcagaataacatatttcgttcttttctgaatatatcccaggagttcccttggttcagaatgacgtatttcgttctttggacatgctcgtatgtaatcatccaatgggtcgtacatgtttgtggcttgaaatggtgagatcaaataataattccatcggttgattctatttggtaaaaaaaaagttaacaacaaattttagtttgcatcctctcaatttgacaaacaatattctctataccgtcctattaccatccaatatttcagtggacaccaacggaatgggctacacacaatattcaagtagtactaataattcttaagaccaggttatttcgggcttcaaaatttttcagctgcatattaattttctttgaaaaaacgtacgtgcaggtggccgtacccattccttaaccctgcagcaccatgggctccactatggtacgtcaaacctatcatcggggcattagacatgtggtaatttggattcaagtcgattatgcttgaaccttttgaaattttgaataatcatgcaggtatttctgcatcgcactactccatttggcgtgctacaccgtgtattgggccattgtaaggggaacgaattggtggcttagatcttgtactatccccacgcgttaattatagtgtggatatataatggaatacaatagtactagtatttgtaaagggactagctatacagttgtgatttgtcgtcaaattttataactaaatttttttgacaaatgcaaatataatacaatcttaatataattacattgtaacttgcatttaactatagtgtaactttcaaaaatctctaattgacatgctattttcgtgaaaacggaggcattggtaccgaatcccctcacatgtgcgtgggttgtgattttttcctacccccgcacaaattttaaatcatttcgaacggttcaaaatcacattataattgcatgcaagttactacatagtagttacatacaaactacaaaatagttacattgagattgtactatatttctatctatcaaaatttttagaagaaaaattatcaataaatatatagcaaaatcgtttgtaaatgccacaatacagagactgcatccatatccattgttgatcaggtttatgtgtgtgtatatcttcggcacttcattgttttctgtaagcatgcttgttaccaaagatcgatgcgtgcagggcgagatacaaagcacgaagggcgtcgccgccaacagcgggcagcggtgggcagccgggcaggagcacctcgccgccggcatcgctgttccgagcccatccagcgtgctatgtggctggccaaactgcaatgggccgcagggaaaattaacaaacggcccgacaaaacttttagacccattaaagatggccctcattgtatcgcgaaccaagaccagcccgtggcaaattaataaacggcccgataagtgttgcggctggcgtgtcgcgtggaggatttcacacgtacttttttatttgtaaagttgcaaaaaaaaaagtctacgtttagtttgttaccaaatttagtaaatacataagaaatcctgctaaaagtttggcaatattgtcatcttgccaaaattttagtattgacaaaattttataaagtttattttggctacaatctgaatgggacgatgggaatcatgagccaacgtagattcactcccaacagtgttaatctctcttataagtcattttcatttccctttgtacatttttttcccgattataacttactctgcataacttcaaatataagtcgatttcgatttatgaatgaaaatcaagaaaagtatactacacaaaaagtttaatattttatttgtcaaaaaataaacattggacggagaaaaaggcaatgctaataaattcgaaagcaattaatatttgtgagtctcttttgttcacataagacacaatggcacataaacacccaccgctaacacatgctaaaagagaaatatacaagtggcaaatcctggctaactaatttaatttattaaaatcgtacttacgcgtgtgtaattattattgatacatctaaaacgggagagtaaaaaaaaagcaccatgggtataccgtagtcattggtaaatgatgctccctccgtttcgaaatgtttgacaccgttgactttaaagcacatggttgaccgtcgatattattcaaaaacttttgtgaaacatgtagaattatatgcttacatccaaatatatctatcaagg

SEQ ID NO: 4676 - DNA, 25792 bp, Oryza sativa
  unsure (1)..(25792): unsure at all n locations
agtttatatgcacacgcgtacacttatctatagaaaacatattcgagagactgagccaatcatatatcttcaaattagtgaagtcatcataaacgcctcgctattgatagaaacgttgcctactaaaaaataattagccataaatataagacccatgtcaagtctagatgttaaacctaggtgggtaagttccaccataggtaactaactagccacactcactaattgcagataatgtggagcccctgttccctctccttaactccttttttccatacattatttgagataaatgtagtatataaataataaataaactattgtaatttttaaattatatatacaattttttttattcgaccacaattatattctttagaattaaatcagttcatatcgatttgaccaattgcgttatatctcacagacaaaaaaaaacatgaaaacatatgttatagtgtcatatatcacattataatcataaataactaaaaatagctctaatatgtttgaaaataaagtttactaaattatattatttaccattaacttaatttatgatctatattgactatactttaatctgtaaaataaaattatattttaggtcatatttttattcttggtctgtaatccaaacggacatgaaaattataaaaaaagatgacagtatggagtatatatcactatatattctttatcggttataatcactatgtaccattaaattagatttacaatataacaagaaacatgtcgtatctttgcgctttacatggcatttgagaattataacaaaacgtgaaaaaacaatttaatgatatgggtaatatcatcacataaatatgcttactatgtagggtgcactctatttggcccaaatcagttcacaaatatgcgcgactgaattagatttacaatatcaacaagtagcaagtcacatccggggccttgcatggcaatcgagaattatgacaaatcatgataaaaaataacaatatgggttatatgatcatataaatatacttatcatgtggattccaatctattcggactatacgaggataatctaaaatgtcaattcaatttaccaaatcatgtataagttgtacgttttgtagactacaccctaaatattaagtaaaataacggatggagtacacgtcgtgttttctcccctttgatttctattaaatacgtatggcgtgtgggtattttgtatatactaagtttggttaattaggaaacataaacaatactaaagttatatatgagaattcatgcattaaaaatacacttcataacaagaacttacttaacaaaaatgtactttagtctatggtgcttaaatatttataaattctctaaacatactaattatttctgctcttatttcaaactaaattcattttctccacataatataagagatcatatgagaaaaaaaaagaggagggagaagaagtaaatagaagtctgccattgaacagatagaataaagacatctataacatacaagaaaatttgttgattaaggtttataaaccccaaatgtaagatatgctaatttctaaaaaacacacacacatggtacacataatagttccatatgaagcaacactattgttgtgaaacaatagtttctcataaattaaaaaccacatggtttaaataaatttgatttagaatttatatgttgaaaggtaattggaagaaaattaaaagcaacattcacaacaatctcaaataaattattgataaaaaaacatgttcagaatagagtaaaaaaatattttaagaaatactcatccacacataagcattcataattaaaattcaagcaacattaaataaggtgtcccgcgcatgtgcgcgggctacctttctagttaaggtaaaagaaaaaaaaactacaattgaaatgcttgctccaataaagcaggaaggtggtggcagagccccactacacttctaacaagcccccaaaattaagcaatagcgccagcagaagaccatatacgaccttccagaaggattggctccagaaccattgagaccaaggaaagtgaaagatcataaacactagaattcagctccttccacagctgacaagagactaggaggactaggaagtcaaagacgatgatcaccatacctgaagtgagcaaccacagggaggagtgaggacaacccagccaggggacgacaacacagggtgccagacctgacgagtgaacacacagtcgagtaggatgtggttcgccgtctcaagatgttgagtgcaaaaaggacagactgagtggctatcgataccacgtttttgcataacaacacgtccaatagcgctgctgaaacataaatcataataaaaacttacatttggcgggaccttttgcttgccaaagcagatcggcacaaacaaaggagtgctgaccgagaaagaacacctggtaagacgagtttgctagtaacattggtcacttgttcaacaccagacaagacgatcctccatgcccgacgagagttggataggaagtataacattccaaaccaccgagggtatgtatgctcgacagtcgctgcagctggtagccacgctggtacgtgatactcctattatgtaattggaagtaattttatgatcaattccaacttctgaactcactttgtctagcatgcatatgtgtgaatacactttctccgttccaaaataactttatctttaaccttgggtatttaaaacaaaatagaagaaaaaactaaagtatcctttattaataggaaagtagttttatacttttagtgtgtgggttggtaaggatgagtaaaaggtaagtacaaattcctcgatttgcggattaagagttaaaagtgaatttattttaacacaaaggttagaggctagaaataaaattattttgaaacaagagcttgtccaaatattttaagacaaaaacttctctatatttgttgttatacattatgtcacattctagattagtacaaagtactccctttgtctcatttaaagtgcagccataatttttttttttgctcaactttgattgtttgtcttatttaatttttttaaaaaaaattaaaaatataagccaatatttatgttttattatctcataacaataaaactgttaattataaaaaaatttaaataaaacggagaaagtaagaaataagacggagggagtaacaagtgaaccgtgacagcgcacagaacatttcacctgaactctgacaacacaactgacattattccgtttgctccctgcagaaattagcctggcatgcagcagtggcctgagataacactattatctgaaagttattttttctcctaaattaagttgagtttaaattggaggtttagtatgaatgtattttatgcctaccatctatctctaataactgttttataaatttagagaacttttaagcccctttaaatcgtaggaatgaaaaaaatagaggaatagaaaaaatgtaggattataataagaatacaagtgcaaaaatagaaaattgtaaaatacagaaaaaacaaaagaatgaccatttgattgaaccgcagaaaaaacacaaaaatcgaatgagagaaatagactcgaaggaaggttttcaagaggttgaagttcttgctaaattttctcctaaatctccatagtatagtctattccataggaatttcaaaggatatgacatgattcgatcatttgtttcaaagggctttataggaaatttttctataggattagaatcctctaaaatttctatgttttttctccaaatcaaaagggcccttagttctgttttttatgggattttctatgtatatttccgctacatatatagctgcatctctgggcatgatcttcacaaggcacaagacatatattatatatttatattcccaaaaaggagaaaaggatgatccaatccaacatggcctccaagcaacaaacctgcattattagagagctgttcagatcatgaacagggaatagcaaaccaatcgcaggaccatacctctgccctgatctcttggtgtgctcttctctcttttgccgctgtaagcaagcacgctggatgcaagcagcactactgtgaaatggaccacatgtgattggacatcaaaggagagcgactgattggcgcgcatgttttcagcgaacttcttgtctgaaaacattcgtcgtctgacgggtagacttggatgtgttttttccttctgacagaaagtgttactgttcggtctatctcaacttgcaagaaaggagctgcaggttctgatttctgaagctctttttttttctcaggtaaagagcaacaaatgttcgtgtttcccagtctgatgacagtatataattactgttctaattcagttagctgagaaaacagtagaagaaatggattctaattatacagtaatggcataaaagttcagccatttgttaggaagtgcatggactggccgtaccttaatgggactgaaatctttatgatgcctgctacagaagttataatagcaaattagattgcttggcttgcacgagccacatttttctttttgtctgtctacctgtgagtataatagcatccttgaactaattattgcatccctaaagcctaatcatgcatcatcaagagagatatgcaagttgttgcctacttgtctacatgagttctacatattcagatagacatggtctcaactacattaattttgccatgcattatcaaactgacgcttgcctaatgctgctgaaaattttcaatgataggcctgcacccaaccttgcaacaaaactaagctagattagatgaaccatcacttgagcctagtcagatgcccataaaccgatcaagatatgaaaaaaataagcattgttcacaaaagagatcaagaagaaataagcagacaagcaggtacagtgacatcaagcacggaccgcaaagcctgaatgtatggtgtgcatgcataaaggcaatagaacttttgtgctatgctgcctcactgtttggctttacaggctctcccccctctgtttgctgctcatttcaaagctacaagatcaagcaaatctagagagagagagaggagaaagaaagaagaagctcagctaggttgccagataatgtttctttggtgaacaaaagctgcaaaaagatggtctcccccataaaaaaactcacaaaaagggggccatatcgcagattagagaatctcacaaccaaagtttcacaggagtgggcatgcaagcgtagcttcttttattttggagcacttcaaccaccgggcaaatctggactgtagccattgttatcttgggccctcggcaaattcatggaccggatttctagtacctgcttgcctggcatgcaatgcaatggttgattgtgaaatgctccaattttttctttatcattatattcagagaggagcactcgttcatgcatggagaaaaaggttgcagtttagagtttttgcaaagaagatgaatgtggataataattgcatcagaggagatgaacctatgaagcgatatgtagcgttaccttaaaaaactgccacaattttttgagtgaaaaactttcagacgtaactataatataactgaaatgtatttagatggtaactacactgttattgtgttgttgcttacattagaaaaatataacaagcgcatttacgcatttagacgaacaccattctagcttggcaccaaagattactacgttcttaagaaaaacactacctctgttgatttgaagatatattgtaattttaatattttgagactaaactttgaagattggtttttttaaatatattgttaataattatatgtcaaatattgtgagaaaattgcgatccctatggtccctacatcactactaaggggcgtgatatgggtggcgatccatcccaccagccaccactgttctccttccttactgctactggaaactgcatggctaaaaggatggcgccggtgatgcctcttcttcttccttcagcaggtaggggtggtgagctacggtttgggagggggggaggggggggggggttaaccttgtcgggtcagctatgtgagtgagccagcttccacggtggtgaaggaggcagctgtggcgactgcaggacagtgtcggatggatacgaggtctccttttctgaatctggaactatagcctatatctatatgactacctatccctcccatggcgagggtggcacttgggatggggagaagatgtttcaactggataaagaatatagtttttatagcactccatgcgtgttttgctatttttttcttaattaaccatgcatttgtatgtttttcgagtccgttttttccgtaaactaggttaattcttttttcttcatataaaatataaaacatgaactccatgtcctccagcaaaaattaccttgaaaaaatattataagtaatttaaaatataaacatattgatatactttctaagcacttaatagtaggcgcacatgcacagatgtcattaatttatcgttatacaataataataaaattaagtaatatcatatttgtttggatttaaatacgaatccatctataatatcctgatagctgggtcctcaatcctcgacgttgtggcgttcatttcaaaaccgtatgtggacttgacagttggcaggccagagaggaacaaagtagagttgggcctccactagccggactcgtcggcctcatactcatcttcaggaatatgtgtactgtatgtttaatcagcctaacatccttgactaaggtgaaaatagcttatgttgagcccatcatcctccagccgtccagcgatcgatggccccccaacacgtcaccatcgagccatcgaggtactcgtgtaaatcctctcgctcactttgtccccaccacaaaatgcgcagcccaaccggcaacaatgagcttgcttatagtccattaattatggttctgtcccaaaataaaagaatataacataatctaatacaatagattttgaaaaaaaagtcagatttgtggtattagattgtgtgacttgtaacacattcttattaaggttggtttattttgtaatggagggagtactactttttttttaagaacaattcagtactaccttcgtacgtttctttctagcatataaaacacaaattaatagagaatataaataacatatgtccttcaattaaactagcttattaagttgtgcgttcacgcaactgtaaccttcctctcttttagatgtattttcattttgtttatagtaataagtttaaatgtataatgataattaacaatgtaaacaagtgtgtgactctgtgtacgcaaacaagtgtgtgtacgatatcattaatttcacatgaagtgtagctgtaaagccatatatatctaaaccgtaatttatgataattgtattatactttaaatttgatttatttatctttatttataaatcataggaccctaaaccctgcacattcatttaaaatgaggggaatgaaagatctaaatgaggattatgggcatgagcctaaattaaccgaacaactcctatgaggagcaaacaaacaaacaaaaaaaaaagattacggcttgactcaaggagagatggtacactgaaaggaaaattttgatgcaaacaaaaaggaaattagagagcttaaggtattgcaatattgttcattgatggaaatattaacgtaaaagcatggacagataaaaattgaactactattacgacagtttggaagctagacaaaataaaagctatttgtgacaaattggaagctagataaaaacatgaggaccatacaatttagcattctgaaaaagttaatgaactaaatgcttataacagtattcttctaatatactgaacaattacagtcaaaattatatatgctaaaacttcaattacatgcatgactgaacatttggcaagagtccttatcgacaacttgatcttgtgaaaaattgttgtggttagaattaggtatgtgcatccaatttaggcattgtaaatcacatccaccatccgatttagtgaaggtatcaccaataggggtgaaaacggagcgaatacggacggataatgctcttaccgtatccgttttcatattgttaggcggatacggaaacgaatacgaataactcggatacggaaacgaatacgaattatcgcggatacgaataaggatcgaatatgatcggacacgaatacgaaaacgaatatttctcggaatatagagaccactcaaactgctcgtagatacaaatgcaccacatatatttatctaatttaatataaatatcatcgttgtaggacgcatcacagattaaacaaagtgtatcgtgttcaaatcgaaacacgttgaaaagttcaacacatattgagttctagttctataggtaacaaagataagatcaaaatagtaattagcccaaagcaattttcagtacacttgcagtctgatgcatgaaaactgcaacatcattattcatccatttcatccatcagaatatcatcctattccatgttgtcggtgacatggggccggaggtatcgtgactagaggcttgggtagccgcggtcacccacgtggcctgaccccctcgggggggtcgggcccgaaggtgacgtggccacccctccctctgtctccccgaggggtcgggccgctcccgtttcggccccgagggctggggcgccctgaccccctgtggttttggcgccacgtgtgtgggttaggtgagcacagcgggttcacctaaccgcatttatagcaggttggacgagcgcgccacgccgcatttaatgcggcgcagcgcacgcttatccggtccgtgaccggtcgcggtgagtgaccggtcacagaccggtcagatcgcgggttaggtggcaataggcggcctgtcacacgcctcgccccgtcccgtcggaatgatgaaagcttcctggctctcgtccctagccggagccggcatgccaactccaggagttggtatgtcagtcccggtcagatccattccaggcttcagtgcaagtatggcaaggaagtcgctggccattaaatgaaggttgaaatgggcgtccaccggaaaagcgggcgagcggggcaggaggcgtatgctctgcttgtcagaggtcatttccggctgtagactagccctcattgtaaaaagcatgtttcccttcttaggcagctagaggcccatgtggtgacccctgaccagataaaaaggagacccaggcctaagaaagaaaaaaaaaagaggagaagagaggaggggagttgggactctggcgaatggtttctagagcctgaactctctctcgctctcggctctctggattccttcactcacagatccaccagaacacaggagtagggtgttacgcttctcagcggcccgaacctgtctacgtcgcccgtgtcttgtgcatttcctttctcgctgacgttcctcagatcgagggcgaagaacctcacttagcgtccccggccgaaccggcaaaggggggcctgcgcggtctcccggtgaggagccccacgctccgtcatctggcgcgccaggtagggggcgcgcgtgtctttctaagcccttgtcctctttcgtgtgcgccaagcttctcccgctcagcccaatggccgaacgggcagtggcgcacagcctctctccgaacgctagcggtgacgactgggagcagaacccgcaccatcgggctcgcaccccaccgtccccctctcgccgaaatcttgggcggggggaggcgctcggggaggtcggaggatccgcgacttcgccgcccgcgggcgacgggggagggcggcgagacggggcgcgtcgccgcctcgtctacggcgatggcggcacgccctagggcgcgctccaggctgcgggcgcgctcctgcgtcacccgcccgtcgtccccgatccagagactccagcccgacgttggctggatgatgtggccgacttggtcatgacggcgcagcagcgcctaggcgccggcgggcggtcctctgccaccgaggcctctggcgctgccgccgccggctccacgtcgtcgaggcggagggcgcggcgagcggcggccgttacccgccgttcgtccgccattccttcgtcaacgcctccgacccaagaagatgtgcgtggggggccggatgcccgcctcgatatcgagcgccggcgtgacactcgtcgcgccgcccacgcaacggagggcgcttcctcgtccggagcgccacttcggtccgggcacgggggccggccccccgtgtccccggttggcggtaccggctgtcgagcctttgtggcgagccttcggaacgtccgttggcccccaaggttccggcccaccatcaccgaaaaatacgacggaagcgtcaaccccgccgagtttctccagatctacacgaccgggatcgaggccgccgggggtgacgacagggtcatggcgaatttcttccccatggccctgaagggtcaggcgcggggttggctaatgaacttgccacccgcgtcggtccactcttgggaggatttgtgccagcagttcaccacgaacttccagggcatatatctgcgcccaggcgaagaagcggacttgcatgcggtacagcgaagggacgatgagtctcttcgctcgtacattcagcggttctgtcaagtccgcaacaccataccgtgcatccccgcacacgcggtgatctacgcgttcagggggggcgtgcggcacaaccgcatgctcgagaagattgcctccaaggagccccagaccaccgcgcagctttttgagctcgcggaccgtgtggctcgcaaggaggaggcctggacctggaactcctccggttctggtgtggcagctctggccgcccccgtgtccgccactcggtcagggcggcgggacaggaggaggaagaaggggccggcccgttctgacgacgagggtcatgtcctcgccgtcgagggtgcttcgcgggccccccgaaaggggaggcctgcgagcgacaaaaagaaggaggccggcgctcccagcagggagcgcccaaccggcaagtggtgtaccgtgcacaacacccccctccacgacctcgcggactgccgcgcggtcaaaagtttggctgagcggacgaggaagtgggaggaggagaagaggcaggagcgccgtgagggcaagaccccggcggctcccgccggcaaccggcgaggtgaggccaagcagaaggccaccgccgaggacatcgacgatggcgacgatgacctggggttccaggagcctgaggccaccgtcgccaccgtcgatgggggagcatgcgctcacgcttctcgccggagcctcaaggccatgaagcgagagcttctggccacggcccctacccatgaggcgacgcggcgggcgcggtggtcggaggttgccctcaccttcgaccagaccgaccacccgccgtgcgttgcccggggaggacagattgcgatggtggtttcccccaccgtttgcaatgtgaagttggggcgtgtcctcatagacgggggtgcagccctcaacatcctttcccccgtagcctttgacgccatcaaggccccggggatggtgctccggccgtcccagccgatcatcggtgtgacgtcggggcacacctggccgctgggtcatatcgacctcctggtcaccttcggtggttccgccaacttccgcacggagcaggtggacttcgatgtggcggacctcagtctgccctacaacgcggtcctggggaggcccgcattggtgaagttcatggcggcggtccactacgcctatctccagatgaagatgccgggccccggtggccccatcaccgtccatggcgacctcaaagtcgcgcttgcttgtatggagcagcgcgcggaccacctcgccgcggcgtccaagcccgcgggtggcgacgagaggctcgccacctccgtcccggccgccccaaggcagcggatggtcacgtgcgacgaggtcccggtcaaggaggttgccctgggcgacggcccgtccaagaccacacgaatcggtggtcttctggacgacaaataggaagacgcgctcgtctccttcctgcgggcaaacgccgacgtcttcgcctggagattggcggacatgcccggggtccccagggaggtgattgagcaccgtctcgccgtgcggccgggcgcaaggccggtccggcagaaagtacggcggcaggccccagaacgtcaagccttcatccgcgaggaggtggcgcgacttctggaggccggattcatccgtgaggtcatccatccggagtggctggtgaccccggtcatcgttcccaaggcgaacggcaagcttcggatgtgcatcgactacaccgaccttaacaaggcatgtcctaaggacccttaccccctgtcacgcatagatcagattgtcgactccaccgcggggtgcgaccttttgtgttttctagatgcatactctggttatcatcagattcgcatggctagggaggacgaggaaaaaactgcattcattacccccataggaacttattgttacaccacaatgcccttcgggttaaagaatgcaggtcctacttttcaacgtactactcgaatttctttgggtagccagataggacgcaatgttgaggcctatgttgatgacttggttgtgaagacgcgcaaccaagagaccttactctcggatctagcggaaactttcgaaagtctccgctccgcccgcataaagctgaaccccgataagtgcgtgttcggcgtgcctgcgggcaagcttctcgggttcttggtctctgcccgaggcatcgaggccaaccccgagaagatacgagctatagagcggatgcgcccccctagcaagcttagggatgtgcagtgcgtcaccggctgcatggccgccctaagtcggttcatatcgaggctgggagagaaggcgctacccctatttaagctcctcaaacgctccgggccgtttacctggacggaggaggctgagcgggccttcactcagttgaaggcgtacctcagttctcccccagtcctggtcgccccggagccagatgagccgttgttactctacctggcggcagccccgcaggtggtcagcgcggcgttggtcgtggagcgcgacgaggacaaccctcactccgcgcatccccaccctgcgtcgactcgacccgggagagagcagggaggagaggcccccgagccgaacggcggcccaaggcccccgacggccggagctggccctccgcctgcttgtccgacggtgccaggcgcccccgacccccaggatggccccggggccactgcgggaaggccgcgcctgtcgccctctgaccccgaggtcgtcggcacagaagccgagtgcgccccgcgtggcctctcggacgaagagcgccctggagatgcggcccctggcgaagaggatcggccccgccgaaaggtgcagcggcctgtctacttcgttagtgaggccctccgggacgccaagacccgataccctcaggcccagaagatgctttacgctattctggtggcttcgaggaagttgcgccattatttccaggcgcatcgggtcacggtggttacgtcttaccccctcggccaaatcttgcataaccgagagggtactggacgggtggtgagatgggcaatcgaactctctgaattcgatttgcgctttgaaccacgccacgcgatcaagagccaggccctcactgactttgtggcggagtggaccccagctcccgagcccgtctccgcccccgaggccagctcgggcacatcgcagctgcctcacaccgcctactgggtgatgcagttcgacggctccctgtctcttcagggcgccggtgcgggggtcacgttgacctcgccgagcggagacgtcctcagatacctggtccgcctcgactttcgggcgaccaacaatatggcggagtacgagggactccttgcgggactcagagtggcagctggactggggatccgccgcctcctggtgttaggcgactctcagttggtcgttaaccaggtctataaggagtaccggtgctctgacccgcagatggacgcttacgtgcgccaggtgcggcgtatggagcgccacttcgacgggatagagcttcggcacgtgcccagacgggataacgcggtcgccgacgaactctcaaggctcgcttcctcgcgagcccagaccccaccgggcgcctttgaagaaaggctcgcccagccgtcggcgcgacccgaccccctaggggagacggacgcgcctgaacggcccccgaggcccatcggagtccaggcctcgggacccgaggggagcgctcccagctcccctagattgattgcttggaccactgagatccagacgtacctcgcagataagactctacccgaggaccgcgaagggagtgaacgcgtccggcgcatctccaagcgctacgtgctggtggaagggaccctctatcggcgtgcggctaacggagtcctcctgaagtgcattcctcgggaacaaggcgtcgagcttctcgccgatgtccatgaaggcgagtgcggagcccactccgcctcacgcaccttggttggcaaggcctttcgccagggtttctattggccgacggctctcaacgatgcggtcgacctggtccggcggtgcagggcgtgccagttccacgccaggcaaacccatcagccggcccaggccctgcagaccatacctctttcgtggccgtttgctgtctgggggctcgatatcctgggtccgttcaggcgggccccgggcgggttcgagtatcagtatgtcgctgtcgacaagttcactaagtggcccgaggcttatccggtcatcaagatcgataagcactccgcccttaaattcatcaggggcatcactgctcggtttggggtgcctaaccgtatcattacgaataacggcacccagttcactagtgagctcttcggtgactactgcgaagacatgggcatcaagctctgcttcgcctcccccgcccaccccagaagcaatggccaagtggagcgcgccaacgcggaaatcctcaagggcctcaaaaccaagaccttcaacatcctcaagaagcacggcgactcgtggatcgagaagctgccagcggtgctctgggcgaaccgaaccacgccaagccgagcaaccggggaaacgtctttcttcctcgtctacggcgcggaggcggtcctcccatctgagctcaccctgaggtcccctcgggtcaccatgtattgcgaggctgatcaagatcagcttcgccgagacgacctcgactatttggaagagcgaaggcggcgcgcggccctccgagccgcgcgctaccagcagagcctgcggcgctaccatcagcgccacgtccgggcccgatcactctgcgtcgacgacctcgtcctacgccgcgtccaaacgcgtgctggactgagcaagctctcaccaatgtgggagggtccgtatcgagtgatcggcgtcccccggccgggctccgttcggctggccacgggcgacggcacagagctacctaacccgtggaacatcgaacaccttcgtcgcttctacccctagtgggggtcgggtgtcatgtctcgggctcgggccaaccccgcacccctctccggggcgtgcagggttggccgggggctaccacatgcatatacttaccttttttctcttccgtatttcaataaaagcattttcgatttcctgaggactgtgtctgtgccatcgtttccttttgaagaatcttggcttgaattagcacgctcgtgctcgaccctgccctcggtggcccgggccggctaaaatcgccaaacggggcccagaaccgagccgtgccccggggcgtggtgaactccgggggggaatcggcaaaggcccacaatcgggtcatccataaccctcggtcaccgcgctcccggcctggccagtctcgacacgtggatctccccaggcactagccccgacccgcgccgtttgaggctggaacctgggcacgagcccttgttcaagccaagacacagaaggaccgcggcacagaccatcctcgtctcatacacacaacaaacagagctgacgcagaaatttcctctttacttgattacagattaaatcagtctatacaagaagggggcccgaaggcctcggaagaagaagcaaaagttattaagactggcgggggcctggggcctcactccgacgcgcccgggtcgtcggcctcgtcgtcgctgtcgtccgcaccgtcgtcaccgccctcctcgtcggagtcgagcgcgaacgcgagccgaggggctgtaccctcgaagctgtggacgatgtggtcggcggcgtcccggacctgcgcgcgcgcgtcgtcctcggttccgggagggaactcttccagcgctgcccacggggagaagtcagggtccctggcctggtagcttgccagtacaagctccaccgccccctgggcgaggtccctcgaggatgacttgatcgtctcctcgagctcctcgggaagccgctcgagggccccggtcatctctgagaggcgctaggcgaggcccccctggttggcggcgtacttcgcgtgccgcccgccccagaggcccgcctgccgcccggcgcggtctagacgggagacggcgtcccgaagtatgccgggccctacttcgctcgccaagcagagggcctcgacctccccggcggacgagtccagcgccctgcagctcggcgatggtgtgttcggcggctgcgaggcgggcgactaggtcgccgtggcccgcggccgccccgccgctgcgcgctctcccgtccaactccttcgcccgcgcctcgagctcagcggcccgctgatccagtgcggccctctcggcgcgggcgccttccagattgcggcgcgcctgctcctcccgcgctgcctcgcggaggaacaggctgtccgccagccgctgcgccgcggcctcggcctcctcgagagctcgcccccgctcggtgagcgcgtcctcgcggaagcggagtgcggactcctcttcggcgcaggcggcctcgtgcgccgccagtgttgcctcccgggtggcgacggcggcctcgcggtccgccaggtctctctccttcgcgtccagggcgcgggcgcgctccttcagcgccgtggcgcgagcctcaagggcctcttcgcgccgccgggacgccgcctcgttctccgccgcccgccgttcccgggcagcggcggcgtcaaggactccccgggcggcgtcgagcttctcctccagctccgccgccaggctcccgtattggaggcggaggtcgttccgcgcctcatcgagcacggcggtggcgatgagggcagtctcccgctcctcctccacctcccggcgatctccgccaggtccctacgacgggcctcgagctgtgaggcgtgccggcggtgtgccttgcgacccgcctccaccatggcctccaccgagcgccgcccctcctcgacgcgcgcccacgccgcgtcgagctccgcccgctccgcctgcagggcctccatctgggcacttaacccgtccagcaccgtgctgttcgcggcggccaaggcctgcaggaagggctccgcgctcagtggggcagcggaaggccgaggggagagccccctcggtgtgggtgccgcgcggctcggcccgccgatcgacgtgccggactcgggggcgccccccgaacctggctcgtcccaagcgtcgcccgaggggtcgggcccgagcggcgcgcccgcggcctcgtcgtgggtggcctctgaagtcgtcgtcgcctcgggcggagtcgagtcgggggtttggcaggccgcctggcgtgcgcgcgccgcctctgccacccggacggactccccggcccggcggagtctggcctcctcccgagcggcctcctcagcctggcgaactcggacggcctcctgggcagcctcctcggcttcccggaggcggtccgcggcttctcgccggtcagcttcccgcctccgggcctccgcggtcaccgtctcctcggcctcagaccgaccggacttggaatggcggggggggggggagggggggcgcgacgggatctcgctgaggcagaagaaaaaccagaagacaaaaagaaacgggtgagtgaaaactcgccttgggagatgggagaatgaatacggccgcggtgggcgcggggacgaacctgcggggaggtcggctaaacgaccaccttgggggcgagatgaggttctgtcacgccctgaagtgacaggttcccccggcatggtacgatccctcccatcttgcggagccgtttcttctttcgctccccctcgggctgcggcgtcggcacggctccctccgggcgcctgctgctggcacgcaccgccccgccccctcggggaggagatgggggaggagtaccctcctgcttcctcttcccccgggcgtcggcagggcggctaccccccgggcccccgtcgcggggcccagaagcacgaccccctcccggggtagattgttcccccctgcggctcccgcccgtgccatcgtggcctcggggggcccgctcccccgacgccccgaccacctgcatgatggtcaggatcttggcgcgctctggatcgcagcagagggggaggaccccttgggggatgagggatgcctccacggagctgagatttagcacccgttggaccaccatactgaagtcctcagggtcctagtcccatttgcgcccctggtgggtcctcatgtagtcctcaggcccggtgtactcccaggcgccccgggcgcgccgctggagcggcgcgatccggcgacgaaggtagtctccgaacaccatggcccccgtgagcccctgggatcgcagacccgccaggcggtcaagaacggcgtcgtagccgtctcccagatctaccgtcgcccgccagctggaggcctgcgccgggggctggctcggaagtcggaggcgcgcttcctcgccgaggggggtgtagaaccaatcgctcttccagtcgtcccactttttgcggaggacgcatggaatgtagcggttcagcacctgaccccgcggctggaagtagcagccaccgactgccgtcggcggcgacaccggctgtacggtgaagaaccaccggaacagccggagagatgggcgcaccctgataaacatctcgcacaggtgcgcaaagatggccaacgtcattatcgcgttgggggtgaggtgcgccatctggagatcataaaactccagaatatccatgaaaaaaatagagaatggcgggaccagccccgccattgcgaaagagaggaagaagacggaccaccccgggtagtgtggcgccgggcgtcccttgcccagcgcgaccacctcccgaccggtggcagattccggcatgaatcggcgcggcagcccggcctgcctctcgctcacgatgcgggaaggcggcagcacgctaccgtcgagcggtgcggagccccgtgccatgacgccggcggaggaggagcttgagagcgagcgagtgcggcaagggtagggcaccagaaacgaagagttagagcacaagtggcgaaggcaaggggaagagtggcgagaggaaagaaacgaatccctccctcggcgtctttacacccttgaaaacgctatgcccggctcctcgattcccgcgcccactacctcgcccccttgtttctcgcgcccacgcctccactaaccccgctcgcccgtttgcggcgcacgcggcagatgtgcggccgtggcggtcgagatggggcagatcgtgcgcgcattaactacgcccgccaaccgtgaaatgcgccgtcatcatgtctccaggcgaaacgaaccggctcgtcccgattcgcgcgctgctcgagtaatgtagcggtcttaaagaggccgctcattattgtcggtcggttttcccttgccgatgcgcgcgatttgcgaccgctgggtttctgcccgcctgtagggaccggccccacctgtcaccgggcctaaggagtggcgtcacgcccgagcgcttccctcgaggggggcgatcgccctggcgtaacgccgggggctactgtcggtgacatgaggccgggggtatcgtgactagaggcttgggtagccgcggtcacccacgtggcctgaccccctcgggggggtcgggcccgaaggtgacgtggccacccctccctctgtctccccgaggggtcgggccgctcccgtttcggccccgagggctggggcgccctgaccccctatggttttggcgccacgtgtgtgggttaggtgagcacagcgggttcacctaaccgcatttatagcaggttggacgagcgcgccacgccgcatttaatgcggcgcagcgcacgcttatccggtccgtgaccggtcgcggtgagtgaccggtcacagaccggtcagatcgcgggttaggtggcaataggcggcctatcacacgcctcgccccgtcccgtcggaatgatgaaagcttcctggctctcgtccctagccggagccggcatgccaactccaggagttggtatgtcagtcccggtcggatccattccaggcttcagtgcaagtatggcaaggaagtcgctggccattaaatgaaggttgaaatgggcgtccaccggaaaagcgggcgagcggggcaggaggcgtatgctctgcttgtcagaggtcatttccggctgtagactagccctcattgtaaaaagcatgtttcccttcttaggcagctagaggcccatgtggtgacccctgaccagataaaaaggagacccaggcctaagaaagaaaaaaaaagaggagaagagaggaggggagttgggactctggcgaatggtttctagagcctgaactctctctcgctcttggctctctggattccttcactcacagatccaccagaacataggagtagggtgttacgcttctcagcggcccgaacctgtctacgtcgcccgtgtcttgtgcatttcctttctcgctgacgttcctcagatcgagggcgaagaacctcacttagcgcccccggccgaaccggcaaaggggggcctgcgcggtctcccggtgaggagccccacgctccgtcacatgtcatcattattctcctctttttcctacaggagtcgaataatattgttgttatattaagaaaaatattcatagaggtaaaataagaaaatagctcaccactatcaataagtttgccagatgcctctctacgctttcaatgtccaactcattgatgatagcctgagtcttataacctaagaatgatgccagatcagatcatggatcagctatacatatattgatatatacaaaaaggaatggccaaataagcaatgaacacagacacaaagtgtaccattgttagctgctttaatccaatctttggtgcaaactaaagcttgcacagcctctggatcaagacgggtgcgaaatggatcaacaacacggccaccagcactaaatgccgactcagaagcaacagttgacacttgaatacataagaaatcacgagcaagtttgcagaggataggaaattctgcttgtttgagcttccaccaagacaaaatatcaaatggatctttggaagtccatagtaacagtggttgttccatgtaaatttgtaactcggttttatcactacaaattggctgacttctctcaagcaaaaatctttgaaaatgttgctcatgatcatggctactgtcattctcattaaagatatcatcaaactcatcagtattatgaacaggatcagattgaatttgaagttgatgcacatgcatttcagcacctttcttctttgatgttgcacacgcactagtagcataaacatcaaacaattttttgataaccccattgaactcatcaaatttttctgcagcttctaaaccataaatcttcataccatagtactctattgaacttgttttgtaacgtggatcaaggaagtatgcaacagcaagagccatattcgacttctcccagtacttatcatatttagtttgcatggcgtttgccatggtttttattgttccatctgtactgttacaccaatcagcaatataaagcttgatggaacaaaatttaccgaaaaaatgatttgctgttggatatgtagtaccagagaatagttcagttgcttcatgaaatggcttcaagcacttgcatagtgctattgccatagaccagtctaccttggtgggagcacactttgcatactttctaccatgccgaagaaacaacctatcaaaagcatttctgtagtagatagcattcttcaacatgagaaatgtggagttccatcttataggagtatccatggaaaggccctttgtgttatccaaactaacttccaaggcacacttctgaaatgcctcaaactgcagtggcgagtgctttagaattgaaatagtatttctgatctttaatacagctcctgtgatttgtttcagaccatcttgtgcaacaaggttcaagatatgattgaaacatctcacatgaaagaagatgccatcgcaaattaaaggagagattttacggagttttaaaataacacccttaacacaaacatcattagacgatgcattgtccaaagtaagtccaacaagccttctatcaagattccaatcaactatgctgtcataaaactctttgcacatattacttcctgaatgatgtccttctacatgcataaacttaatgatcctcttttgcatcttccaagtgtcatctatccaatgaactgtgatgcacatataacttttattttggttagatgtccacatgtccatggttgtgctaaaacggcatgagagtgtaagcaaatgctgccacaatttcttcttttcctcttcatatatgtttataatatcctttctcacagtaatgcgactcttaattggaaaagtagggcgtaaatacttaataaaatccacaaagtaatcatgctcaacaatgttaaagggatactcatgcatgatgattgccatatagaactttttcaggctaaccgtctcatcatacctgtatgtctcaacagctccttcagtaccatcttcactctttttcatctgtagttgttgttgacctgacttgatgttgtgcttgttattcaagtgattccagaaaacagaagtgccacaattactctcacaccgacgtttatatgagcacttgttgcatttaacatactcctctacaatcacagtgtcatctgaccctttcttgcttaccttatatttagtgtagtgctgccaaacttcagaactacacttcttttgcttcttaccaggaggaggtaaaacctcaaaatcatcattggttgtcaaatcaattgcatcattgtgtgccaaggcaccagcagtaggagaagtgtcctgcgtagctgccgtagcatggcttggaggtgctgggagttgcaaaactggagattatgcagtggtacttgcagctgcacttgcactacttgcactaccagactccatcaccaatctagacacaaagtaaaaaaaagcacatccaagatctacatcagtttatcgatctcatgaaaggcacaaaacaaaggttacaggagaagaacaaatcaatggattacctaagagattagtgcatgcaagaggccttgccgccggcggtggtgacggctcctagcctcccactgtcccacgatttagggagataggaagcacaaacaagcactagggggattgaaggccaatgcccagcaactccagcaaggagccaaggagatctaagacagccgccgccactgtcgccggcttgccgctgccgtagtcaccaccgccgccgccgccgctgtcgcccatctggcagctagggtttagatagccgagagaaaactatgtgctgaaattgaagggatgggctggaggctggaaagacatcaagcgttacgcggatatccgcgcatcttaatctccggatattcggctccgtattcgtattcgccggaaactgcgttaccatattcgtatctatatccggagaaaaaatatccgtattcgtatccatattcgaactatccgaaaaaaatccgctccgaacactatccgtatccgtttttgaccggagcggacggaaactatccgctccgttttcacccctaatcaccaatgacaaacaacatggatacaaattaaaataacatccaccatcatccgatttagtgacaaacagcacggaaaaattaaaatcacactaaaatcaactttcacaaatgaatctttttccatggtgcttactgccgatttagtgccggggtttgagaggagagaaaggagcagaactggagaggttcagaccttgtctatgcatgaggtacggccgccaccgaagccctaccttatccttgtcgggatggggaagatcaaggcaccggtgtttctaatgaggaggcgcttgtgggaaggatagcaggtaccgcttcctatgggtcacggggaggagtaggaggaggtggcagcgacggcggggtgagcgggaagagtcggcagtgatgacatgggagaggagatgcctgtggtgaggaagaggaaggaggggaggctgcgacttgggagaaatggtggagcaggcggaggcactgaattcggcaacgacagctacactgagaaggagaagggggtgacactgagcagatgcggcgtgaagcagcaaacacacgagaatgcttttcttttctaagctagcgatgtggaagtacctttttgcgaaaagaagtttcttgaagaattgtgaaggtatatcttactagtaagagtatccggtggctcatatcatctatatgtgtaatcagacggtttatgtttatcggatgacgttgcgcaataaatttgtgaaaaatgactcctttcacttatttagataaggaacgattagaattgtaggatgattgaggtaagatggaaataattttaaataagaaacgattgatagaacaatagtacattagatgtgcacttattaggacaaaagtgctagaaatataattatacatatacagagggagtaagctgcaaacagcggtcgatttaacccaaatgttttttcctcacccaatcaataatcaaatttttttattgagaactaaaaaaatataataatcaattttttttgtgagttctgagatgcactcgatagtgcagtagcaagggtgtgtgatttaaatctcgaggtcttgtgtccaatcctcatcatgctcacaatttcttcttaaaaaatatttgaagatgcgtctctccctccaaatctcgtttagtgttcacgaaaaaaaattattgtgaggtctacaaattttatctctgggtttagtacattaggtatgtactccctctattttttttttttacataactttagtaaccaacaaaaaaaaatagagatagtattacaggagtgagctcgcacatgtgtacatctccatcgtgcacataataaaaggtggaaagatttgtgagaagtacatcttgtctgcatatcttggaggcgccaacgaagatgaccgtccgtgaggacaaacccttgtcctctgcccagtggtgtccccacgaccacgtacccttagccgacgaaacctccagctgccaaatgcgaatttctacgtaagatctctttgcttttgattgattcaatacagttcatatacggatcggtttattccatcaaaatcttgtggnctntaccagcagtccacgtgccat

SEQ ID NO: 4677 - DNA, 6611 bp, Oryza sativa
atttgaagagttccaaggccagcaaggcaagtcacacagatcccaaacaaccttttgagcatgttgatcccatttaaagctactgtttctattcaactattgcatttattttcgaatgtcattgggtggaattaacctattgtttgttatagcccttttgttcttgattactttattccttgataccttgggttattataacttgactagttgggctatatatattggttcagctagatattagatatgattgcttagccatgcttagaaacattagcacactattgggataacttttgactcactattgtttaatgatggcttaatgatagttcacgatggtcaatcgtgattggttaattaatcatatgccaactaaaacctgataatggtgggttgtgagcacatggttttgagagtcgtgctcatgacaattaaggaccggttcacgagtttcggttgtgaaacattaaccgtgccaaccacaagccagcgtgggcaacggctttaccttttgtatagcatggttcattgcggagcaccagactgagaagtggcggagataagcccacaggggtcgctggggagtccatgccttgtttataagggggtgattatgatccaggaaaggtgcgctgtagtggattgtgttgtacgagaggtaatgtctgtcacgcccggaaattcactagtaatttccgaacttatttgtgcatgaaatcctcgtccaggaatcagccgaggtacacaaattgacaatttaatatacagattcatcaaatacttacttaagaggcacttagtcctcaccaagaagaaaattgcagtggaaaataaaatctagcgaagctccggctccactcccacaggcagctcaactgcggtataagccaaacgtcttctccttctggatcctttttcttcaactgaggttgattgattattgcaaggtgagcatatgacatactcagcaagccacacagcaaatatgcaagtgcacaaggataccaaaggatggcataatataggctcatttgcaaaagcagcgtttagcaaaatatttaagagaaataaaacagtagagtagttaatcagaaattttaatcaacactgaacagcacacccatgctgcacaggcccgaccatcctaaacaaccatacccggctgtacagatctaatctccaaaccaggagctaagcaaattattaccagttataacatcaataattattgtgagaggtgtgagactaatcacgaaaaacattgctcaacccgcccataaccgcgggcacggctattcgaatagttttactctggccagaagtgtaccactgtacccacaagacacagccccacatcatgtcaccatgtgcctcagtaccaccacggtacctcggaaaggagctgtgacattacccctcgcataacacaacccaccacagtgcacctttcctggatcataatcaccccctcaaaaaccagaggcatggactccccagcgacccccgtgggcctatctccgccacttctcagtctggtgctctgcaatgaacaatgctatacgaaaggtaaagccgttgcccacgctggcttgtggttggcacgattaatgtttcccaatagtagctcgcgaaccggtccttaattgtcatgagcacgactctcaaaaccatgtgctcacaacccaccattatcaagttttagttggcaagtaattaattaaccaatcacgattgaccatcgtgaactatcattaagccatcattaaataataatgagtcataagttatcccaataatgtgctaatgtttctaagcatggctaagcaatcatatataatatctagctgaaccaatatataaagctcaactagtcaagttataataacccaaggtatcaaggaataaagtaatcaatgcaaattggccataacaaaggaataagttcacaccacccggtgacattcgaaaataaatgcacagttgaaataaatagagaatttaaatataggatcaacatgctcaaaggattgtgtttaggatctgtgtgacttgccttgcaataatcggtgttcaattaatcttcttgaatacttccggcgcactcgcgaaccttcgcaacgacggaaacgacaaactaacacgcaaaacgaagaaaaagactaataaaaaccaaataaacagtacatataaagtaaacaaacatgtagatcataattttagatgaattatgagacttgaacggcctcattctgacttcaaatgaatttattatgaattttacaagattaaatctaattaaagcccatttaaaaagaattaaataaatttaattcaatttatggacaattttaatatgtagatctttattttatacaacttttgcaacttgaaccacattaaactgagctaagatgaattagttatgaatttttaaagattaaatcggattaaaacacttatattgattttaattgaattaagacgcaataatgaattatttttgaaaaggaaaagaaggattattgcgtcagcggctagggtttgcggtggaccgggtgcacggcagcggttcacgggaacggacggccgagatcgaacggtccacgaccggctcacagagaacgacgacgatgacgtcagcgacgacgtcagcaccggcggcgactcgggcggctcggacggcgcaagctcgccggcgaacgacggcgcgaggacgcgaacagaggacaccaacggatagagggcgacgcggcgaactcaccggtgaccaaagaagcggcggaggaacaacggacagcgccggcgacgaggaagaagcggcggcggagatcgggtcgacggcggcgacggtgctccggcggtcttcggcggcggcgaaggggcggacgaggacggcgacgacttggcgatcccgatggtggcgacggcgaccgacgacggcggctgcaacggcggcgcggcgcggctgaaccgacggcaacgacggtggcgactagggctacgcggaggcggcgctagacacgacggcgggctaaggcaaaggtggcggcgggtagaggagatatcgggggtccttatataggtgcaaggaggcggcggcgaaggcccacggcggccggcgacgagaaggaaagattggggaaaaacgaatccgaatcaaactcgaatccgcctatttccaaaggaaattgaccggagtttctataagagaaaaggaagaggagatcgagaagatcatttcccctctattgatttcaccggatcgggaaagacgcggccgaatttggaaggagacggcggcggcttgcgctagggtttcgggcggcggcggcgcgaggaggacgacgaccccgacaagtgggacccacctgttagcggctgagagagagaggagagcggcggctcggcggactgggccgacttggctgactgggccgggaagggagagagaaagagaggttttgggccgactttcggcccaaagccaaaaggaggattttaaaacctttttctatttaaattattcatgaaatgcaattccatttattaaaaatacttccttagctcaaataaatcccagaaaaatctaggaattatagaattaagcaaagtatttaatgaaattttatctggccccattttatattgagatttaacaaattaaaattagatcttctcttctaggcttttaaaatcatttctaataattccttttaaacaacaatttataatttaaggattttaaacaagaaaagcacttaacaattataattagatcattattgatcaaataattactgaactgttctttgtatcatttaggaattgagctctgaaaaatccgagaaaatttcagagagtatacttaatcatggagaatttaataaaaattaaatccatccatgccttagatttaggaaattttatttcccacatttaacttcacttgtaaattaaagaacatttaatataaattctattaataatttattaaataatttataaatcctgaaacaaaaatcaggatgtgacaatgtcacagctcctttccgaggtaccgtggtggtattgaggcacatggtgacatgatgtggggctgtgtcttgtgggtacagtggtacacctctgatcagagtaaaactattcgaatagccgtgcccgcggttatgggcgggtctaacaatgtctttcgtgattagtctcacccttctcatcataataaaatgtgctttaattggtaataatttgattagctcctggtttggaatggtatattcctggtttggagatagaactgtgcagccgggatggttgttcagaatggttgggcctatacaacagggtatgttgtatagcgttggattaatattgcctatcccttaactgttttattaaattctgaaataattatttactcctctttaagccaatgaaaccctactatgccatcctttgttatcctgtgaccttgcatatttgctgcgtggcttgctgagtatgtcatatactcacgttgcaatcattcatcaaaggaagagttctccaatgatgttgatggtgtggaggattaggtgtagccctggtcaagctgcctgtggagtggagtcgtctgcgccgtttatcttatttttctgctgcttagatctctattgattgagaggaactatctacctctgtaatgacattttattcgcttatttaattagagtaataatggtactctattatcaatttgttattgtgtgcctcggctgattcctggacgagggttcacgcacatgtaagcgtttggaattttggatagaaattccgggcgtgacagttcgtccgaacactggtgatcgccgttgatcccaggttttggcatggacgctccagatcactccctgatgacggttgcggggtagttcggacatttccccttctcacaaccgtcataactgccctataaatggacctcactccctcactacacacacttccaagcttgagctgaattataagaggctctattatactatattgtgtaatagaataggaagagagtagagtagaagaagtcggaagaattccggagttgtcggtaatcttctctcagttcttttattctgtttatactctgatttcagtataatattcttcctgagtaattcagatttatcttgtgagaattatctcttggttagttcctaaatagtatacgggattattgttcactataatcaactaaaatatagtgattgctttggtgagttataaacagctaaaatatagtgattgaaagtttgaaacagctaaagttcaccctttttgttgcagatatgcaatattccttgggtgagcaccaaatcaatttgaaaatttctaagaaatttatgtatttctgttgactaagtagatgacgactacggtatttgcagagtatgaggattgttggtaccggggtatgcgcgagattgaggtagaaaagatgggagatagggatttttatataggttcgggccccttatttgtaaggtaatggctctactcctgttggccgaagccggtgttcctcttattcatcaggatcacacaagtacaatttaggataacctatctagtcatcgtcgacttggcggtatggaacaccacgcgtagtcgatgatggggtagtcttcctcctggaatatgaacttggcgagattagagataacgctagatccctcttgtcggcctctgtagtatcagattgggtatgtctaggcttatcttctgatgtcgatgtttggcagtgtgtattggtgtctattatgactgactgtgtcccctctcctcctagggggtcttgtatttatatccacagatatctctttgtctaagtagaacgagagagacaagtatggatatgatatgagtagtccttgtagttttcatatagaactctgcctctccttccttatccggaataccttctgtatatgagacatgactccgcataaaacttagtatatggtgccgcccccccacccccggagcctaaccaaagactattgggtatgccttatctataacactaacaatttcttaatttaatccgtctatgagtaaattattttcatgcactctacggtaagtgcaacaaaatttaagaaataggatagatgctaaaatataatgtaactgctgacctatttctattcccttcattttatattataaaacgctttgactttatttctatcaaacttctataaatttagacaagtttatagagaaatagtgtactatctccatttcaatataaagtattttgcctatgtatcaccctttttgtattttgagcggaggtataacatcaaattagttccattaaatataacattaaatataattaaatggtgtgtttgtttggtgttaacataacattaaatataatttgtaccagcggcatccggccgagggtcattgtttttttcgtgtttggttattgatgtgctattgggattggttatataacacttgctttcacaaaacttatgccaagctaaaacatattccctctgtttcacaatgtaagactttctagcattgcccatattcatttagatgttaatgaatctagatat

SEQ ID NO: 4678 - DNA, 1785 bp, Oryza sativa
  unsure (1)..(1785): unsure at all n locations
ttagtagcttagcgccaatgcggttggtgttgagcccttgccatgtagacgaggggattggctcggctgccacattggcaagggagtcggcgctgatcagtgtaacctcagcgcaaaggcggttggcgttgagccgacggtctatttttggtaagtttttttgcacggtctagctttgaaataagtttttgaaaggacctatttataaaaaaaatagggttagattggtgtagttctcatgtagcttagctgaagtacaatttgtgaaatacaattttctgaaagccaacatgctaaaattaaattacaaatcctaatgtttttcacttaaaaaatacttccaaaccatagaaaatcccccatgccgagtgatgtttacaggccttagggaccattacacaaagttttgacatgtgcaataattcaaaaacatcatggatctgaatagcttcctttatttttttaaaaaaaaaagaatctaaagggggcatgcagtagtagtgggctagaggcaagatgtactgggacattatacaagataggtgacatgcaagtttccatgtagaaaaagtgaaagccattttcttggattttaataaaantgacacttacttggcnagtgcaccatcacttggaacatctgtgacacatcaacaatgtcattagctgttgttgcgattttcactatgtcagatccaactgcttgtattctagccacaagatctgcaagctcttcgcaggacggagtactttcataattgtgtgatgagacaataagtttacacttctctggcttactgccagaaataaagctgataaatttgtcagcaacctacaaaaaaaaggaaagttggttacaattgtgtgcatgtattccaaatcgtgaactcaaataaatgaggcatatgggtgtacatggcttgataattgaggaagagtaaattattttagagtgttttgctaaatgtttgtcttaatccagttataaacaggccttgtattgtgttccagaacatatgacataagacgtgatagaataacaactgaaaaaaaaatctgcctgcaagattattagttagagctaccttgtattattttcattttctgggctagtcttactgtctcagacagttaggcgttccttttttctgttgtgagacgttttatttgttagtttgctcctttgttaatacaaagatgcacaaatctttcgtgatttacctaaaacaactggaaaacatgaactgtgcaactttaactctatttaataaataccaaaaaaattacaatttcattccagagaagcttagaggaaatcacaggacactaaccacaaattgagcataagaaggatgtattgagcattcattatcaattataggacatttttcaattaaatttcctcatctggagttatcttttagtgtgatagccaaatggcagctaaacactgaagtatataaaagaatgattggcaaatggattccatctgaagttaatggtatgattaatctactggtgagcaataaaattgaatattaaaagcaatagagatactaacatagtatcatttagaatgaatgaacaagtgcccatataggcacctccacctgtgaagctataatgtgcttttccaaatttaccgagaactcattttcaaagttatgtgcagtacatacacaccacattttcatgctcaaatcatttgtattgtggagaacagaaaaatgggggaaatgattatgtatattgcacaatgtccagtgcatgcatttacaaaaacac

SEQ ID NO: 4679 - DNA, 2039 bp, Oryza sativa
  unsure (1)..(2039): unsure at all n locations
gtccacctccatggtgacgggccgcgccgcctcttcaggcttctcgatctccatcgccgcgccgggattgctgctgcttgtctcaggcttggcattgctcctgctcttggttttggttttggagagcacggcagagacaaaatccatgcgcagattggcatcctcttccactgttttgtttggtaggcaagcaagcaaattacaatccattcctggttcctctccttaaaaaccaaaccaagcgggcctatgtttactgaagattagtctttaacaggggcctatgtcaattccttgccgtcatcaaacagacagacaaacaaacaacacgatgatgatgagttctgtcttgacggctgcttccttccaatctcctcgcaatttcatcaaactacaagtacagctaaggcctcagcagcgacgcctgcaacaccaacaacagcttctgattgttggcagcaacggggcaataacaataggaaacatgagtttgtgccgggattgctgctgcttgtctcaggcttggccttgctcctgctcttggtcttgattctggagagcacggcagagacaaaatccaagagcagcggcttggccggcgccatggcgtcgatgatgctgccgccactgcgagagatggcgtggcctcggctgcgtttccggctaatccgtcgcagctaagaagctcgccgacggctgccacggggcgcttccacctctgcgcccatcgccgtagcgccggcctgcgcccaacccactgccgctgcgtcgccacgccaccccgccgcccgtcgccggccacccagctgctcccccgcccgcgccgctcttccgccaccgcaccggccggcccgcatgagaaaactgagaaagagagagagaggaagggagagaaaagaggaagagatgatgacgtggtcaccctgatgtgtggggcccacgtgggtcccacactgagtcagctgccacgtcggataaaaccggagtcaaaactattaatggaacttagtttgcactttttataagttggagtatgtgttgtatccggttttgctgtttaaggacgattttgtaacttgatgacaagttgagggaccttcgatgtactttttccttttcttcattgctggttttttctccctccaacctcaaatggggcggtgtggcccgattccagatgccttctcgtacaccgattccagatgaaacgaatcaatgggccggccggcgggcccgctatagctacaccaccccccagtccaccacacgacgcgcgctacattctccacctctccaccattccaaactgccaagtggcaacaaacctactactaaacctgagaaatccagattcccacccgancngacacanntcctntctcctcnngcngcngccgcgcnntcctcncaaaccctcccctcccccatggcagaagacgccgcggcggccgccatggccgcggcctccctctccgacgacctggagcccgccaccgaccgcacccgcatccgatccatcctggccgacggcgccgcgcgcgccggcgagcgcgtcgtcgtgggcgggtgggtcaagaccgggcgggagcaggggaaaggcaccttcgccttcctcgagctcaacgatggctcctgcgcctccaacctgcaggtcctcgtcgacgccgccgtccacccgctcgcgccgctcaccgccacgggcacgtccgtgctcgtcgagggcgagctcaagaagccgccggagggcgccaagcagcgcgtcgagctccgcgtcgaccgcgtcatcgaggtcggcgaggtcgaccccgccgcctacccgctgcccaagaccaagctcacgctcgagaatctcagggacgtcgtccatctccgctcccgcaccaacacggtccgtctgtttcgcctcacaccacgaaaactgaagccctttctgaagtagactacagaaatttctagattttgcaacttccgcactagttttgataaatcctgccgtgatgatttaggatgtctagttcctggtgtgaaaattatggttt

SEQ ID NO: 4680 - DNA, 24035 bp, Oryza sativa
cttatggaagatgtgagatttaatacctatcactatgggggatgttttattatctagactttatgcagatgttggcggtatagagtcggcatttaataaccgccaacacccttccaaggaagcacttagatagtcagatatattgcatcatatatttgttgtttaatatgtgtttattttaagaacttattcatggtaaggggtaaagaatattctcggtaggtacaaagttgtccaaattttatatttgtcattagttagaccatatcctactttggtaagtctgtcgactatcacccaaatagagtcatggcctgatgatgttctaggtaaaccagtgataaaatccataccgatttcttcccatttccattcaggaatcttcaaaggctgcagcaaaccggcgggtttctgatgttctgccttgactcgctgacaaacatcacatactgctacgtattctgcgatttcacgcttcatacttgcccaccaaaatctttccttgagatcctggtacatcttggtactaccagggtgaatggagtataatgtatcatgagcttctttcagaattgcttcttttaaatctttgttgtcggggacgcagattctctcacccaaccatacagttccttgctcatcttccaagaaaccgatagcttttcctcttctcatattcttcttgatttcttgaatatcaagatcattaatttgggcttctctaacttgatcaattagagtgggcttcgcttctaaggctgcaacgaaacctctactgacaattcccaaatttaatctttaaaattccttgcataattccaatggcaactgtcgtccttccgtagcattgcaatagctttcctgctaagagcatctgctacaacattagcctttcctgggtggtaatgaattcccatgtcataatccttaattaattccaaccatctccgttgtctcatgttcagatccggctgagtaaagatatactttaaactcttgtgatcggtgtacacctctgtacgagtaccgaaaagataatgacgccaaattttcaacgcatgaactactgcagctaactcaagatcatgagtagggtagttcttctcatgcggacgtaactgacaagatgcataggcaaccaccttcccatcttgcatcagaacacaacctaacccaagtttggatgcatcgcaatacacttggaaacccttctttggatcaggcaaaatcaaaataggagctgatatcaagcgattcttcaactcttgaaaactctgctcacattcttccgaccacttgtacttcacatctttctgaagcaatcgtgtcatgggcttagcaatcttggaaaaattctctataaacctccgataataacctgcgaggcctaagaaactgcgaatctctgaaactgtctttggttgtttccagttggttacggattccacattactaggatcaacggcaactcctcctgctgagatgacgtgaccaaggaacttcacttcagacaaccaaaattcacacttgctaaacttagcatacagttgatgttctcgtagcttctctagtgcaaagcgaaggtgttcttcatgctcttctttggttcgggagtagataagaatatcatcaataaagaccaccatgaactggtctaggtattccataaacaccttattcatcaagttcatgaagaaagcaggggcattggtgagtccaaaagacataacagtacattcgaacaacccatacctagtggtaaaagctgtcttaggtatatcttcctctttgattctcaactggtgatatcctgatcgaagatctatcttggagaaaacggtggcacctttaagctgatcaaacaaatcatcaattctgggcaggggatacttattcttgatagtcacatcatttagggcacgatagtccacacacatcctctgggtatgatctttcttttccacaaaaataaccggagctccccatggagatgaactcggtctgatgtatcccttctgaagcaaatcgtctacttgccttttgacttctgccaactcattggctgccattctataaggtctcttatggatcggagttgttcctggtaccaaatctattctgaactctatatcccttttaggcggcataccaggtaaatcatctgggaacacatcgggatactcccggactataggaatctcttccaaagttatttggttcagtcttgaccttaatgactcagaagacaatgcatgaacagtcacaactcgaccatcattgctggtgagaattacttttctgttagcacagtctatcacacctttatgtctggctaaccagtccatccctaggatgacatcaaggtctttggattctaacaagataagattggccagaaatggtactcctttaatttctattctgacagaggggctacgttgcaaagagagtgcttgattacttggggtactaaccatcaaaggacgtctaagatcttctacttccatcccatgatttcccgcaaaactcatagataagaatgaatgtgtagcaccagaatcgaaaagcactgttgcaggaactaagttaacaagaaatgtacccaaaatcacatctggagcatcttgagcttctgcagcagcgacatgattgacacgagcctttgatgctggtacggtagagttgctctgggcagggacaaccttcacgcgtcgaggcttcgggcacttgtccgcgtaatgtcctgggtctccacagttgaaacacaccacgggcttgctgccttgctccctcttggcaggttgttgctgtgtcgaagctgcaacaggacgtggagcttgattgcggatgttgttgccagcattgttgttgaagaactgacgctgcggacgaacaacagacgaagaacctccctgtggcatagactgcggtcctaaagtaagacgcggcttctgattatttccctgttgtgttttgaattgagcaatccggcgtttcttttgctccatgctgttgtacttgtcttcctgacgaatagccttaatcaccaacttctggaaatcaggataatccccagtcatgagtgggtaagaaagctcatcattaagtccttccaagaacttctcctggcgctcttcatcattgcgcacatcttccggagcataacgagccagacgattgaactcgtgcagatactcagtgacagagcgagacccctgagtgagcgacctgaattccttcttcttgagagacaccactcccgatggtatatgcgtcttccggaaagcagcggtgaattcaagccaagtgataggttcagcagtagtcctattcaggcggaagtgatcccaccattcagaggcagggccatgcaactgatgtgatgcaaatgagaccttctcctgatcagtgcactgaagcaaatccaacttcttctctatggcatgcaaccaatcaccagcttcaacaggattagtggtactagagaaaataggcggcctcacacgaagaaattctgctaacttattctggggaggtgcatggttatttccctggttctgctggttctggagttgctgcatcatcatgttcattaactgagtctgttgagcaagaacttgggcaagtgtgggattctctccattgttgttgtttccacttccactggcgcgagtgttcaccatctggtatgggcaaggcacaagaagagaaaccggggaaaactacttaggacaaagaattaatttaacttttattgatcttaaatgagttttgttattacaaaactgaagactctcacaccactaaactcaccaacttcctaacactcaaaagcaaacaaacgcatgcacttacatcccaccactgatgtaaataacatgcaagacccacacaaccaaacttaaacaaacaagctaacacaacgatctaagacaacggcttgacatggcactccagttcttccgggcatcggagttgattgaaggctcgttcggctcgtcttcatcatcttgagttgctccctactcaatcttggaatgagtgtgcttggattcttcttcttcatcatcacttatgttgatgaccggaggatccgctagggctggggtaacttctttctccaccacacggacctttggcgccaattggtaacgagggacaaatagagctctcttccttgcggtaagacgaatcctggccttctgcggtggtgcttctccctttaacgcggctagttccttctccaaacgatccactttgtcttttagcttgcaaatcttaccacgattccggtcttcatgatcttgagccgctaacacagtttccgcacgggtttcatccatagcccacagcatctcaaccaaatgctttgtggtaacatcattctcgattccttcagtctcaaggtagctgccgcggtcacttccctgtggttggcgaggatggtagcgatactcagtgtcggccaactgatcactgtagcgatcgcgaagctctcctatggcgatccttgccacctcctgacatgcatggatgtagtttcttcctccagcttcgaacatcactgaggggatatcttcactattactgttcaaggtgactttgactcggcacttctcttcatgacgatcatgaggaatctgggcataaaaaggggtagtcccaaatcctatcacaaaggacatcgtacgcaactcctggacaaatccctcaacaccaaacaagtactcaggcttgtagcgcggcatctaaagacaagtgaaaggagggagttaagacatttatccaattaatagcacaagtttttggattaatttgaataaagttagaaattcaaagtaaaaaggtaagtaaataaagtaaaccaagcttgcaagataagttgaaacagttggaaacaaggtcaccaattttgtacttttgaacatcaggttccaaaagaaataaaagaaagttataaaatcaacatgctaaatttattttattgaagcaagattaaataaaacaatattgtaaaacttttgttggtaaatgagccattagtacagtaatagatgtacagtactaataacactggaataaattttgattgagaaccattaaaagagattatgaagtgcatgtgccattagtttggtttaattaaaagagaaagggaggagaacagttctacttttccaatatttttagagggcttctatgggttaccatttggcataacctagggttaaggaggctctgataccaacttgtcacgcccggaatttctatccaaaattccaaacgcttacatgtgcgtgaaccctcgtccaggaatcagccgaggcacacaataacaaattgataatagagtaccattattactctaattaaataagcgaataaaatgtcattacagaggtagatagttcctctcaatcaatagagatctaagcagcggaaaaataagataaacggcgcagacgactccactccacaggcagcttgaccagggctacacctaatcctccacaccatcagcatcattgtagaactctttctctgatgaatgattgcaaggtgagtatatgacatactcagcaagccacgcagcaaatatgcaagtgcacaggataacaaaggatggcatagtagggtttcatttgcataaacagcatttaataaacatttcagaatttaataaaacagttaagtaatagacaatattaatccaacgctatacaacataccctgttgtataggcccaaccattctgaacaaccatcccggctgcacagttctatctccaaaccaggaatataccattccaaaccaggagctaatcaaattattaccaattaaagcaccttttattatgatgagaagggtgagactaatcacgaaagacattgttagacccgcccataaccgcgggcacggctattcgaatagttttactctgatcagaggtgtaccactgtacccacaagacacagccccacatcatgtcaccatgtgcctcaataccaccacggtacctcggaaaggagttgtgacattacctctcgtacaacacaatccactacagcgcacctttcctggatcataatcacccccttataaacaaggcatggactccccagcgacccctgtgggcttatctccgccacttctcagtctggtgctccgcaatgaaccatgctatacaaaaggtaaagccgttgcccacgctggttgtggttggcacggttaatgtttcacaaccgaaactcgtgaaccggtccttaattgtcatgagcacgactctcaaaaccatgtgctcacaacccaccattatcaggttttagttggcatgtaattaattaaccaatcacgattgaccatcgtgaactatcattaagccatcattaaacaatagtgagtcaaaagttatcccaatagtgtgctaatgtttctaagcatggctaagcaatcatatctaatatctagctgaaccaatatatatagcccaactagtagagttataataacccaaggtatcaaggaataaagtaatcaagaacaaaagggctataacaaacaataggttaattccacccaatgacattcaaaaataaatgcaatagttgaatagaaacagtagctttaaatgggatcaacatgctcaaagggttgtttgggatctgtgtgacttgccttgctggccttggaactcttcaaattcttctcctgcaaaaacggactctccggaaacgtcggaatctaaacagaaagaagcaaaatcaccaaaacagcacataaacaagcatgaacagtacatgtggatatttttagcatgtagatctcaattttagaaaaatttagagacttgaaccaactaaatccgagctaagatgaattagttatgaatttttgaagatttaatcggattaaaacacttatatcgattttaattgaattatgacgcaataatgaattatttttgaaaaggaaaaagggatttattgcgtcagcggctagggtttgcggtggaccgggtgcacggcggcggttcatggaaacggacagccgagatcgatccatccaaaacggacggccgagatcgaacggtccacgaccggctcacggcaaacggccacgatgacgtcagcggtgacgtcaccaccggcggcggctcgggcggcgcaagctcgccggcgaacgacggcgcgacgacgagaacggagggcaccaggacgtagagcgtgacgcggcgaactcaccggtgaccaaagaagcggcggaagatcaacggacggcaccggcggcgagatcgaagcggcggagaagatcgggtcgacggcggcgacggtgctccggcggtctacagcaacggcgaaggagcggacgaggacggcgacgtgacggcgaccacgatggcgaccttcccgagcgacgacgatgactggagcgacggcggcgcacggctgaagtggcggcgacgacggcggcgcgaagcggcacggcgctagagcgctcccggcgacgagaagcgaaggcgagagtggcgacgggtagcggcgacaccggggatccttttaaaggggttggagagcggcggcgaaggcccacgacgaccggcgacgcgaaggaaacctcggggttcggaggaaagagaccgatccgattcgacctcgaatccacgaacttccaaaacgattttgccgatgattccaaaagagaaaaggtagaggagatcccgaagattgttttccctcaattgatttcaccggaaacggaaagacgcggccgaatttggaaggagacggcggtgcggctcggctagggtttcgggcggcggcggcgcgacgaagacgacgactccgacaggcgggccccacctggcagcgagcgagggcacgcgtgcggctgcggcggactgggccgacttgggccgaggagagagagaagggttttgggccgactttcggcccaaagccaaaagagacttttaaaaacctttttcaatttaaattattcatgaaatgcaattccatttattaaaaatacttccttagctcaaataaatcccagaataatctaggaattatagaattaagcaaagtatttaatgaaattttatctggccccattttatattggaatttattaattaaaattagatcttctcttctaggcttttaaaattatttctaaaaattccaattaaacaacaatttatatatttaggattttcagggtgtgacacgaaccctgggctgggccctcctggcctggccttcggcggatctcctcccttggtcctactctatctatttctcggagttttgggctaagtctttgatatttcgatgaagtttacaacccatccttatatggatacatgtttctccttactttagtctagatttcctcccatcttcggggtttaacacctgcatacaaatatacaccaacacttgtggaagatgtgagatttaatacctatcactatgttggatgttttattatctagactttatgcagatgttggcggtatagagtcggcatttaataaccgccaacacccttccaaggaagcacttagatagtcagatatattgcatgatatatttgttgtttaatatgtgtttattttaagaacttattcatggtaaggggtaaagaatattctcggtaggtacaaagttgtccaaattttatatttgtcattagttagaccatatcctactcaccccttacatattaatttaacttcaattcataattataagttcacccaacttggctataaagaggacttccttgggccctaatgttcacacaagaaaatctaaatttagccaaatgcttttcttcaatgtaattatgttttccgctgccatgcctctaatggaaatcactgtccatccaatgaccaatgaagccatccatattctggtggtccacatataagaggtgctcttctaggttgctgaaaaaggtgcgagagctgtctatgctcttcaatgtcccagcccatgtcatcttgtacaacatagatgatgaggtggagaccaacttgttgtagcctacaattgacactccggagtgctacaaggacaaaagaatgttggactctgagagactcctccggctgaataccaaaactatcagctttagatcaatgtgataatgaatgatgcaccaaaagaacttggatgatcttgctcccaagataattgacaatctagaatgggtgttgtgtatgtgccatcgtggaattcacaaccgcgccaatgtgcttctctcaggggcttctccgtagaagaagttattgcatttaggaagcttatatattgtttgatcatttcctgtttctcctaaataataccattttaatgtttgtaagtgcagatgatatgcagccttgatggtaaggattgtggtgtttttaagtacagtacatgttgtcagtaaacactattcaaaagattgttgttgtcattatgatttgactcgaattttgtaccattagatcacttcttctacttttctagtgagccagcggtagtgctacataagggtcggagatcatgggcttagtaggaagcagagggtgtgagtgaccctatcatgggaggtggaggtggcagcatggctaggaaacaatagtgccataggaatcgtggggtcaaagctaggaggttagtaggagatgtaggtgactgcggtgaagagattcaacatgttatgacctaaagaaaggatagtggattctagtagcggttgcatatggtgacggagaagcacacatggggttcttctggccaagatgaagtgatggagaggaaaaagatgtgacaatcgaagatcaagatattggcatagggtggtgtgacagacttaaaaatggccaaaatttttatacatttttgctatgtggatatcaaaaattattctcgtatttgattcatgaaggaaaattaaaagaatcagcattgataatgctttcatggagccaaaaaggatagtcaacaaccaacctatctcctgctccctccaacctggagccgacttcctcgacagctccttgggcccccaaatgctcctcgaggtgctgaagcgccaaccactctcgccatcatgtcatgttttgttgtcatcgcccatgatcgttgatcctgcatatcgccattatctgtgccagttgttagagcgtcaaaatgtggtgacctaaagctcgcttggccagatccaacaaccttttgatcgagatagcctgtcatcgttcatcacagttgccattcttgggaagggagagggagtgacgtcatagtggatccggtagccccaacctctcattagtggatccagtagtcatggagacaccagcatcatcacagtcgaatgtccactctagttctcaggctcatctaccactctgggcacggccgtaccaccatcacttgtgccaatttaccatgctcggggaggcagaggaagtgattgtggatctagcagccttggtagttggtactaccaccaccatcagagttccgtgtattcctgctcctcagcaagctaccacaccactactgttttgccatagcatcactcctcgacagtcccccgctccatcagatcaattgagccattaagggagagtggtgggggaaggaggtaggcttcgcagagtgagagggagagggagggcgagataggaaattgtgaggttcaggtgacaacaagaaggggtaagagtttagtggagttcttacaccatgatttgcaaatattggctcaatctatttgtttagccggttccggtggcatatcactgtcagtttttattataaattgacaacgatatttcaacttcattgtccgttaacgatgaatcatagcattgttctaaatatcacttgcaattcataataaattcaatacgggtgctaacacggatggtttttgttgtgaacccgcagcagtaatgataccttacccaaggaaccacacaaattttcggggaagctaggggagcaaagtcactagagcaagccggacccacggcagccatcattagggatgcacaatggttgtaaataatggtctcttaatattgctaattaggaatatttgctgatcatatggaagagagaaagaggagagataaaacatcattgttatgggtaacaacggctcgacaatgattcttagcctccataatatggaaacatagttgcatgagaaagaaacatagaaagaatagtaacaaaaagaatatttttttagttactggttagaacttttatcgtctcaactgttataaagactcggtttatattgtctaagtgaccataattgtctttactattgaatgtgccctaaaccaaggagcagacactgcatggctggacatgagtaaccttcacaagattataacaggagagacagttttcattgtaagaattgttctcaaatttttggaagacgcaatcttatcaagtattgatccaatactttgagttcttatgatgacacagatacactaaacatggtcaaccgtcaagcaaattgcacagccaagcaattcagcgctaccttatctatctattatctatctatctatcttctatctattatatactaaaagtccattaaacttcctacaaacactcttaagctaccatgtggcatcctataatcactctcgagccgccatatgccactctaataaaatagaaaaaaatttgaccgtcaattttctttaaattggtgcacccactatcgttagatttatctttgcatgaaaacataatctccgtccgtccaacgtaccaacgtgcgtacgatccctctgcagcttacttactgaccccgtttcctttttttttctcttttttacatccccataaaaattgaaataaaaaaaattaagggcctaaaaagctcatcaatctactagatctagctagctcttcctctatcctctcctaataaatattccattaaacatcatatagaaattcctaaccatccataaagcactcttaaattagagaaaatctaaaaagaaataaaacattcgaccatcgatttactttattttaggttattagatatatctttttcttaagaaaagcatcccaaaagtccctccgtgctcccatgcatcgttaaagcctgttaaccatcctcataaatgtttctaaaccactctgtgacacttctaaattagaaaaagatcataaaagtttaagaacaaaccatccaatcattggtttcgccttaaatcgacgaacatatcatataggttgttattagacttatattttaagaaaaactaccaaacctcctttcctccctccacgcccatacaatgttaaagacataaagtatattaaacatcctataaatatttctaagccactacgggtctttcttaagttaaaaaaatcatacaaaattataagaaaaaaaaacatccgattgttggtttcgacttaaacatccaatacattattttagatcattaaataaataattgttttaaacaaaaaagcattccaccctccctgtcctcatgcggtgtgtgtcgttcgttttctcttatttttctatttatgacaagagaaaagataattgaaattaaaattatctttatgggaaaaaccacaaatggacctccacatatcaggtctagctagctgtcccactgccccttttcttctctttctcctcttgctagcacttataggaacaatataaataaaataataataactttttaagtcatacaacttatgatatgcttaaactattatattttttagtgaagtcaatacttcaatatctatattgactatatttaaatgctaacagaaaaaataatattccgaacccacatccattctgaggcctccactaaataaaaaaaaactaaaattcgttactaaaaatcaaaatatcccatcttaattttcaataaagccggtagacccattacttatatcccattagacaactaacaactttctatcaacttaattaatttctcgggctatttaccaatacaatttcattttgatgcttttatcaataaatgattgttttaggagaccaaattatatatatgatttatgaagtcactaataaattagagaaaaatcattgaatgatatcaatttttaggtcataatgcgtaccccatctagtgttaatttgttatagacaacattttaaaaattaaaacgtgctcagttgaacatcataatattcgtaccaagcttgtgggttgcaccaaggaatcttagcagtgaaacaataataaggtgtccttaccaatatagggagtcaattccatatggaaattaaagaccatgttcatttatttctttttggtaaaacttgctatgctacatcgtaaattcttaacttttagcgtagaatagtctagaaatgtgtatttattattgttaacagtggaatttgaattatatgacctctattttaatatttcttactcatttgaagagagataatttagaacatatgacttttaccaatgttaggttgtaggctgaacccacatatatttttaacccaaattgaagagatcaaatcatttcaaagatatttcatagagtggaattctccaaaattttaaaaaatggctggaaaaaagaattcaaaatttatgtagtttttaaaaaataattgttgggtttaaaacccattctaaatataaatattcaaatattttagtaggactaatagaatgaccatatctaaaatttcaaatagaatctaatacaaaaattggactttttggtagggataagatatccctgtggggagtcgaaatactcaaatttttctcatagaaactacatctattgtttcgacataatattttcttataaattgaaaactgttcaatttacagtttcaagtaattttactttagaatttatgtgctgcaagggtaattagaagaaaaccataaccaatgtttctagcacattaaataagttcaattataatttagatatggtaaaagaatattttaatataaagtcacccatacacggacattcgtaattatattaaataaggtgcccgtgcatgtgtgcacatcttcctaaacagtaagcaccccacagcaagatggatcatgctcgacaagaacaatcccatcgctgaacaattaattgaagttcctacttatgccttcaggggaagaaccatggcagcggtgaccttctttatggagggcctcgccgcgagcccatcccaccatgccttcacatgagggtacttgtcgagtagtgaagcgtatggcgtcgccatgaagtagaaggtgaaggggaagtggctgaggtccacaaagctgaggaaattgccagccaaatacgtattctgcgatagacgggcctcatacacctccagcactttcttcagcttctccaggctattatcgaccaccttttggttggtcgggacaccgtacatggccgggttgaagaggcattcatacacgatcgacgagatcaccggatagtactggtgtatctccacctcgatcccgatgtccaccatggccgcctcagtcaggttgccttcccgcagtaggttggcctcgctggtcttgtacttgcgaaggatgtaccttcctaccgcgcgggactctgaaaaggaaatgcatttagccagttttatttgcttaaatctgaatattttagatggtaaatctgtgaaaaaaatttatttgtaatgtaaacatatgaaaatctattgtgccgcaaatgagcgatgtgatgctatgtatttgtagtattatattatcggtggaaataatctgaattatttattattaaaggtaaattaataatttactcatacagtgactagggtaatttatgtttttctctatataggttggtcggtgatcatccatctcactatcgcggatatcgctcatattctatcaagaaaaacaaaaggaaaaagggctctggatccccagtcctccggctggcatttttttaaataatttcccttcacgtttctactactgatagctttgatgctagtaaaacttagatttaagcacttcgatcaaatgaaatcaacgattcagattactttatactaccgatagagagcatcgcagtggaactccctgcaaaaagctctgtttagttgtaaaatctcaattagctgccgaatatgcatgccagtcgattggtttagttctgtgttctcatgatgtctcccaaactattcacgactcctgtccaagagtacagaagaactacagaccgaagagaagcagatccccgtcctggaaagctggcatttgaccaaacggctgcgagaggaaagcacagagatcaagctgggagcacaggaaaacaaaagcagagtaagcacaagcgttagcgtgtgcttacgttgcgcttgaggtgttcggggctcttatgctccatggccttgaagtcgatgttgacgagctcgtactcgacaccgacctcctccaggcacaccagcacccgcgccacgttcgtcgacatggccggaccaaacaccttcaccggtgccatcttcgtggagcctagctgcccgcgagcaatcagaggaatcttgtggagtagacgagtgcggctgcgtgtggtgcaatgagcactacacgacttcgtttttatttataacgcggaaatcccttgcgaaatactagcagccgggttagcacgtgcttgacatcgtgctcggaaatttcctatcaggtgttgtactggtactactggtatccgttcttggcacggtagaggaggacgagttctcatcgaaatctaacgctagcttaacgctcaaggatcggagagcatagatacaagaaacgggagactgagctctatacgtctagttcctatgtttcatattataaatcgtttagattattttctatataaatttattttagtttgatcaggtttataggaattaggaagttagtccacgcgaatgcgcaggcatcttatttattatgtttatataaataatgttacgagaattaagtcatatctcaccatacgcgtataagaaattgtatattttacctcataataacaaaaatctatgttgtgaaatatattgtagactttaatactttaatataaacgaaaagaatgtttcttatattaaaaaaatcacttttgtccaaattatgtaaactcacctattgtcactattacttattatcattgtcgctagatgccattttaataaatgaaactgcatctgtaccaccaaaataagcctaatacattattaatacataaaacatttgtctccactacatacctaaatgtttatgtcaacacttatttctaaatctataaataatattcttaaaatgatgcttctattggttaatgggatatcaccgttaacaattagacatgaatgtcctctctaaaaggtggagctaccaactctttatttttttgttgcctttaaacatgggttccgaatcgacatactcgtgcctctcaaggccagcgtataatgtacttttaatgcttaattcactatcaacaccctcaaagacgattgcatcagtaagtagaaagttgagcactattgtcaatggtggtctccactggggctacctcaactgaaccaaatgtatgcccctactatacttcctcagtgccctttagagaaagcaagaaaagatagatgtaatgaaaataattcttcacataaaaaatagttgtttttacgttttgtgtagttataatttgtttatagtattaaatcagtactacccaaatttttatggtatatatacaatattctcttttgaaatgagtgaggttgatcattaaaaaatgtatcgctaaatagatatatgaccgtaacaatcttcagagtatcatatcattatatcattgttcatattttgacaaagatctctattttagcgtctagtttgttttcgtcacttgttcataattgcatcagacacctttactaattttaaaatctatttatttatcaaaattatctacaataactaatttgttggagtgcacttacggtcacgtcagtggggagtatatggcatacatctatcaactatcacttatgcccgacatattagagttacttgacaaaaaaatatcatgagtagtttaatgcatatgttatatgattgttctattttttaccaaaccaatttggcaaagggaaaaacgtatggattaaggggtcgtattatagcgaaatcattgcctagaaataccattgaaatagttttgaaaaatctgaaacaaaacatttgagaatcttagtctccataaattaaaattaaatcatatataactgacaaaacataatgttgtttcgctttcacagatttcagttagtgttatatatttgccaagtgatatttgacaccacaaaatatgatgtgaaattattcaaagattatgatgaaattaattattatatgtcacctaaattatttgaaaattattataatattaattattatatattatctccatttgttataatgtatttagcatcataatataactatgataagtcatcaacatttgaatacaatggattataatttaaaattaatttaaaaatgggtgtttaaatacctttgatttgatatttatatggatctagtttaacttgcatatttctagagtaataaatttggttttattgtatataaaatcttatcttgaggattgtctatattttttgtcgatggttgtacgaacatacatatgtatttttttttgggttttatagcttgtttaatggtatatacgtatgttactttggtttttttttaatcgaacatccggtaaacagtttctctcgtataaaaaaggaaaataaaaggaagcgagctcatgtaatggtataaaataatgggtccattaatttaaatgaccatgttgtagagtaataaattttatttttatagtatataagattctattttaaaaaggcctcaatggttatatattgttgtacatatattttcctttagagttttaatcgtgtgcacatgatacatatcctttgttttttcataggtgaacagtatattaatgtttttttatgtttttatagtttttttatcgtattactacgttctttgttattattgtttttatatttttttaatcatatgtactatgttctttattttttctcttcgaataaacagtacctaaatgcatatcttttttttgtcttaaaacatggtggtttaagagtgcttgtacaagcaccaaatgaccatgtttgtagagtaataaattttatttttatagtatataagattctattttaaaaaggcctcaatggttatatattgttgtacatatattttcctttagagttttcctttagagttctatagtatataagattctattttaaaaaggcctcaatggttatatattgttgtacatatctttttttcattcaatgtacgtacataaatatttttggtaaacggattatctcggatatagaaagcataattttttaaaatagatctaatcggacggtgtaaaataatgtgtccaccgatttaaataaaaatcgatggtgggattgaagaatgccacataacggcctaggagcacaaagatattggcgggtaaaaaaatagttgtatgatttagatatcgttgttacttaattttgttaatataaaattttactttaaaaaggaattggtggaatacaggagggaatcgaaggaagagaaggtacgtaacttatgcatatataatatcttagtacgtaactatacatatttaacgtacgtatgacctaatgctcggtggggctggatccatttaggaggtggattttttgttaaacataaatctaatgattgtaaataatggacccatcaaatttaatgaaaatcaacggctatttgttagatatatataaccagtaacctcactctcagatccggttgttactagtacaaccaatcagatccggttgttactagtacacccaacaacagtgtatgtctttttttgtcatcttatagaatttccttttaaaatacttagctgatttacgatctgattatattgttctattcattgcaataaagtctgtataacaagatgtcacacgattatatttttatgaaaaattacaaattaattacttttatataatatctaaattatttatagatttcttgttaggcatataaaagtaaattcaacaaagccttaaagtaatttacatatattatagaagtaacttagaaaataaagcaacttgtcatgacattaaaagtaaatctattgttggggtaaaaacataagtctatctagaaattaaatttaatcaacatattatagaactaacatttttaaagtaaatagttcattgaatgtctaaaaagtaatttaatcaaatataaaagtaatttatatatatgataaaagtaacttacatatataataaaagtaatttagaacataaatattttttcgtcgtaatataatcatgtaagatcttgttataaagatttaattgcaataagcacacagtggtgtaatcggattgtagatcggataaataatttaagaaaaaatttaataaggaaaaaaatacatgcactgttggatgtgctagtaattctctcacgtataacatataagtaacatttcaaaacaaaacaaatatattattaaaatacattcagttctagatttaatgaatctctaaatgttgctaaatttttatataaatttggttaaacttgaagttttgaaaataaaacagttaaaacgatttataatatgaaactgaggggtcaaagtttgatacttatgccatcctcaatgtttaatgtaactagagcaattagacgggactcacaatttgatgttcttttgtatatagcatatgctacatgtatatagtattttcttgatcttaagttaggacccattcatgaaaataaaactctattcaatatgaatgaaaaacaccatgcatgttgcaaaaggtatgaactatttttttatttcttctggtctagtcttgagcttaaggttaaggttggacatagcaatatatttcttactaaggttatggttggacatagcagtatatttcttaccttctcttctcccaacgcataaagttaaaaccaaatgactaatttatttctcaaggttacgttgcatgcaactttatttcttagccggagatttcgttagcttgtcagataccatccattcttcgatggtatattacctatttatattagccaaagattccaaaagagaaaaggaagaggagatcgaggagattatttcccctcaattgatttggccggagaaggaaagtggcggccggattttggaaggaggcggcggcttgcggcgcggctaggagcggccggaggttgaagacgaatgacaggtgggccccacctgtcagctgcactgagagagagaggagggagggacggcggactgggccaaacgggccggacgcaagcaggccgaggagagggagagagagacctgggccgactttcggcccaaagccaaaagggagattttaaaacctttttctatttaaattattcatgaaatgatattccattgattaaaaatacttccctggctcaaataaatcccagaaaaatctaggaactatagaaacaagagaagtatttaacaaaattttatctagcccacttttatattgagatttaacaaattaaaattagatcttctcttttaggcttttaagatcatttctaataattccttttaaacaacaatttataacttaaggatttttaaacaagaaaagcacttaacataattgtaattagatcattaattgattaactaattactgaactattctttgtatcacttaggaattgagctctaaaaaaccgagaaaatttcagagagtataattaatcatggagaatttaataaaaattaaatccagccatgctttatacttaggaaattttattgaccacatttaacttcacttgtaaattaatgaatatttaatataaattctattaataatttattaaataatttataaatcctgaaacggaaaatcaggctgtgacattatggcatcctcaatgtttaatgtaactagagcaattagacgggactcacaatttgatgttcttttgtatatagcatatgctacatgtatatggtattttcttgatcttaagttgggacccattcatgaaaataaaactctattcaatatgaatgaaaagcaccatgcatgttgcaaaaggtatgaactatttttttatttcttctggtctagtcttgagcttaaggttaaggttggacatagcaatatatttcttactaaggttatggttggacatagcagtatatttcttaccttctcttctcccaacgcataaagttaaaacaaaatgactactttatttcttaaggttacgttgcatgcaactttatttcttagccggagatttcgttagcttgtcagataccatccatttagcttgtcagataccatccattcttcgatggtatattacctatttacttgtgcccatgcttctgtgcttgatgactgtcctcatgttaagggattattgattagttcaaaaaagaaaatttttaggtgtcacattggatatatatttgaccggatgtcagaaggggttttcggacacgaatgaaaatactaatttcataactcacctagagaccacgagacgaatcttttgatgagcctaattaagccgtcattagtacatgtgggttaccgtagcacttatggctaatcatggactaattaggctcaaaagatttgtctcacgatttccatgcaaactgtgcaattaatttttatttttatctatatttaatgttccatgcatgtgtctaaaaattcaatgtgatgtttttaaaaaaaaaattgggaaccataccagacctaaagcttggatcactgccatcacgaacatatgatacgagttcgtgcactcaccacgtgaactcacgtgacaacggtgtatatatttctgccaatttattataaacatgtatatttttgtaaaaccggtgaaaaacaagtatattctcgaaaaaaacattgaggccaagcgtgaagaaagtgacagagcttatgaagatgccgtttgttgcttgattaaaccagaaactatacattggggcattcaaaaactcaaattcagcatgatgtgaaatcggtgtagtactaagttgcagcatctatattcatctctaaaagcttgttatccctccatctcaaaatataacaacttttagctctcaggatttgtcctaaaatataacaacttctccaccaacattttctttctaaccaatcacaacactccactgttcacttttcccacctatctctactactcatccgatcacaaccctccaccactcacttctacctacttacttaataatcatgttcaaccctaaaactttttatattctggaaggaagggcgtacattgtttactggagaggcggagtgctaatagtagaacaatgatttcatgtaggcccttggccaatcttgaatattatgtcatatttcttgatataaaatttcaaaaataattaattaatcgcatgttggatagccatagttatgacaaatcacaagctgtagtgtttcatgaaacctcaagttgtagtccacacgagttatgtattttaaattattaaaatcaatataatattcattaattgatgaaaaaaatattaaatgatcatagaattattaaatgatgaggtatattaaatttattcaaaactgagcacaatttggtattgttaattttaaatctcaaaatactaattcttcaaaaaattgattgagactacattccaatgcatttattaattagttattattttttgttattttcaactttaagatttatcacatcatcaaataaacaataatccaatatctaaactatgtaaattttatattaattaatttcgtattttaaattattgaataattccaacttttagaattatcacataatccgaaagctataattgagaatcgagcacaactctatatttcttaattctgaattatttaaattattaaacaacaaaaactgtaattgagagtccaaactgaatacaacgatgtatttattaattctgaatttgaaaacgtaacaatggatttgagagaggactttatatgagtttaccttttttatactagcaatttcatgctatttttatctcacctggttaacattgacgctcctatgagagccactaaatgggtgacctatggagtgacatcatcgaaatcttattatctaaagctggcggttatcgccgcaagctgattggttcgttttacccctatttagttttacgccacgtgtccatgaagcattcggcaaacgatcgagtgtctcgcgcatgtattgttgtcttcatgcggcagaaaacaaaaataacagcagcttctggatgtcgtctcacctcatgtccatgctatgtgggccaaacactcattaatctctcatcccagttctataaaaaaaaatcaatcatcccagctggcctcgccacattggcccgtgcgcctttgctggctgagtcagctatatggctaacctgtgagccgaacccatgcatgtgagtattgtagcataataccaggcttggaataaaaaataaataaataaatcaaaccatattggtctaatatacaattatatgtggcattcaattagtattagttttatagttaataattatataatttgcatgaatattgatgatcaaattttggtgtcaatgctattttaaaagctaacacatcatatatttctcaaaaagacaaagtatggtatagtctgcaacagaataaagaaaaaaatgcacacactttgattgggttataatattcatatattacttaaaaataaaacaacaaataataaaatttgtgtataaaaa

SEQ ID NO: 4681 - DNA, 11893 bp, Oryza sativa
aaatggccataacttggccatttgaactcggaattggaccgttcaagtctctaatttttccttaagaagtcaagaacccattttcgtgtagatgctgcagcttcggaggatccgctcttcgtggaagttgaagccggcgtttgggaaagcgagcaaggcaaggcacatcatccttgaacatattgaatcccagtttataaaattattctgatttgaattattgcattatcgctttatttaaattcccgcgttatcactgttttatttagccatgcctatttatcattgttaagacattattattgctattgttattattaccttgttcaccctaggaaaataaaaccccaactagtgggtactctatttatggttccactagtatgaacttaggtagatgcttcgctggttaattaggcaacattaggtggttttataactttagactttgggaaatctcatatcatttggacattatggaattgttggattatggtggaattggacatacccctctcttcctctttcaaagcccctaaaacctgtttttcggtggggttttggtgcatgccagttgtgggaagtagcaccccgaccaatataaggattaagctcgggcctctgttgcaaagcactaccgtacttccacatgtctagtgggtaaggcttagtttgtggctcagtctggttataaacaaaagtacacggatggagatggacgaagtcgggggtcgatggacatctctaggacaaatgaaggctacacgagctgcggcccggtagtcgagatgtcatggtacagggctggtgtcctgctgctaggggctcaatcctgcctacctgtcccggaggttccggccgtaggtggggttgggtcggtactcttgtttatggctaggatgggttgggaactatgtcacgtcttccgtccgtataccgtggtggtatgtggcacgtggttacacgtgaggaagatgtgtcttgtgggtaaagatgtacacctctgatcagagtataatctattcgaatagccgcgcccctcggttatgggcaagccgagcaatgtacccaagttagtgttttaattcttaaaacctgcttaacaactaaaatgtggaatggttggcctgggttggcttgggacgagctgggacccagggtcgagttgccagttcggtctgaatcatcgtaggccttgggttaaggcaggttcgtgtgggtccacggccttgattaataatattgtatagctctaggatcgtgtttacaaaatagctttgggcaactaagtgacttttaaatgctgtttactgcaaaacttaacccctatattattatccccttgtacccccttgcattaattatgcatctccggtgtggcttgctgagtactgtggttgtactcattcttgctcaatcttttccccccccccttcagtaagagaagctttggagaagaagtcttaggtggagtcctagcttataccccagttgagcgcctgtgaagatggagccgtaggcccgctagtccgctgctgtttattttttatggtcaggccttaagtgcctttgtaataatgtaaatattatcgatataataaagatgtgccttttgtatcatgtttgttcggtgtaccccggcttttcctgggacggggattaatacactagcgttcgggaaaaggcaattttcccggtcgcgacaagtctttagtcctggtttgtaacaccaaccgggactaaagttatgatctttagtgatcccggggggcctgacaagccctgactgcatttgaaccgggactaaagatgttctttagtaaccgggactattatggaattcggccgaccgacgaaatatagtttcttcaccagtggtaggactactgcctccaccaaagttgctgatcggtacacaatgactaagggtcatgatcctcatgacagcatccccaagggtactgaaattactgatcctgacccagagaaagccatccccaaagaagaccgacgagattagtgagtctgatatctaagcacaccgcctcgcctttacttctccaagaatcacaagtggttaatttcttcatttttatttttaacgtgtgcagtggttaatttgttatttttttcgatcaacatgtgcaatacacgtatagttgattaattacttgatttgctggaatgcaaaatgtgatgtaacacgtgcattaatggttaatttgttcttatttttttatcaacatgagcaattcacccaccatcgtattttggtttttctaaatactaattttgtcatatttgtattttccatgtatccaaaacataaatgaagagtaaattaaatgtttgatcgaattcaaggatcatcttaatacttattggttcaatgaatgcgtacgtaggcaacactttacactcggccttctccgtatatactttcttgcataatttgcatatatgtctatcaggtgtagtgccacccttatccaaaaaaaaaaaaccaaatcggctagggtttcaactgcaagacaatgagaggcggcgaggtagtggttaacggcgagaggcggcacagtgcggcaaggttcgtgacaattggtggcacaatgcggcttacacgctcgggatccccatggcttctccaagtggatgcaagggggtatatcaaatatttgtgaaatgttgtgatgcggatgaagccaagtgcataaaaattgcctacatagcactccatgttgacggtcagccataatcaaaagacgattgaatcgagggtggtagttggtacaataaataaagtgtaccgagctaagtgatattatcacacaagtttaaggttcggccttatatttcactagtttttttttttgaaaaatgttgctatattcttatataaatttgatcaaactcaaaaaaagaaagttgtcttgaaaaatttaaaaatatcttatagtatgacggggagagacaatatcttagtttgatgggttataaccccagaaatgaagactttattcaacaaatatttttggaacgctagaggacggagtatgtcacaatctcggtgcccgcagggtctttgagactcttgcctcggactggtaatgcttcccaaatcaattcgctgtcagcccacataggagatacgacttagactccgtaccggctacagcccgtgcagccacggcctcatcgcagcgattccgcttcctcttcttgcttgccgtcttcctgacgtggcaaagtacccagtagtcgtcgtcgtcttcctcctcgtcggcgcgccggtacgtaccgggttccgtgatctcgtactccgccaagacccaccctcccccgaaggtgctcagccggccgccctcgtcgcgccggtagaagcagtagcacgtcttgctccacggcacgacgacgccgaggtcggtcaccgacttgccggacccggtccagctcttcttccacagcccgcccgcaccgccaccgcctccgcctccctcggcgacggtccgccgcacgttcggccggcggcagcgcctccgccgcacgaagtagaacgcctcgccgcggcgcctgtcggcggcgcccccgtgccgcgcgacgaggtccagcggcgccgcggcggcggggtcgtccctgacgccgatgacggggacgtcgccgtcggcgcagtggaagccgcggagacgcgggcggaggtggcgcaggacgagctcgcccaccgtcggcgtgtcctggaaacctgtcgcgcgcagattatcggacgcctcgctggcgtcgtccgggggatcgacaaccattccgtcttcttctacttcctccttgaccttgctgggtctccagcagatggttgttggttgcgttgccgcggagcttggggatgcgcgggagtggtcagctgcagcagcgcagatcgccatggcgcgaaggcgaaaagagcgcgcgcggcgtgtgcgtggcgtccgtgtccgtggcggcggcgatttttatgaagcgaatcatctggtttgttgtggcccacgatggatgcaggacaccgaactgaaattggtttcagttgtaaacctgatacgaaacggagtttgaagtggagtcctgttacagtgtgagtaatccggtttagagtttagaccatatgtatcaggtgctgcggcctgcgaaaccagaggtgggctcgggtcggaggcgacatgggccacggcccagtacatagagatggagaatgggagacgaaagggacgaaatggtccatttgcgaccctcaaccatgggctgattttgattcgcatttctcgaatttttttatttatacattttttattaaaatatttacgaaaataatttttttttaatctagtcacctctcgccctttccagagagcgataagggatctaaatgcaaattttccagcacagcttgttagctctataattttataatttaaaattacattatataaagtaaaataaaataaaactttatatcaaaattgtagagcttgaggagatctacaacaacaacttttacatttaagatcttttagatatccaaatatttgttacaaaatataaaacctatttaaaaaaatttcagatctacattttaaacgatatcggatggagataaactttatataaaagttgtagatctcgatgatatctgcaactttatagtttatcacttttccagttaaaatcaattgaagtgtcgaataagcattattagtatttaagcattaaaactggtggaaagggtttgaacacaaataaaaaaaatttgcatttaggtccctatcaccctttggaagggcgatttttaaaaaacgcctttccagagaggcgactagatttgtaaattttcaaaacaaaaaattattttgtaaatattttaataaaaaaatgtaaaaataaaaaaaatcggatttctctattgactatcacaactgttataaccggatcattagtcctccctcactggttagcaaggtgcttttgaccgatataggacctgcatagtattacagtcagcacagcacatgacaatgctttaagctgatatgacatctatgtggcattatcagagaaaaaaacatcaataagatccacatcagtcaacctcatcttcttcctccaactcttcatgtccttcatgctctctctcctacaccctctacggcaaccctacatagcaatactagcaaggaagaagacaagacatgcagcggcctcaaacggtacggtgatgacctaggcagtagcagcagccaataaggatgatgcatggttacagggaaaggagcgattgtgttgatttggtgggcgactgcatcaatgacttcaccagatcgacagtgagctctagcgcgttctccggtggccaccacctccgtgtgattctctagcaagatgacgagatggtgtgctcaagcctctacctctccattgctcgtggccaccacctcatcgcccttcccgttgcctcctcatgaccagtggtcgagctcgacgagagccctattcatgtgcctccttccttccttccttccctcgcacttgccatcttgtgttgtgaccaaggggcgtcctcacctcaccgtttgtgtccctcatcatggaccttcgccgctgccatgtcactgttattgacttgtgctacacctaggatggcatcgccacctcaccgctactaccaccgtcctcaccaacgagtggaggacggcaatacaggggaactgaaggagtagcatgggcgtgctgaggagtgagccgaaacggaagggtgccacggccttcggctacacaacatgctgctccacgccttcccggtctggctcctccatgatgtcgatctagccattcatggcacctgagctcaccggttggcggttgctcgaagaggtcaagctgttcggatttggatgggccacaccaggagccgcttctcatcctcctctcttccttcccaagcgtaagagccacatagccgctggccttatcgagagcatgggtgtcaatgttgaatcggcctccttggtccccaattgtcggctcaatctgctgccccggtggcagcaactgcagaagtctctgttgtccggttaggctccaccatacgctatactactgccactacaggttagagagggaagagaggactgatgattgtggtagagaaagtgggtcactttactttttattttagagaagactgatgattgtggtagagaaagtgggtcactttactttttatttttcttatttgactgatatatgggtcccacataattttttatttgtatgataaaaaatatcactgatatgtatgtcttattttgttttataattgtcatataaaacaaaaccatcgttaaatcgttcgggaagataaaataaaccgtttcactagttggaagtgcctttatattctaagggtgtgtttagttcacgaaaagaaaattttgaggtgtcacatcggacgtttgatcggatctcggaaaaaactaatttcataactcgcatggaaaccgcgagacgaatttattaagcctaattaatccgttattagcacatgtgggttactgtaacacttatagctaatcatggactaattaggctcaaaagattcgtctcgcgatttccatgcaaaatgtacaattagtttttttctttatctatatttaatactccatgcatgtgtcaaaaattcgatgtgatgttttttgggctaatttgtttagaaattaaacaagtcctaagttctatggttgaagttaagggttgcaaatcagatacgcgtggatgggcgacgagtgtggcgatgcggtgacagcccacgccccacagcctcagcagccggtggcctgacctcaccaccaaccggcggcctatgcgcggggagcgagcgtgacgatcgatcgagaggtgatccacaacaagtgtccacaacacatcgtacgcttgccgacactactactactaaataatcaatcatgtgtacatcagtgctccgtcctacgtacgcgatcgatcgagttagtagctagtgcgagtgcgacacgtacgtgcatggacgacgcgcccgaaactaaggcgaaagctcgaaaagcatatcaatcacactccagcatgcattcatctaattaaaccgtaccatgcattaagcgtacagctagcttcaaccacaagtcatgcctagcttagcctcgtggctgctgggccaacacacaagtacacacaaccaccgtccgagatcgaccatactgattcactgctttggcttaatttggtccacacgacacgaacaacatcatcattatatattggagtttattcttttggattcgtgtaccggtgcgtgcactgcactggtctagctcgcaggctatctaccaattaaactttggcccgatgacgtacagctggatggctagctgttaggtgttcgactccggtactgtactagtgtgttaggaacaaacggttcgatcgatcgctttgtcgaccagaccaccatctggcgcctgcagcacagtcagcagcaacaagccgattaatggcaccgcccttggctatgttgctggtttgatggattttttacacatgcgtagccacaggcccacatgggcgagacaagtacgttacacgtggacgcgaaagcgacgcaggtgcaaacatgagcaaattaaagcatgctaatgtatatttttgttcgatggtatcagtaaggtcaattcttgtcattgttcacggctttgagtttaggccgtatcgaaagtaaaagaaattagtggtaggctgcaaagataaataaaaaaacatggtaattaagccagaggccgcggcaacaacaacgaaagaggccagacaatcagccaccttacaggttataagttcaaatagagacaataaattgatcaaagatttacccaaaaatgtcttaataatctgcttgaacagagctccgtcgaggatgcgatccatagcttgtgatgtaattgctcgtttcaggtatcaatctatattttcccaaaatacttgtagctttgagtttttatttgtaacgtttgatcatttgtcttatttaaaacattatgaaaatattatttattttgtttgtaacttgctttattattaaaagtactctaagtataactcctattttctatatatgtattaatttttccaataaggcgaatggtcaaacgttgcaagcaaaaagtcaaagcggctactaatatagagcggaggtagtagttgatacctacttacttctaaatctcaatatgcaaatatgtcacatcatcacccattagtaattattatctaaagtattttaaatcacaatgcaagtgtaccacatcatcacctactagcaattattatctagattatttaaatctcatgcaaacgtgacataagattatcattttattgtatatttagaaatcaatatgtaagtaatgtttactcatcatttcatattatttaaacatatacctattttctataatgtaatatatattcattcacatattctgtagcaaagcgcggggtatgaactagttcttgccataccgagttgcgccactctctccaagcttttcagtttgcttttaatatatattaaatgccgggcctttcttgcaatttaagcataaagaaaagttaactttcttttttgacaaatggtccaaccatgcatattcgtgattcgtcccacctaattgatgaaattactatatgcttactatatgctttttaatatacgactagtgttgacttttaccattcgtcttatttagaattcttatgtaaacataaaaaatataaatcatgcttaaaaaacctttaatgctataaaccaataaagaataatcctcaaggttcaaaatctgcggaaatcataagctccgaccgaagccattattggagattaaggaaatttgtgatcgttcgctcctaaggtaaagccataaggacatgtacagacgcaaatcagattgggtgttggagatttttatgggtaaggagttaaaggacaaatggacatcaaaatatatagttgctacatgtcttatatttgttgttgtatcgtttgtgtctagggttagacgcatggacaagcctgcttagtcgctgtcctatacaagggctggatcttgtttgtttgattgctgccccgagagatctttccactcgcctggcctaagagaacttgcctgtggtttggttgcagtaaattaattgtcagctaatggaaccactaaaatatttttcccttaacccgaattgttttatgactactgatttttttctcaggcacgtttagccttagttcttcgagaaaacagaaaccaaatgggcaagcctcatcagattttagcaccactttttctcagtcacacacttcaaactcatcatacttaagtgtgccacatctcatatatgataagtttggtccccatcggttggctttttccctaataagccaaaacggcttattagggaataaaaataaatttgtaggtaaaatttttatatatgtgttcttatgacttaaaagccaatggtgaaaaagaaactatgttgaaaatatctcaaaattaagttagaaaatttaaattttggctttttctttggctgattattttttataagacggggagaatatataactagcgtactatagctatagatggccatatggcccgcagcccgacagcccggcccaaggcacgggcgtttggcccgacccaagcacagcccggcccgtcagtgttcgtacccatgccggcctggcccgacagccgggccatgcctgggctcccgcagcagcacgctgggccggcacggcacgaccgggctagcacggcccaggcctatataacggtaggcacggcccgacgaggcccatcgggagccgctgccgcgcactcgcacctcatatataaaggccgctgcgtcctcttgcctccgccagtcgtctccctcacaaccctaaccctaaccctagccgcctccgccgatccacgcacgcctccccctccgcctccgccaccatcttgaccgctccgcctccgcttctgcctccgtcgatccacgcctccacctccacgcgaccacgcctccatctcgtcgccgtctctgatgaacgcctcgccggatctaccatcgagggtcgccgcctcgccggatccgtgaccttgtctcatctcctcctctccagtcttcggatcgtcggccgtgctctcgatttcctctttctttctcatttttttgccactctcgcccgctcgctgtttctccatgagctctttgtcagatcactccccaaacccagtctctgctctcttcttctcgtagatccgtcgatctctatcatcaacggcaactccggtgctccggatgcgcaggtacaccgtacacacctatctctgctcctctcccctctcttggttttctacttctctctggtccctaactgctctcttctcccattttgtgtgtcttgcaggtcgctgagcggtagccgccgttgaggaaccggagtgccgacgatggacgatccatcctcttgcaaccacgagttgaggttgatggggatacggggtgatgacgaagatgacttggaggaggaacgcgtgcaggtgttcggaatcacttcatcacctcctcacttcgatgggtcacagccggagacggagccggacgtggacggtactggtggcagggacggtgatggtggcacaggcgcgccgtccggcaccgactccagtgctaccaacaagcggccaagatcatccaaggtgtcacaccccgaagttctcctcccaagcctaaatttaatttataaatgaccccaagaaaatacaggtgcaaagcaagagtaaacccttttaaatcaatgcaaataataatcggaattggcatgtggaatttttcttgagttctacatgtcgaaattcactaacaggatttttagtggaattttcagagccctagaaataattttaaccaattaaaattgagcaagcaatattttttaattccagggaaaatcctttttcctttttctttttctttttcctttctttttcctccttttttcgaatgggccgccggcccattctctctttcctcccctcctccttgctgggccggccgcaggccgaggcccagccaggccggccgcctccctcctctgtccggggtcgccgacaggtggggcccacctgtcgggtccttcccccacctccagccgacgccgcgcccgcgatcgccgcgcccgcaaccgccgccgcgtccacgccccgcctcctccggtccacgtcggccacgtccgcgcgtgcgccgcgtctcccgcgcccactcctctctctcccccgctcgcgcctgcgcccgagatggccgggattcgattttcgaatcccgcctctctctcctcccccactctccacgttggccggcgaaatctcgcctctcccggccacgtccgactccccctctccctatttaagctccgacgccaccccctctctctttttccccatttcgccgaactctcccgagcctcccatcgctcccgcgccgtgcaaccacctgccgccgccgtttccgctactccggccgccgctagccgccgctagggtcgccgccgcgccgcgccgtcgccgccgtcgggttcgcgaggctaaactctaccccggccgctccttccccgtcgagtttcgtcgccagaattcgcaccccctcgcgctccggtgagttcaaccgctaccgccgccttcggccatgaatgccggtcgccgtggttcatctccctctctctaatctctctctcttccttccttagggcaccccgaaacccgtccgccggttgccgtcgtcctcccgtggc

SEQ ID NO: 4682 - DNA, 4345 bp, Oryza sativa
caaaatttcttcaaaaaagaggggaggtcatgccaaaatttatagtgaatttacttcggtgattatatacaaatcggaggtgcctaaaaggttagcaacttcatcctccaatgttttttttgtcatattacatttggagctatgttttgcacacttttttatctctaaaattttgttgtaagttgatgagagagaaaatttgtgtgggaaaagaaagaatatatagaaattttgtttatttgctaaataaggttttataaaatatttgagtaggaaaatatagtgaaagttaatcttaaataaaagaaaacaaactaaattgaaaattaaaagaatttaaaacttaaaaaataataaataagaattatttggtggaatattttataatttttgtatgaataatgatatgtcattattgtatgactgttgaaagagtttgtgattattttatcattattgtatgactgtcattattgtacgaattattatttgtgtacgattttttttttcatttcatgtagatggatcggcaatggatgtacgctgaccggcggtccaaagagtttattgacggcgtgcattattttttgagagtggccgaagctaacaagtagaagggttttatttgttgtccatgcaataagtgtaagaatcagaaggagtattctgcatccaggactattcatttccacttgtttgagtcggggttcatgccaagctataattgttggacatcccacggagagcaaggggttgaaatggaagaagatgaagtggaagacgacaatattccagactttgctcagtacgctggatttgaaggaaatcaaacgggcgaggaggacagagaagctgattataacgatgttgcggatgatcttggtcaaatgttgcaggatgccaaggaggactgcgaaagtgaaaagggggcccataaattagacaagatattagaggaccacagaacgtcgttgtacccaggttgcgagcaggggcacaaaaagttggataccactctggagttcttgcaatggaaggcaaaaaatggtgttagtgacaaggcatttggcgatttattgaaactcgtcaagaacattcttccggagggaaacaaattgcccgagacaatgtacgaggctaaaaagatagtctgccctctaggactggaagttcagaagattcacgcatgtccgaatgattgtatcctttatcgcggtgaggagtacgagaacctagaagcatgccctgtttgtaaagcactacgatacaagattagacgagatgatccaggtgaggttgacgggcagctaacgaagaagagaattccagctaaggtgatgtggtatttccctataataccatggctaaggcgtttgtttaggaacaaggggagtgctagaatgatgcattggcacgctgaagaacgtcaacaggacgggatgctgagacaccccgcagatggttcgcagtggcgaaacatcgacagaaaatttaaagactttggaaaggacgcacgaaacatactgtttggtttaagtacagatggcatgaatccttttggagagatgagcagcggccatagcacttggcccgttacgatgtgtatctacaacctccccccttggctatgcatgaagaggaagtacataatgatgccgattattattcaaggccccaagcaacctggtaacaacatcgatgtgttcctaagaccactggtcgaagattttaaactgttgtggaagaaggaaggtgtccccgtgtgggacgaggacaaacaggaggagtttaacctacgagcgctgctgttcgtaaccatcaacgattggcctgcacttagcaacctatccgggcagtccaacaaggggtacaaggcttgcactcactgtatggatgaaacagaaagtatgtatcttaagcactgtaggaaggttgtgtacatgggtcatcgtcgattccttgcaacaaaccacccggtacggaagaaaggcaagcactttaaacatacggcggaccaccgtacgaagcctaaacatcgcagcgggaaaacagtgtttgatatggttaaagatcttaaagtagtgtttggaaaggggcttggcagccagcctatagagagcgaagatggtcacgcggcgatgtggaaaaaaaaactccatattttgggagttaccctattgggaattcttggacgtccgccacgcaatcgacgtgatgcacctcactaagaacctttgcgtaaaccttcttggcttcctaggtgtatatgaaaagtcaaaagatacactggaagcacgtaatgatctgaagcatatggaacaatgcggcgaccttcacccggaaccacaggagaaaggcagccattacttgagttcagccagctacactcttagcaaggcagagaaggaaagtatgtttcaatgcttggagagcatcaaggtaccgtctggatactccacgaatataaagcgaataataagcacgaaggagaagaagttcacaaacctaaagtctcatgactgtcacgtgttgatgacacagctgctaccagttataataaggggtatcctcccagacaatgtccgggcaacaataacaaagctatgttatttcatgaacgcaatttcgcagaaggtcatcgatccagataggttagaaacccttcagaatgatgtggtgcaacgtcttgtcagctttgagttgatatttccaccttcatttttcaatataatgacgcatctactttgtcacctagtgaaagagatcgatattctcgggcttgtgttcctacacaacatgtttcctttcgagaggtacatggacgttctgaagaagtatgttcgtaaccgtgctcgtccagaggcaagcatcgccaaggggtatggaacagaggaggtcattgaattatgcgtagaatttattgaagacattcacccaatcggggtacctgaatcacgccatgaagggagactacggggaaaggggactctcggaaggaaagcaataatgacggtagacaataatttattccgtaaagcccatttcacgattttacaacaatcttcattggtggctccttacatcgaggagcacttggctctagttcgcgccagaaatatcggtaagtccgatgcatggattacacggcatcacattgatactttccccgcatggctgtgacaacatctcatgggtaacgagacgattaaccagcaactggccttcctggcgaggggtccatctggctcgatcgcgacattccagggatatgagatcaatgggtacacattctacacaagagcccaagacatgaagagcacgaaccagaacagtgctgttcgtatcgatgcatgtgacacgatggtacaactggcacgtattacggtgccatcgaggagatatgggaacttgactatggacctctcaaggtccttctgttctggtgccaatgggttaggttgattggtggaggcgtaacgattgatgacagtaggatgacaacggttgaccttaacaaggttggatactcggacgaaccttttgtccttgccaatgatgtaacgcaagttttttacgtgaaggacatgtctagcaaaggaaagaaggacaaagggcctgacaatcgaagcgccacgtggttctcccaagcaaaagaaaaatcgtcggagtagaggacaagactgacgaggattacgatcagtttgatgggcaaccccctttcacggtgacggttgacactagcatcctcctatcaaacgaagacaccccttactcacgtagcgatcacaaggaaggaacaatagtgaggagaaagtacgtgcggacaaccgtcactgccgtaattgttgtaaactattttggatgtattgaatatgctagttatatttgattaattacaatttttaacaatttaatatcatgcatatactaattatatacgattattagaatttttaaaagttttaaatcatgcatgtgggatttacatatgttagttacaatttttaacaatttaatatcatgcatatgctaattatatacgattattagaatttttaaaagttttaaatcatgcatgtgagatttacatatgttagtgacaatttttaacaatttaatatcatgcatatgctaattatatatgattattagaatttttaaagttttaaatcatgcatgtgggatttacatatgttaattagaatttttaatgcattatttactattttagaaacacatatgcaacgaaattcaatattcagtgctattaactttagtcccggttcttaaccctaaccgggtttaaaaaagaatttagaaatagcgggaaaatatctttactccc

SEQ ID NO: 4683 - DNA, 24306 bp, Oryza sativa
ccgacgaacgccgacgacgccgacgccgacgtacgccgccgggccgctacgttacaccgccgccacggcacgccgccgccgcgcccccacgccgcgagacgccgccgccgccgcgagacgacgctgccgctgccacaccgctgctgcgccctcacgccaccgggcccccatgccgcggccgtacgtggcccgccgccgccccgcccctacgccgccaggcccccacgccgccggaccgcgcccccaccgccacgagacgccgccgccgctgccacgccgccgccgcgcccccacgccgctgcgcccccacgccgccgggccggcccacggcgccggaccgcgcccccaccgccgcgaacgaacgcttaacgaacgtgaccaaacgtgaacgaacgcgaacgaacgtgaacgaacgcgaacgaaacgttaaagaaacgtgaatgaacgcgaacgaaacgtgaacgaacgtgaacgaacgtgaacaaacgtgactgaaacgtgaacgaacgtgagtgttagtgaacgaacgcgaatgaaggtgaatgaacgcgaacgaacgcttaacgaacgcgaacgaacgtgaacgaacgcgaacgaaacgttaaagaaacgtgaacgaacgcgaacgaacgtgaacgaacgcgaacgaacgtgaacgaacgcgaacgaacgtgaacgaacgcgaacgaacgtgagtgttagtgaacgaacgcgaacgaacgtgaatgaaatgcgaacgaacgtgattgaaacgttaacgaacgtgaatgcacttgaactaaaagtgtgagaacgaacgcgagcgaaacgtgtacgaacgagataattaaactattgttgaacttagcatatatatatgattatatatacttgaaaacgtgaaatacattatatgttcctttgcatttagactaatacatttttttgcatgttgcagagaagacgtcgtcgtcgtcgtccctcaagccgaagtggtagctagccctcgaaggaattcgcgcaggcaagtgatgtaaagatgtgatagttagagatataatataagattgttagatttctaatataagattattagattattagagttagcatatgtgagtgttagaaattattagattattagacttagcatatttgagtgttagagatagttagagatttaatataagattattagaggtttaatatacgaaacttaattagacttagcatatgtgagtgttagagatttaatataagattattagagatgtaatatttgaaacatatttgattgttagagatttaatataagattattagagatgtaatattcgaaacttaattagacttagcatatatgattatctaccgtacaaatacacgacacttagacttagcatatttgagtgttagagatagttagagatttaatataaaattattagaggtttaatatacgaaacttaattagacttagcatatgtgagtgttagagatttaatataagattattagagatgtaatattcgaaacatatttgattgttagagatttaatataagattattagagatgtaatattcgaaacctaattagacttagcacatataagattatctaccgtacaaatacatgacacttagacttagcatatatgattatttgagttttaatacaagattagtagtgttaatatcacgcttagcaaatatttctgctatgaacagatggctgatcgcgatgaggaacagatactatacgatacaatcgcattgggaagcagccagtactggaacaaagaagaggggaacgaggatccaaaccagtacttgaacgaggaggggaacgcggagagggatgcagaggggaacgaggaggggaacgtggagagggatgcggaggggaacgaggaggaggctagtggaagtcatccctccgctggatagaagagggcacgcggacaatgaggtgccgcgaagaagatagagggtcggcacatcattactgaggtggacgcagacggccgacctagtgccccggcacaagcagccaagaattttgtacgccacagcggttgggttgtgagggataacgtgcctgtcagcaaggtgtactggcgcagaacaagggcacgcgggggtgatgacagctttgtcccggagtcagagaaagagatgctgtggaccacaatgctcgagacgttcacgctccctgcgggtacagagaacatagtgaaacagtggactcttaagaaaatggcagaacagttccagaccttcaagggagatctgtaccggaaatacatcctgaaggggcagacaccgaacttcgacatattcccgaagctaagggatcactgggacgagttcattgcttacaagacaggtcaacaagggcaggcgatgatggaaagaaataaagaaaatgccgccaagaagaagtaccatcaccacttggggtcaggtggctatagcgtcgcgatgccgaagtgggaggagatggaggcaagcttgcttgagaggggtatcgaaccggccaccgctaaatggcctgatcgatcgaagttctggtactatgctcacggtggaatgctcaacccagttgatggctccttggtcttcagcgatcagatacgcgaggctgcgaatcgactaacggacgcagtggaagcctcttctcagggcacgttccgacccgacagagagaaggacgagctgtcactcgccctacagactcccgagcatccaggacaaacacgagggaaaggcgtgattccctggaagatgggattcaaggaggacatccacacgtacaggagtcggatgaggagcaagagagataccgaggcgaagattgcagatcttgagtacagggtatcgagctacgagctcagcatacaagaggaggtggcccggaaggtggatgaacgcatggcagcacatcggtcacacgatccccagccgtacatacctcctccaatggtcagcccatcaggcaatcgtagcagctgcgcctcaacggggcaggtagtatcacatagcatggacgccatgcaaacccaggacgaaaccacctaccccgttgatgagatcacgcaacggacaccatgtgagctgcatattcccttcaagaacttatcaatcaaggtatgctcgatgtaatatatgatttttgactcgtacgttccgcaagttgctgcttaggttgattactaatagataacctctcatcacgtgaaggtggcgtagggaatggccatcccaacggacatttcagggacttaccactgcaggccgattccagcaggatactcgagggtcgaagttgagctggtggaagccgtgtacgaggacatcgagttggactacccaggaggagacggtgagacgcatctacgagacacaagccacgccattatattatggcgcaagcggtacatcatcgtccctgggcgacaagcggcgtctcgtgcaccatctcctccggctccgccgtctcctcctgcaccatctcctccggctcctccgccacctcctcctgcactatctcctccggctcctccgccacctcctcctgcaccatctcctccggctcctctgccacctcctcctgcaccatctcctccagctcctccgcctcctccgcctcctcctccaccgtgtccgcctgcacctcccaagacaaggtctcgccaagctccacctcctgctagcacaagggcaacgaagaaggccaaagttgacaccaccaaaaacaaggagccgccgtacggttgtagtcaagaggagcttgacgcttatgtggcaggagaagtgaagaggcaactcaagcctcagagtcctaaaaagaagatacctattaacccgagcgtgaagaatttcttcaagggaatgtccaccgcaaacaaggaggccttaaagctatcggactatgaccgaacacttaggaaagcctattacaagaagtccaaaccagttcctcagcttggagaacaaccacaccaagtggtcgagccgttggtgaccggcgaagactttggcataacggatttcatttcggacatcggtctaaccatggctcagttggttggaggcgcaccaatcccgaaggcggaagtggcatacaagtttgaactcggtaaaccgcttgtcaggcctgagcagctgcagtccctaccaacacaaatgtacaaattccatgaacggtacatggaaatgagcgccaatggtagagagatgttcggagcgaggatcagaaaccccgacttcttgcaaggagaagatgttctatggatccatttcaaggatgtttttgatctgtaccatcgggacgccctcgacgtctctcttctgagcgcatggattttgtaagtatctttgagttcgatttgtttcgttcaataattagctcctggcatatatgtaagcaataataatttccattcattgttgtagaatggagattcaaagggcccgacggcggggggtttacgatactgggttcatcgaccctcggaaaatcaacaccgaaatgctcgacaagtacgagaaagacacagaggacaatctcgtccatctcctaacgcagcagcatttcaagacgttcatactattgccgtacaacacagagtgagtttttattgtcgttcgaacaaatttcattcccatacatataacatgtacattctgatatttatctcatctcatgcatattccagattccactgggtcctgttctttttcgacttggacgcatgcagagtcactgtgtacgactcaatgaataaagaggagaaggtttttgacaaggtcttccaactgatagacaggtaatataatgccatctattccaaagtcgcgggactctgttgctattatgttgatctcgggtaatatttaattaatcatagcttgcaactgcacatgtagggcttgggatcggttccgtcaattggtccgcgggacttggaaagaaaaacttggacggaggtttcattttccagtgagtacatgcatgatccaaaattatattgaattgaatctctagttacagttaatataaagagtatattaaatctctcatcgtttctcatgtagtgtgcaaagcaggacaagggaactaacttatgcggctactacgtatgcgagtatgcccactgcctatcaaatcaaatatacaccaaacgagagctcgatgtacgtatacataaaccattcaaaatttcattgcgtatcgatttgttaagttgtttattaatttcatatattgatatgtcattatttttcgaatgatagcgtattcacatgagggaaaaactcccacacaaggattttatcacggctgttcaagaacaactgatggggttcatcaacgaagaagtccttaatcccgatggtgaattctactacgacggatcgacaattcgtaacgtcggtccttcctcttctgacgtaacgcaggcatcgaagtcgtagctatagctagcgagcaaatgaattgtactatacatgcatgtatatatatatatatatatatatatatatatatatatatttatatttatatatgtacgtacatttagtgttaatatatattttggtaacatatacgtacataaaatgttaagtgctttaaattataaatatgtgtgatatatatatatatatatatatatataaaatcaaccatgcagcaaacagggccatgcaaataaaaaaaaatggtacatagatctttagtcccggttggtaacaccaaccgggactaaagatggatcagccggccacgtggctgaccgatctttagtcccggttcgtgttaccaacccggttatttcacccgggattaaagatcgctatctttagtcccggattcgtagtcccggttggacaaccgggactaaagggggttacgaaccgggactacaaacgatttctccaccagtgttatcattaattaacatgataattaagcacgtaaaattatgaagtaaattgaacaacaataacaaaacaaagttctaatctaaactttggactaaatagatcgttgcaaatgagaagatgagaagatctcaagaccttatcctaaaccctagcgacaatgcggtaaggagtggccgcatgagagttggcaacggcggcaatggcataggtcctagccggtcgcacaaccggcataggccgttgagccagccttgctaattgtgcatcagaacgatttgcatgcagctactatagaacatgtgcgtggccgacctacatactacgatggaagtcgaaaggttcatctacaagccgacggtatgtcgggagcgatccatttgaagtttggcacattattctttcaattaggtaaactactagaaaaaaacacgcgacgttgccgcgtgcaacactcgatgggccacactatttggccgtattgagacagaatgatcagtttaacaacaatgcaagttgtagcaaaatactatattgcacaatcatgattactacagcagagtattaaattttaaaaattaatctatggcatataatgtgatatagactgtataatctgaacaaaacacaatagttatcctatatacttatatagttcatctccactaagtgtagttaatgctatttctctcttctcattaacccacatcaccctaattatttctagcctttggatgatagatctatggtctaaattgtttcttctttcttctctcttaaaaacatgcaatctcaattacttttaggctcaaaattgtatcaaattgtttttagttttgtacatattatgcaacttaattttccgcagcaacgccgcggggtatgagtatgtgacatattatagacatttgatctggaacttaaataatggaagattttaataaagctccctatcaattttgtattagagtaactggaaagtagatgagtgtaggttcttggtgagtgctaaatacatcaaaaataaattggctggtagatgagaggataacaaaagtatccagcttgggctataaatagcaaaagtcagtgttttcttcttcattattttcccaaaaaaaacaataattagaatccttgtcaaagtatgttactgaggaaccagcaattctttctcatgcaatacttaacacaatgcagtagctaggttgggcaagtatgaggtttctatgtagtgtcaggtatatatgtgaatactacatgtaaacagggtatctggtaggtaaccgtgaaattgaagcagccatataaggtaatacacttgcttgaaatggtgccaagcttatgcacagtacagtagtaggttaattatatgattgaaaaacaaatgattttaaatatgagcaattgtttacctgatcattactgttcggatcttcataagctcttttgcctgacaaactgcttgtctctaaattacatggctcagcttccatgctctgaatatcttggggtggttctcactaaattaagtgtgtcaatttttcactatagtggcagaacagagaaatttaaccaccagataatcacaggaataaatattcgaggaattaaattaagttaaccaactgaaagtctgaaacttcttatgcatgggtagtctcctagtcaatacaagccccaaagctggagctaagcaaagacttaacaaataaaattcaaatgttataattaatcattggcgaaattgtcaaacaaaaacagaaaacctcatgatattggaacttggtagagtaggagtagtaccagcatcactaaacaaaatatattctacaagggttctatcttcttaatgaagatggtcctcattatgcgtttacaataacaaagggacagtaaaacttctttccgaatgcttccattcccaataacttatactataacaaatagtctaatatatatcagtgaagtaacagatctagctggtttttttttaagaatgaaaaatctgcaatatttatatcactaatacatgtgattgccattcactgaactcgcgaacgtcgtcctcgcggtgcaggacgtgctcgccgtagagataccggccgaaggccaccgcctcctcctcgtggtgttgtctctgtgcaggacatgcttgccgcagaggtaccggccggaggtcgctacctctttctcccggtggatcagacaagatggagaatgaatgtgaaacaatgacaagagaaaagaggaacgattatagaagatgaagagtgaatcaagattatagaagaccaagagtcgtgacccttccggaaatatcaggtggctttgcactttttgattttactccaacgtaagattgttttttatattttagtccttctcaagtgtgggagcgcacgcacgaaccacgctgtgccacgtggcatcgctaattgctcgataatttgcacggatttcgatagtaagagattggttggtagcgatggggtatcggctggtatcaatgaatatcaactgggtatcgcctgttaccgatggatatcaacatggttccaacgaggcattgtctaatactaataaaaaatatcccttgatcctctgcccatgtaaaaaagtacttttcagaaaactacaactttggtaacaaaattatcagtgcaacaatagcatggaaaattatcacaaaactgtaatttttacgttatatcttgctacagttgtcacctatatatactgtagcagtatataacgtaaaaattacaattttgtggtaattttacacgctattgttgcagcaatctgaaacatgtcgctaatattacagcaaactgatagttttgttagtaaagttgtagttttctaaaatttactcttattaaaatatagtaatttctccatctaattctcatcttaacagctcaactaattacaatcatatttttttaatgaaattttttatccacgtcttttctcatacaaccccccatacacacacacaaacacacacacacacacacatatatatatatatatatatatattctatttaatttcacctaactccttaattactgtgcaaaactatttttaaaatccctctcacaaagacggagggggagtggggtagttgctactcacctgtcttgctgatccctctcaaaaacctcagttcgatcttctctgtcggtgcttgaatgacgcgtaaagatgggatttctaagtactccatccgtccttaagaaaaacttagtataacgaatttatacgaagggtagttcagaggaagtatgctgacttgattactgcgtgcattggcacttcaacgagacataattgatgagctgactatacgtggagctgcatgcatgaacatgtagcaggggagtcctctctccgtcccataaaaaatattaatctagtactagatgtaacatattttagtactataaatttgaatatatctatttaaattcgttgtgttagaatatatcacattcagtgtttaatttattttttatgagacgggaagagtatgttgctaagagcaggtacaatagtaggctataagccagctgcaaacataatttaagaagataaataaggagagagaagagcagcggactacagatttatagccagctgtagcacagactccaagatgcagtgtatgtatgacaggtggaaccaagtattaatagtgtagtatataactattgtatagataagctatcatattagttatagataaattagagctagtagttggctatactattaaacttgctctaacgctagctactcagctccacgagggaaacgtgcactagctagctgccatgatgtactaggtacgttgtactagtgtaccacagattcagtcataggtaaggagtagtaggagcactattgagcagaggcaattaaagaggtactagaggaacgtactagaacgaacgtgtggctgactagttgaactgatcctgatcgaggcacccactcggccactcggcccctcctcacgtggacatgcactactttgctatttttaagcactccctgcgggatatttaacactgttattaactttaaaaatatttaaccatacatcttatttttgaaaataatatgaatatataaaaaaatataaattataacaaaataaaattacgtaattttctgaataagacgaatggttgaatttcactctgtttgttacttcgggtgcgtccgaatcggcttccctaagataatttttagcgagacgtaaaatgagataagctattagcacgtagttaattgattattaattactataaacttgaaatttgagtttatttttttaaatctatataaaatgtattaaaaataccgtttagtaatttaggaaacgttctcatggtttaatgaaggagtagtttttttaacttacgaaggagtagtttagctgagttgtagaatcaaatgaaggtgagtccatttcatatttagaatattgtagatgtaacctaagttaatttcttaaagtttgactaaatctattaaaaaacagcaatattttacacacaaaataaatatactatacaaatagattcaatgatggatttaataaaactaatttggtattgctaatgctatttttttacaaacttatcaattttaaagaaattgtcagttttaattatctacagttaaatagagaacacgttcataataagtactaattaacaagcacaacggcacaagcatgaagaaattgcaaaccgctcggtattttttgagcatttaacaagatttaaacttgaacactgatacagatgtacgtactccactcccacgtttatcaccagctggctcgtatatagtattgggtttgttcatatgtggcggtgggatcgagattatctaacttgagttattaacatatcggttatcaacccagtgaatttatatgttagtgacttaaagttaacgagaagcaagtaatataaccgatatctcctatgacggtaagtacatggtatttcctccgtattttaatgtatgatatcgttgatttttttaccaacgttttactattcatcttattaaaaaaaattaataaaatgagtgatcgttaaaatatcaatagctgtcatacattaaaatacggggaagtacgtacaattagaaaaatgattaaccaattgggagcacgactacgcgctgtcgatctctatatataggagccactgcccacggagagtggccggaacatatacagacgtccctcgtctcttcacctccggcggccgccttacacccggccaccagcttgttcgtcgccggcgagctagcttcctcctctccgggctccggcgtctccgccggccggctggcctgttcgtcgtagtatatatatcgtcgtcgtctccgtcgacgacaaaactgtgtagtgccactgatcgcgacccggccggcattattgaggctgaggcaacgatcgacctgacacaagaagaaagaagatggtgaacacgacggcgggcgtgaagtgcggcggcggcggggcggcgctgccgctgtcgacgctgaaccacgtctccctggtgtgccggtcgctgtccacctcgctcaccttctaccgcgacttcctcggcttcgtctccgtccgccgcccgggctccttcgacttcgacggcgcatggtatatactccatccgtttcaggttataatacgtttaactaaattactttaaatttaactaaatttatagataaatataataatatttacatcactagattagttttattaaattaatagttagatatatttttataataaatttatcttggataaaaaatattatttgacttttagcaaggtcaaaacatcttgtaacctgaaacggagggagtatatatatacgcccggagggagtatatatatacgcccatccatgccaatgtgtacactaaattttgttcttggcgatggccggcatttcgacgatttgattgctgcatgaattgaaagtctgaaactgcaatgtttcatttgatgattcaggctgttcaactacggcatcggcatccacctgctgcaggcagaggacccggagagcatgccacccaataaggagatcaaccccaaggataaccacatctcattcacggtaacaaccgttgattatatatacaacttacatacagaatcaacctcaagagaatgagatgcaaagtgatagtaaagtaaaaagagagatgagaaaaaatgacaagagtgggatacctgatcgatgcatgcatgagggcaactacgacgttgacattataatataggagcgacttgtatgccatattaattgtcagatactcagatatatatattcaagatccactatatactgataaatagagataatgtgtaggagtagttgccctgccctagaatacatattcttggttctgatagaagtggattaagcatctattgaatgaagcaacatagcacatgcatgctccctcagatctggggattgatgatgatcatcctcacaagattaattgagaaccaagagaaactaatttcaaatagtgtcggctaaccactagcacattattattccaaactcagtaggtgcagttggctagttgttaattaatttctgcatcaagattatatatatttcagctcccagtcagtttagcagattatatatattccagctcccagtcagtttagcacaactaacaattgatgttcatataataccacaacattgcaattaccgctaccatgactcgtggatacattctttaatttggagatatgaattgaaatcggtcgaaatgatatataacgtgtaatcgtctatactcctttaaaagataccagtggtaaaacagtgaatatgttactaccacagtgccaccccaccactccttaagcagtttttataaatcatctcttggtattttctgatattatggaatagtccatttgattcaaatgagtgaataccatatattttaataaaaaaacaagtaaaaaaatatattttgtgtaaaacatatcataatatattttcttttacacctagcaaaacacgagcatttttactagtacgcataaaaatatgaatgtgtggcatggcagtgcgagagcatggaggcggtgcagcggcggctgaaggagatgggcgtccggtacgtgcagcggcgggtggaggaaggcggcgtgtacgtggaccagatcttcttccacgaccccgacggcttcatgatcgagatctgcacctgcgacaagctccccgtcgtccccctcgacgccgccgccgcccactccatcttcgccggccgctcgccgccgccgcccgtcgcctgcaagatcaggcccgtcaagcagccgtcggcgacgaagctgggcagcgtcgccgccggcggctgtgttggggaggtcatcgtcgtcgacgcgatcaacggcgccgccgccgccggcggcggcggcgcgatgagctgaggagacttgtggcattgctgatccaacgaggaatcattgatttgatgaattgttgttcaactttaattttggtcgtgatgatgattaaggtgtatgtaattcgatccggtgattaatttgtctctcgctgcccaataatatttgcgtaaattaattaattacctgtggtcgtcactagctaattcatcaacgtacgttgagtgaccagagattagcaggacaaactgaaactagcgcgcgtacgtaatatttgattccctccgttcaaaaatatatgacgtattttttaccagtctaaaaacacaaaactttgaccgtaaatttcttttgtactatttcgtctatggttacaaatcatgaatccaccaatatttttttaggtaaaaatctaaatattattaaattaatagcttgtcaaagcttaaaattgggcggtcgaaatacatgcatcttatataaggacggagagagtatacgagtacgcagcagctctgctagcaattactgtctttgaattcattcacgagatgtaatgtttcctttgctgctttgcacacgtagtaggccgcactgagtgagcaagataagataagataagaaaattcctcatttttgcgtgcgcttcgcgaggtgcaaagctatgtgttttctaagaaaaaattgtagaaaagttacataaaaaatatattaatctattttttaaatttaaagtaattaatatttaattaatcatgtgctagtggctcatcttactttgcatgcatatacatatcttcttcaatttcctatcctcaagtacagctgtagtatgtgttatatgcgtggtatttatacattgttcttgtaataatcagtgctgtcagcacattgtattacgttgttgaattcacagacaagtagcacctggagatcagttgcgttcaaaatgtgtaaatccagtaatatattgtgcaatgaagttagcagaaatgacatgcatgcacgcatcactaacatgccacagaactgataaaatttactattgggatggaggcatgtgacaagctaatataataggaacagtaccacgcatgatccacactgctcatgctccaccattcttaatttcaggttgacgatatattggtatgcatgtgatcggatgacagcttgtacgtagtattagtcatgttgcttcaggcagataacaaatgtattttaattcgattggtcaaagccgaatttaaaatttcccagcccaaccagcctgaccgaggtttttaattttgggcttcccaaaaaagaagtgaagattggagccgacgcgctgtacactttacacgagggaaaagtgcaatttgcatttcttaattattaatggtggagctataaatttacgtccctcaaccgtaaacgggatatatatagcctcctccaattcttttttttttcttttttttacgaacggccggtcagaattgactggcgttatattgatagaaggagaaaaagtacagatagccaaagggctaagaaagagaaaaactgtacatgacaacatgcaaacaagcttgcacgtagccttcctagctcctcatggcaacattctcccaatgtgtttagcgctggtcatacttcaccaacctaattcctcttggatgcgactaatcatctggtgtgctgtcgcctcctttgctctgaagattcttgcatttcgttccttccagatttcccgagcaatgagcaagaagagagttctgagtcctttctattttgttgcttccgggtcgcttgttccttgtgtccaccaatttaagaggtttctacttatgttccatttcgggatgatgtgcccttggtgtagccatgtgagaatcccaaaccagatttgctttgagaccggcattcaaacagaagatggtcgattgtttcgagatttcgaaagcatagctggcagaaataattatttggccatcccttatctgtaaccggtcagatgtccacacccggttttgaagaaccaaccaactgaagattttgcactttgccggagcccatgcctcccaagacaactttgttgatggcgagagtaccattccattgaattggaattggtacgtggattttgcactgtattccccattagttgtccattgccaaacaatcgagtcttgtaccccctctgttagttgtggggtgtcacgggctaaaatttcccaaacatggaaagaattcatcaagaaggggaatggtgaggctgtggcggatgtcgttaatccatcttccttgttgcagggcgtcctggacggtgcggggttcctctttgaatgcctataaagattcggtgcttgactttttaggctttggccaccgatccaatttgattcccaaaagctcgccttttgtccgtcaccaatttggactctcgttgatgccgcgaaaagatccttatccaattcatcacagggtgtttcagtccctatccaaggcttctctggcgtcctccattcgaaccataaccatctcagtcgaagagctctggcaaacttttctaagttcggaacccccaaaccaccgtaccggacatgtgagcaaactttaagccaattgaccttgcattttccgccatgcatattctcgttacctgcccacaggaaccgccttcttgctttgtcaatttcttgaagagattgtttcgacggtttcagcaccttgagggtgtaagttgggatggcacttagaactgagttcaccataattcggcgcccccccccaatgtacaacaatgatggtttccatcccgagagccgacctttgatcttatcctggagaggctggaaatgcaccttacgtaggcggccaggagtgagtggtagccctaggtaagtcagtgggaagctggctcttgcccccgaaaaactacgcaagatgtcgtccagatctacttcctggcatcgaattggtgccaccagactttttccaagattgacgtgcagccctgttgccttgccaaagtccctaagcatggtaattagaacatccacctcgctttgtacagggttgagaaaaacagctgcatcatctgcataaagcgaagtcctcaatctagcatggcgacttccgatgttggttagttgcctaccttcggtcgccagatgtagaagcctttgtagggggtcgatagccaagataaagagatagggggatagggggtccccttgcctcaagccacgtctgtgtgcaatgcattccccctggtctctatttaggactaccttggaagtggcggtggaaaagagcaaacagatccagtttctccactgggggccaaaacccatgttttgcatcaattcaagtaaatattcccaggagaccgaatcaaaagctctagcaatgtctagcttgaaaaaaagtgttggctttttgctggcatttaggttcctgagcacgttccgaacatacaggaagttgtcttgaatgcatcttttttttatgaaggcgctctgtgcaaccgagatcaggctatccatctgcctggcatgccttattgctagaactttggatgtcagcttggcgacggagtgaatgaggctgattggcctaaaatcggtcaccaaggtaggggcgttcctctttggaagcaaggtaattgctgctctgttgagtgctccaaagtttcctcctgacaggttatacaaacactagaaaacatccatgatatcctatttaattagatgccagcatttcttgtagaaggtaccattaaagccatctggacctggggccttttctgccggcatctgctttaaagcggcccaaacttccttctctgtaaaaggttcatctagttcatcggggttaacctgtggtagatccatcgcgttccaatttagggtgcaatttcgcgcctggttgttgcctaggattgagttgaaatggttgaaaagcgcctcacttttttcctcatgttctgtcaggatagcacttgttgtatggagttggtgaatgtggtttttccttctcctcgagtttgcgtgaatgtggaaaaactttgtgttggcatccccttctttcagccatgtcaatcgcgatctctgccttttctttgactttgccactgctgccagccccaaaattcttagcttgaggtctttcctgagctggtgttcatcgacagtaaggatcctatcctcctgggccaaatccaatcggagaatcacctcctgagccacgtgaaattgcattttgatctctccaaacagacttctactccacttcctgagagctttagtggtggcagtcaatttgtggctgagttttgtaaatggatgtccaccaaaagtgtgagatgaccaagcttgttgcactacctccatgaatcccggcacccggacccagaaattttcaaagcggaagactacccttttgggtgggcttacagtggaagcaagaagcaaagggcaatggtctgaacagaatgaggagagggcctgcagtgtgtggttggagaacaggatgtcaccatcaatattacaaaaaactttgtcaattctttccagagtaggcgcttcccgctcattgctccatgtgaatttcctattttggagcttgagcctcctccaattcttaattacgagtataaatggactctctcgatggtttatgattttacgatagagggcatgtgaattaaacctattgttgaagggatcatcctgaacattgctccacggtaatgtggcaccgacgcatgagttatacttgatactgcagtgtcaaagggtgtatgatttcagcctcgaggtcacatgttcaatcactagcaaactcttaattttcccttaaaaatatatttggagggatgtctctcactccaaatctcggtttttttatgtggcaccgacgcaccgtgcgggctattgattttgggctagaatgagtttgtgggatagtgtgggccatattgtttgggccgaaaagggaatgaagctcacgtgtggcccattctattttttttccgtgcggcccaccaaagaacgggccgttcctgcaaccggggattcggatatttaaaggaaaaagtacaccgaaggtccctcaacttgtcatcgagttacaaaatcgtcccccaatcgcaaaaccggatacaacgcatccccttagatcccttggtggttttgaccccggttttagctgacatgatggctgactcagtgtgggacccatgtgggccccacatgtcaggatgccacgtcggccagcctctcccttcctttcctctcccctcctttcgtctcgtctggttaggaattaggatgcaacgtcatcggcaggccggtcggcggtggggagggggttgcccgggtgagaggtccgtcggccggcgggcgatgcggcagcgacaacgtggctgctgagacacgagagaaggggaaggcgacgggccagcgtcgtggtggagaggcggcagcaggcgtgcgagcgtcgtggcagagagggcggaggcggcggtggcggtggagaggcgatggcggcggatgcgagcgtcgtggcggagaggaggcggcggcggcggctgccacgcgggaggggaggccaaaggcgacggcgtgggcgagcgtggaggcacgcgacggcgaggccgccgctccgcccgtcgcctcttctctctcaggtttctcctcgtctgggtgggcaggtcggccggcgggttgggaaggaagggaaggggttggggtgatggcttgctggagctgcttcggctacagctggtcgatgaagcaggaggcgaggtctggctgccggagccgttccagctgtcggcgcccttgcccagctagccgcatggtctggggacttgttcgctttcatcgttcttcgaattctctccccgtttcttcgtgtactgtttaattggttcttaatctgctcataaattaatcgtcgtcatctatggcctggattgccggatagtatctttgtgcttgtaaatttttagctgctatgcgagagctcgtgccaaatttgatatgcgagagttttgttgtttgttctgccggcgaccgagcaggactggtccgggcaccggagcgacaggcaccgcgcgccgtcgcccaccgccgcgcagaaacgaccggcgatgcagcagccgcaccggcctgccggaggaccgagcaaatggtgggcgaagcgggcgacggcgtaggccggagcggccggccggcggtgggcaggcacgctgcgggagaggaaggggctgcggcggcaggggcgcaggaggtcgggccgcaccggcaggcggctgtcgacgtcgaccatttagagggcagagagaggacaagagcggggagaggagagagcggaggcggatggcgccgatggggagcgggatggggatagcaaggctgccatcgccgtcgtcgtccatggcgtgggggaggctgcctccgctccgcctgtcgcctgcctgccaccgccgaacctcctcctctcccgcctcgccccgtcggcttcctccccaacccgtcggccggcctgcccacccagagtcctagacgaggtgaaagctgagagagaagaggggaaagagagagatgacgtggcatcctgacatatgggtcacatgctgagtcagctgctatgttggaaaaatcggggtcaaaaccgctgagggatctagtttgtcctggttttgtaagttaggggatgcgttatatccggttttatggttggaggatgattttgtaactcgttgacaagttgagggaccttgggtgtactttttccatatttaaacaacgaaccttatttgggtctctggcaaccgttagatgaggctgtgcggtccagatcgaattggtcagtgcacacgaaagatctaggagagcggccggagaacaatggccgtcggaatgtattgttttcccctggcaaaatggctgatttcttcctcgaaaattgctttgttgcctagcaacagtcttgacaagcatttctcttttaatctcgtatagctgatgatcgtctgtttctccattgtgattaagccaagtcgatttggtttacttgttgtctgactatgaccagttcaaaacagatcattgctcattagatgttttactgaagttctgcacattatcacctctgccgaattccatctgtctcgaaagagaaaagggaaatatctgttgtccacgtctgacaaacattttttttaatcttcaaaaatgaagtggcagattgaattgaaatgaaatgctacttcagcttgacgctgacagaaaattctcaaatcctttggcttgcatgcgttatctcaggtagcgcgcgggaatagcgatgcggctactaacaaaggggttcggggttaaaactccgaactcatttggccgttcgattgagtggatcagcttgtcagcgacctgcatcatactatcataaattggtactatctttatattttaatgtatgacgccgttgactttgtattcaatgtttgacattcgtcttattcaaaaaatttatacaattatcatttattttattgtgactcgattcattatcaaatgttctttaagcatgatataaatacttttatatttgcacgaaaaatttaaataaaacgaatgatcaaacgttggtcgaaaagtcaacagcctcatacttgcttagcgagcagctagtgcaatcatataatcattacactcacaaatcacgaacggcttaacgaagtcagtgtttattctaagtactccttcctctttttttctttcttttttctttgttaatctctctatgtgatcgtcagatcagatgcaatgtactgcagttcgtttcagtatttttcttattttcttttgtgtttggtttttgcctattaaccagctgaacgaaattctgaaacccagctagctatctgctatccctgtatgttcaagctgacctgtatcttgaacaagtttatctgaagtgggagtacgttacactgcctttattttcgaagctgcatgcataactgaatctaatatcctttttcaggcgaaactactgcatgattaggccgatcgattgcataactgaatctacatcctttattttcaggctgctgatggcttgcatgcaatcgatttttcgatcatgatcactaattgcgtgctttgattttactggaaaatctgtatatatatcatcactggaaagatgagcaaccagcatcaaggttgctgctgccgtcatcactggaaagatgaccccctctggtgggtcgctaccagccgttcgattagcctctgcggcccagattcgtactgtgtgcatcaaagacggccctgtttgatgtgggctgcctcgcgcggcctttgcaaagcccagcccatttagcctatggagtccgttctggcctggctcacgaactgtcatcagcccacatagataggcccagatggccagattccacggaaatggcaggcagttccatggcctggctgtaaagctcgcagaacaatgaacgaaatgccacattgaacttgattttcttttgagattagttttgaatactctgtatctatactactactattagctaaatgctcacgcgttgcaaaaaaataaaaaaaatatttcattacattttccaatgttaattaaaaattcatactttctttgaaattcatgggaatagatgatgttggttcatatggctcaccttttgatgtagagtaatactcctagatggtggattcactgatttgaatttcaagtagaggcgtggttaggggtgaaaacggtactgaaacggacgtaaaccacctttatcatttttgtttttatattttttttgggtatcggaatcggaaaccccggatacgaaaatggaatcaaatattatcgaaaccgaaaacagagcgaaaatgaaccggcgcgaatacagtaatgaaaatttatcggaatacgaaaacccctcaaattgataaatccaattatcaagtctcaacggttaacaattcatcataaaacacaaccatataagaccaattattaagtctcaacagtacatcacaaaacacaatctatgaaataaattatttatgtttaagagagtaatactgttgataaatcccaatgcaggaaaaaatattcttatgtaacttcagatttgcataacaaatattttttttaaaaaaataatagacaaacaccatggtattcactattcagtgcttacaaaaggaatccagggtatttcagtcacaaaatttccggaaattccgagaaaatttccggaaagtttctgatcgattccgagttccaacgaaaactgcccttatcattttcgattccgtttctgataaaatatttccgaattcgtttccgtttccgaaaaattccgaccgacaaattccgtttttgaaaatatgtccggaatctggaaagtttttgtaccgttttcacccctagccgtggtcacactgacagcatgaacccacataagtagatactatcattaaggtcttttaaaacagtatagataaagaccactaagtagtggtgtagttccgccaaaaccattatttttatacatctattttctataaattagtttatgacattacatgatagtgttaacattgaaatttagtaagcccaaagttaccatcggcttagagtcagtatcggcttcaaagttctagaatcggccgatgggagtgaagtcgccacgatgtcgtgttcttggtggagtcggatcaatcaaaggaagcttatctagaggagttcgagttcaagaaggatgcgacatgacagttatctattaattaggcatagtttgttagtttcattttatctttagtaaagtgtgtttagtgtccgataaggactttatcttttcatttttagtttctttcttgttcgacaaggactagtatctccctatgggtataaatattgtcacgcccagaaatttctgaatagaattccaagcagaatgtgcattaaaatccccgtccaggaccggtcggggtacacaaacgacaatgttgacattcagatccacgtcttacaaacatcataaaagtcttacctaaatgcagcggaaaaacgaaagacaacaggagctaagccttgactagaactgcagcgggaacaccactccacaggcatcctcgacggcacggacgaagcctactcctcagagaaacctccatctgacacatactcatactctggggttgggaaaaatagagcaagactaagtactacccactgtactcagcaagtcataccagaataggggtatgatgcagggaattatcaaagaagagctagagtggttcatttgcataaagcgagcatttataagcaaaagttgaaagatttaaatagttgtaataattaattaatattaatcatccactgtccaacgctataccacgttgcgacaggcccaaccatccacatatactatccaaattctaaggatttcactagggtgagactaatcacggtgaatctggttgaccgcccataaccgcgggcacggctattcgaatagttttactctgatcagaggtgtacaactgtacccacagacacagccccacgacacgtttccgtgcgccgacatgccaccacgacataccggaaagaggccgtgacaggacccttcgcataaccccctctaaccaagcacactacaccttaggtttcacccccactcctcgcaaggcagcgggcagtcccctctcgtgcctaggtgaatctggaagcggcagaggccgtcgtagggcccgccccgctccatcacgcccacccttgcctggatgcgttgactagaggaaagctacattacaagcccagccgttgcccacgctggcttgtggtaaatacgataagttcttc

SEQ ID NO: 4684 - DNA, 716 bp, Oryza sativa
gtgaaatacatgtacgaactcagtaaaccgcttgtcaagcttgagctgctgcagtccctacccacacaaatgtacaagttccatcagctgtacatggagatgagcaccaccggtagagagatgatcggagcgacgatcagggacacggacttcttgcaagaagatgacattctctggatcaatttcaggggaatctacgaactataccagctggacgccctgacgtctctattatgagttgctggattttgtaagtatatcgttcagttagatttcttactatacgtctcctttaattaattaggtccttctatataagtagactatagaaaataatatactcccttttatcgttgtagaatggagattcaaagggcccgacggcgaagggttttcgatactggattcatcgaccctcggaaagtaaacgtcgcaatgctcgaccaatatccacaagaaacagaggacaatctcgtccatctcctgaaggcgcagcattacaagacgttcatactgttgccatacaacacagagttagtttaattttactctcttcctacataccaaatttcattcccgtacgaacttgctaagtgtttcatatgtaatgcatcccacgcacattgcagattccactgggtgcttttactcttcgacctggaggcctgcaccgtcaacgtatatgactcaatggataaaaaagagtctacgtttga

SEQ ID NO: 4685 - DNA, 30015 bp, Oryza sativa
attcctgcagccctttcaggaatgtaattaaagaaaatgttttggtcatttgaattttcaaatatagggtgttatttgtgtttaacattgggcctataattatgtagtacggcccttaaagttgggaaggcccatataggtacttaggttaggtagaaggcagggtcaaccgcaggcgtggctaatgggcgggtgatcgctgacaacaatcacccccatcccccctatacgctcctcctctccacccttcctcctccccttcttctcttcctactacaccataaattttttttaaaaaaaacaaagttggaaaaatttatgtatagaaatgctatatataaaaaatatttgaattcaaattcaaatttgaaatgggtatgtaaacttttgacttacaaactttgggtttataaactaatatttgaattcaaattcaaatttaaacgggtatgtaaacttttgacttataaactttgagtctataaactaatatttgaattcaaattcaaatttgaaatgtgtgtgtaaacttttgacttataaactttgggtctttaaactttaggtgtataaactttagatgtatagaaatactatatataaaaaatatttggattcaaattcaaatttgaatcggatatataaacttttgacttataaactttgggtctctaaactttagatgtgtaaatttggggtgtataaactttaagtacataaatttactaaaataggaaagtaatacggtgccaaaaaaagaaaaccacgtagagggaggggggatcggctgatcgctaggggcgatcgatcgccccttttggtcaaccgcaccctaccctcctagtcaaggaactgcatttgttgtgtactatcaaatccccttgctttgaggcgtgtactatcaaatccccttgctttgaggccttgagacaagctgcccaatcaatcccaagtattatagcagatggcactatcagtgagctctctcataattaacccatccatgccaaccgccaagtccccaccaagcaaatacaggggaaatttcttcttgaatcatatttgtacagtactacaaaggaatgtgttgactactccggcaagcacgcaggtgacggccggctgcaaccaagagctaggtctccatcagctctaattggagattggggtgtcattgtccatatgagcatcaaacaagcctgaacatagggtcatgtgtcgtgctgaactctaatgaaaatcactgtggattttcatgattttattggaacagaaatatggaaaaaattttgaaactaatcgtgtttttgaccgtaattgcaagattaagctgactagtggcggatttgcggaaatatactagcgtcgcggattgaaaaagcgaaagcgcgatatcgcgctatcggcgcgcgaaagcggcggcgctatcgctaattgggagcgagggagcggtattgcatcggtatcacgttcttaaagcgcgagagcgaggcggtgtcgcgattttgtaaagcaagtgtgcgggccgccgggacacgaagcggtctcgcgcttacaaagcgcgatagctcgtgcggtgtcgcggccggaaagcgcgagatcgtggtggactgacgcctgcgggtccccgagcggtgtcgcgcttacaacgcgcgatagcgcgcgcggtgtcatggcctgaaagggcgagagcgttgcggactggcgcctgtgggtcccggagcggtctcgcgccactgctctgcgaaagcgcgtcggtctcgcggtacgcgcgtgcgagagcgccgtcggtatcgccctttcaagccgtgataccgatgccgcgtgattcgctgctgtgcgacagcgacggcttcggtctcgcgctttgaaagggcgagaccgctagcaatatcgctctccccgtgcgcgagagcgattagctaattacacccccaaatggtaatatttcatttgactcatgtcacagttctcatgtcatagttggtaagtatttcttccatcccataaaaaaccaaatcagtactagatttgtttttttgactgagagagtaaaaagtataattttttttttctattccctccgtccccaaaaataccaagataatatttttttcataattttttattatgtgtgcaacatatatatacataaatgaacatgacaaatatgtttatattgaaaataggcaaagattgtgtacgcggctacgagaagaaatataaatatcttggaatatgcaaaatagtgatatcagagaaagaaaacatatattacctatagaaaaacagaaattgaatatgtatgtattaaaaatatataaaggagtagagagatcattcgggagcaatttttacaaagttgacaaagaataggaatttagaatatgtcatattcacagagaaaaccacctttgcatattcacatgttcgatcttgtgagaagaaccgtgtagcgagttaacgaagtactcaagttcttgccacaatatcgggcctaagaatatgcaacaccgagtttatgaatttgcaggagtaggttatatttacaaacggatggtggaacttggaaaaaagagtgggcgtaaggatgtattaaaaaaatcacatttgtatattcatagactcgatcttgggacaggaaccgtgtcgcgagtgaacgaacaacatagagcgagttcaccaactactcagtttctgcctcaagatcaggcctaagaatatgcaacacaaagttggaaccagcaaaacgtttatgaagaagagatgtagttgtgtgctaggtttggttgttatttataggggatggcaagaagctgcgtagtttcaattattggaaagagacgacggtgcgtctgactgtttcagtaatcaattcaatagtgttagactgtttcacccgtgatgacaataattgcaaagcgacaccgtaactttcggcggcgcatgctgcataactgtttgctttattaatcacaaagcgacgaatttacattcggcgcagtgcagcataatcttgaaagtttaattgtgaatgatttgatgctctggcgcatgtcccgtgattggaaagagaggatgccatttcaggtgtgtcggtgacatggggccgggggtatcgtgactagaggcttgggtagccgcgatcactcacgtggcccgaccccctcgggggggtcgggcccaacggtgacatggccacccctccctctgtttccccgaggggtcgggccgctcccgtttcgtccccgagggctggggcgccccgaccccctgagggtttggcgccacgtgtgtgggttaggtgagcacagcggcgctcacctaaccgcgtttattgcgggttggacgagcgccccacgccgcatttaatgtagcgcagcacactcatccggtccgtgatcggtcacagtgtgtgaccggtcacagaccggtcagatcgcgggtagggggcaacaggcggcctgacacacgcctcgccccgtcccgtcggaatgatgagagcctccaggcactcgtccctagccggagccggcgtgggaactcctggagttggcacgtcagccccggccagatacattccaggcttcatcgcaaccattgcaaggaagtcattgtatgaagaagggcagacgtgtagcatgctaaactgacacgtggtagacaagaatgactggtttgtgactggtctgacgccggtcacgtcatcagcaaacaaccgtgctcccacgttgcacctgcttccggcggagtggaggttggtatgacccatcccatcggagggtcattcggacagcaaccattgcaaatctccacccattaatgaaggaaggacagggttatcccggtgtcaggcgaaggtacgagccaagttatggtcaaagtaggatgggtccccacccaaaagaagggtaggtagaaatggtgtatgtggtatccccttgagatataaaaggaggaccatgcctaccgagagaggggactgggggggggggaagaaagggagaagaaaagaaggagagctcgaaaaaggaagagcggagctcatagaggagagaaagagggagagggtctctagagtttgaactctcttgctctccagctctttgtaactccttcatacacagatccaccagaacacaggagtagggtattacgcttctcagcggcccgaacctgtctacatcgcccgtgtcttgcgcatttgctctctcgcgaaacattccacagatcgagggcttaaaacctcacctagcgtccccggccgaaccggcaaaggggggaccgcgcggtctcccggtgaggagccccacgctccgtcatctggcgcgccaggtaggggacgcgtgtgtttttctaagctctcgtcctctttcgtgtgcgccaagcttttcccgctcagcccaatggcagaacgggcagtggcgcacaacctctctccgagcgctagcggtgacgacggggagcagaacccgcgccgtcgagctcgtactccaccgcccccctctcgccgaagtcttaggcgggaggaggcgctcgagggggtcgaaagatccgcgacatcgccgcccacaagcgatggagaaggacggcgagacggggagcgtcgcctccttgtctacggcgatggcagcacgccccagggcgcgctccaagctgcgggcgcgctcttgcgttacccgcccgtcgtccccgatccagagactccagcctgacgttggctggatgacgtggccgacttggtcatgacggcgcagcagcgcctaggcgccggtgggcggtcctccgccaccaaggcctctggcgctgctaccgccggctccgtgtcgtcgaggcggagggcgcggcgagcggcggccggtacccgccgttcgtcagccattccctcgtcaacgcctccgacccaagaagatgtgcgtagggggtcggatgcccgcctcagtatcgagcgccggcgcaatggtcgtcgtgctgcccacgcaacggaaggcgcttcctcgtccggagcgccacttcggttcgggcgcgggggctagccccccgtgcccccagttggtggtgtcggctgtcgagcctttgtggcgagccttcggaacgtccgttggcccccaaggttccggcccaccatcaccgaaaaatatgacggaagtgtcaaccccgccgagtttctccaggtctacacgaccgggatcgaggccgccgggggtgacgacagggtcatggcgaacttcttccccatggccctgaagggacaggcgcggggttggctaatgaacttgccgcccgcgtcggtccactcttgggaggatttgtgccagcagttcaccatgaacttccaaggcacatatccgcgcccaggtaaagaagcggacttgcatgcggtacagcgaagggacaatgagtctcttcgctcgtacattcagcggtcctgtcaagtccgcaacaccataccatgcatccccgcacacgcggtgatctacgcgttcagggggggcgtacggcacaaccgcatgctcgaaaagatcgcctccaaggagccccagaccaccgcggagctttttcagctcgcggaccgtgtggctcgcaaggaggaggcctggacctggaactccaccggtttcggtgtggcaacttcggccgcccccggatccgccgctcggtcaggacggcgggacaggaggaggaagaagaggtcggcccattccgacgacgagggacacgtcctcgccgtcaagggcgcttcgcgggccacccgaaaggggaggcctgcgagcgacaaaaagaaggaggccggcgctcccagcagggagcgcccgaccggcaagtggtgcactgtgcacaacacctccctccacgacctcacgaactgccgcgcggtcaaaagtttggctgagcggacgaggaagtgggaggaggagaggaggcaggagcgccgtgagggcaaggccccggcggctccctccagcaaccggcgaagtgaggccaagcagaaggcccccgccgaggacatcgacgatggcgacgatgacctagggttccaggagcctggggccaccatcgccaccgtcgatggaggagcgtgcgctcacgcttctcgtcggagcctcaggcccatgaagcgagagcttctggccgcggcccatacccatgagaagacgcggcgggcgcggtggtcggaggttgccctcaccttcgaccagaccgaccacccgccgtgcgttgcccggggaggacagatcgcgatggtggtttcccccaccgtttgcaacgtgaagttggggcgtgtcctcatagacgggggtgcagccctcaacatcctttcccccacagcctttgacgccatcaaggtcctggggatggtgcttcggccgtcccagccgattatcggtgtgacgccggggcacacttggccgctaggtcatatcgacctcccggtcaccttcggtggatccgccaacttccgcacggagcgggtaaactttgatgtggcggacctcagtctgccctacaacgcagtcttggggaggcccgcgttggtgaagttcatggcggcggtccactatgcctacctccagatgaagatgccgggccccggtggccccatctctgtccatggcgacctcaaagtcgcgcttgcttgtatggagcagcgcgcggaccacctcgccgccgcgtccaagcccgagggtggcaacgagaggctcagcacctccgtcccagccgccccgaggcagcggatgatcacgtgcgacgaggtcccggtcaaggagattgccctgggcgacggcccgtccaagaccacacgaatcggtggtcttctggacggcaaataggaagacgcgctcgtctccttcctgcgggcaaacgccgacgtcttcgcctggagaccggcggacatgcccggggtccccagggaggtgattgagcaccatctcgccgtgcggccgggcgcaaggccggtccagcagaaagtgcggcggcaggccccggaacgtcaagccttcatccgcgaggaggtggcgcgacttctggaggccggattcatccgtgtggtcatccatccggagtggctggcgaacccggtcgtcgttcccaaggcgaacggcaagcttcggatgtgcatcgactacaccgaccttaacaaggcatgtcctaaggacccttaccccctgccacgcatagatcagattgtcgactccaccacggggtgcgaccttttgtgttttctagatgcatactctggttatcatcagattcgcatggctagggaggatgaggaaaaaactgcattcattacccctataggaacttattgttatacgacaatgcctttcgggttaaagaatgcaggtcctacttttcagcgtactactcgaatttctttgggtagccaaataggacgtaatgttgaggcctatgttgatgacttggttatgaagacgcgcaaccaagagaccttactctcggatctagcggaaactttcgaaagtctccgctccgcccgcataaagctgaaccccgataagtgcgtgttcggcgtgcctgcgggcaagcttctcgggttcttggtctctgcctgaggcatcgaggccaaccccgagaagatacgagctatagagcggatgcgcccccccagcaagcttagggatgtgcaatgcgtcaccggctgcatggccgccctaagtcggttcatatcgaggctgggagagaaggcgctacccctatttaagctcctcaaatgctccgggccgtttatctggacggaggaggctgagcgggccttcactcagttgaaggcgtacctcagttctcccccagtcctggtcgccccggagccagatgagccgttgctactctacctggcggcaaccccgcaggtggtcagcgcggcgttggttgtggagcgcgacgaggacaaccctcacctcgcacatccccaccctgtgtcgactcgacccgggagagagcagggaggagaggcccccgagccgaacggcggcccgaggcccccgacggccggagctggccctccgcctgcttgtccgacggtgccaggcgcccccgacccccaggatggccccggggccactgcgggaaggccgcgcctgtcgccctccgaccccgaggtcgtcggcatagaagccgagtgcgccccgcgcggcctctcggacgaagagcgccctggagatgcggcccctagcgaagaggatcggccccgccgaaaggtgcagcggcccgtctacttcgttagcgaggccctccgggacgctaagacccgataccctcaggcccagaagatgctttacgctgtcctgatggcttcgaggaagttgcgccattattttcaggtgcatcgggtcacggtggttacgtcttaccccctcggccaaatcttgcataaccgagaggatactggacgggtggtgaaatgggcaattgaactctttgagttcgatttgcactttgaaccacgccacgcgatcaagagccaggccctcgccgactttgtggcagagtggaccccggcccctgagcccatctccgtccccgagaccagctcgggcccctcgcagctgcctcacaccgcctactgggtgatgcagttcgacggctccctatctcttcagggcgccggtgcgggggtcacgttgacctcgccaaacggagacgtcctcagatacctggttcgcctcgactttcgggcgaccaataatatggcggagtacgagggactccttgcgggactcagggtggcagctggactggggatccgctgcctcctggtgttaggcgactcccagctggtcgttaaccaggtctgtaaggagtaccggtgctctgacccgcagatggacgcttacgtgcgccaggttcggcgtatggagcgccattttgatgggatagagctttggcatgtgcccaggcgggataacgcggtcgccgacgaactctcaaggctcgcttcctcgcgagcccagaccccaccgggcgcctttgaagaaaggcttgcccagccgtcggcgcgacccgaccccctaggggagacggacgcacctgaacggcccccaaggcccgtcggagtccaggcctcgggacccgaggggagcgttcccggctcccctagattgattgcttggatcactgagatccaggcatacctcacagataagactctacccgaggaccgcgaagggagtgaacgcgtccagcgcatctccaagcgctacgtgctggtggaagggaccctctatcggcgcgcggctaacggagtcctcctaaagtgcattcctcgggaacaaggcgtcgagcttcttgccgatatccatgaaggcgagtgcggagcccactccgcctcacgcaccttggttggcaaggcctttcgccagggtttctattggccgacggctctcaacgatgcggttgacctggtccggcggtgcagggcgtgccagttccacgccaagcaaacccatcagccggcccaggccctgcagaccatacctctttcatgaccgtttgctgtctgggggctcgatatcctgggtccatttaggcgggccccgggcggtttcgagtatctgtatgttgctgtcgacaagttcactaagtggcccgaggcttacccggtcatcaagatcgataagcactccgcgcttaaattcatcaggggcatcactgctcggtttggggtgcctaatcgtatcattacggataacggcacccagttcactagtgaactcttcggtgactactgcgaagatatgggcatcaagctctgcttcgcctctcccgcccactccagaagcaatggccaagtggagcgcgccaacgcagaaatcctcaagggccccaaaaccaaaaccttcaacatcctcaagaagcacggcgactcgtggatcgaggagttgccagcggtgctctgggcgaaccgaaccacgccaagccgagcaaccggggaaacgcctttcttcctcgtctacggcgcggaggcggttctcccatccgagctcaccctgaggtcccctcgggccaccatgtactgcgaggctgatcaagatcagcttcgcagagatgacctcgactacttggaagagcgaaggcggcgcgcggccctccgagccgcacgctaccagcagagcctgcggcgctaccatcagcgccacgtccgggcccgatcactctgcgtcgacgacctcgtcctacgccgcgtccaaacgcgtgctggactgagcaagctctcaccaatgtgggagggtccgtatcgagtgatcggtgtcccccggccgggctccgttcggctggccacgggcgacggcacagagctgcctaatcagtggaacatcgaacaccttcgtcgcttctacccctagtgggggtcgggtgttaggtctcgggctcgggccaaccccgcgcccccctaggcgtgcagggttggccgggggctaccacatgcatatccttatcttttttctcttccgtatttcaataaaagcattttagatttcctaaggactgtgtctgtgccattgtttcctttcgaagaatcttggcttgaattagcacgctcgtgctcgatcctgccctcggtggcccaggccggctaaaatcgccaaacggggcccagaaccgagccgtgcctcggggcgtggtgaactccgggggggaatcggcaaaggcccacaatcgggtcatccataaccctcggtcaccacattcccggcctggccagtctcgacacgcggatctccccaggcactagccccgacccgcgccatttgaggctgggacctgggcacgagccctcgttcaagccaagacacagaaggaccgtggcacagaccatcctcgtctcatacacacaacaaatgaaattgacacaaaaatttcatctttatttgattgcagattaaattagtttatacaagaagggagcccgaaggcctcagaagaagaaagaaaaagctatttaagattggtgggggcctgggggctcacgccgacgcgcccgggtcgccggcctcgtcgtcgctgtcgtccgcaccaccgtcaccgccctcctcgtcggagtcgagggcgaacgcgagtcgaggggccgtaccctcgaagctgtggacgatgtggtcggcggcgtcccggacctgtgcgcgcgcgccatcctcggttccaggagggaactcgtccagcgccaccgccccccgggcgaggtccctcgaggatgacttgatcgtctcctcgagctcctcggggagccgctggagggtcccggccatctctgagaggcgctgggcgaggcccccctggttggcggcatatttcgcggtccgcccgccccaaaggcccgcctgccgcccggcgcagtctagacgggagacggcgtcccgaagcatgccgggccctacctcgcctgccaagtggagggcctcgacctccccggcggacgagtccagcgcgccctgcagctcggtgatggtgtgttcggcggctgcgaggcgggcggctaggtcgccgtcgcctgcggccgccccgccgctgtgcgctctcgcgtccagctccttcgcccgcgcctcgaattcagcggcccgctggtccagtgcggccctctcggcgcgggcgccttccagattgaggcgcgcctgttcctcccgcagctgcgctgcggcctcggcctcctcgagagctcgctcccgctcagtgagctcgtcctcgcggaggcggagtgcggactcctcttcggcgcaggcagcctcgtgcgccaccagcgttgcctcccggatggcgacggcggcctcgcgacccaccagttccctctccttcgtgtccagggcgcgggcgcgctcctccagcaccgtggcgcgagcctcaagggcctcttcgcgctgccgggacgcgtcgagcttcttctctagctccgccgcccggctcccgtattggaggcagaggtcgtcccgcgccgtgttgaacacggcggtggcaatgagggcagtctcccgctcctcctccacctccctggcgatctccgccaggtccctacgacgggcctcgagctctgaggtgtgccggcggtgtgccttgcggcctgcctccaccatggcctccaccgagcgtcgcccctcttcgacacgcgcccacgccgcgtcgagctccgcccgctctgcctgcaggacctccatctgggcacttaacccgtccaacaccgtggtgttcgcggcggccaaggcctgcagaaggggctccgcgcttagtggggcagcggaaggcgtggggaagagccgcctcggtaaggatgccgcacggctcggcccgccgatcgacgtgccgaactcgggggcgtcccccgaagcgggctcgtcccgaacgtcgcccgaggggtcgggcccgggcggcgcgcccgcggcctcgtcgtgggcggcctcggaagtcgttgtcgcctcgggtggagtcgggtcgggggcttggcaggccgcccggcgtgagtgcgccgcctccgtctcccggacgggctcctcggcccggcggagtctggcctcttcccaagcggcttcctcagcctggcgagcccggacagcctcctgggcagcttcctcggcttcccggaggcggtttgcggcttctcgccgatcagcttcccgcctccgggcctccgcggtcgccgtctcctcggcctcagaccggccggacttggaatggcaggaagggcgcgacgggatctcgctgaggcagacaaaaaacaggtgagtaaaaacttgccttgggagatgggagaatgaatacggccgtagtgggcgcggggacgaacctgcgaggaggtcggctaaacgaccaccttgggggggagatgaggtttccccggcatggttcggtcccccccatcttgcggagccgcttcttttttcgctccccctcgggctgcgacgtcggcgcagcaccctccgggcgcctgctgctggcacgcaccgccccgccccctcggggaggagatggggagggggtatcctcctgtttcctcttcccccgggcgtcggcagggcggctgccccccgggcccccgtgacggggcccagaagcacgaccccctcccggggtagattgttcccccctgcggctcccgccagcgccatcgtggcctcgaggagcccgctcccctgacgccccgaccgcctgcatgatggtcaggatgttggcgcgctctggatcgctgcagagggggaggacaccttgggggatgagggatgcctccacggagctgagattcagcacccgttggatcaccaccttgaagtcttcagggacccagtcccatttgaccccctagtgggtcctcatgtagtcctcggacccggtgtactcccaggcgccccgggcgcgccgctggagcggcgcgatccggcgacgaaggtaatcgccgtacaccatggcccccgtgagcccctaggatcacagaccagccaggcggtcaagaacggcgtcgtagccgtctcccagatctaccggcgcccgccagctggaggcctgcgccgggggctggctcggaagtcggaggcgcgcttcgtcggcgagaggggtgtagaaccagtcgctcttccagtcgtcccacttcttgcgaaggacgcagggaatgtagcggttcagcaccggcccccacggctggaagtagcagccaccgactaccgacggtggcgacaccggctgtacggtgaagaaccaccggaacagccggagagatgggcgcaccccgatgaacatctcgcacaggtgcgcgaagatcgccaacgtcattaccgcgttgggggtaaggtgtgccatctggagatcataaaactccagaacatccatgaagaaagaagagaatggcaggaccagccctgccattgcgaagggaaggaagaatacggaccgccccgggtagtgtggcgccgggcgtccctcacctagcacaaccacctcccggccggtggcagattccggcatgaatcggcgcggcagcccggcctgcctctcgctcacgatgcgggaaggcggcagcacgctaccatcgagcggtgcggagccccgtgccatgacgccggcggaggaggagcttgagagcgagtgagtatggcaagggtagggcgcaggaaacggagagtcagagcacaagtggcgaaggcaataggaagagtggcgagaggaaggaaacaaatctcttcctcggcgtctttatacccttgccaacgctatgcccggctcctcgcttcccgcgcccactatctcgccccctcgtttctcgcgcccactcctccactaatcccgttcgcccgtttgcggcgcacgagacggatgtgcggccgtggcagtcgagatgggacatatcgtgcgcgcgttaactacgctcgccgaccgatgcaccatcatcacatcactaggcgaaacgaaccggttcgtcccgattcgcgcactactcaagtaatgtagcggtcttgaagaggccactcattattgtcgatcggtttctcccttgccgatgcgcgcgatttgcgaccgttaggtttctgcccgcctgtggggaccggccccacctgtcaccgggcctaaggagtggcatctcgcccgatcgcctccctcgaggggggcggtcgccctggcgtgacgccgggggctactgtcggtgacatggggccgggggtatcgtgactagaggcttgggtagccgcgatcactcacgtggcccgaccccctcgggggggtcgggcccgacggtgacatggccacccctccctctgtctccccgaggggtcgggccgctcccgtttcggccccgagggctgaggcgccccgaccccctgtagtgttggcgccacgtgtgtgggttaggtgagcatagcggccctcacttaaccacatttatagcgggttagacgagcgcgtcacgccgcattcaatgcggcgcagcgcatgcttatccggtttgtgaccagtcgcggcatgtgaccggtcacagaccggtcagatcgcgggttaggtggcaacaggcggcctgtcgcacgcctcgccccgtcccgtcggaatgatgagagcctctaggcactcgtccctagacggagctggcgtgggaactcctggagttagcacgtcggtcccggctagattcataccaggcttcatcgcaaccattacaaggaagtcattttatgaagaagggctgacgtgtggcatgctaaactgacgcgtggtagacaagaatgactggtttgtgactggtctgacgccggtcacgtcatcagcaaacaaccgtgctcccacgttgcacctgcttccggcggagtggaggttggtatgacccatcccatcggagggtcattcggacagcaaccattgcaaatctccacccattaatgaaggaaggacagggttatcccggtgtcaggcgaaggtacgagccaagttatggtcaaagtaggatgggtccccacccaaaagaagggtaggtagaaatggtgtatgtggtatccccttgagatataaaaggaggaccatgcctaccgagagaggggactgggggggggaagaaagggagaagaaaagaaggagagctcgaaaaaggaagagcggagctcatagaggagagaaagagggagagggtctctagagtttgaactctcttgctctccagctctttgtaactccttcatacacagatccaccagaacacaggagtagggtattacgtttctcagcggcccgaacctgtctacatcgcccgtgtcttgcgcatttgctctctcgcgaaacattccacagatcgagggcttagaacctcacctagcgtcccccgccgaaccggcaaaggggggcccgcgcggtctcccggtgaggagccccacgctccgtcaaggtgtgtatcattgcatctctgtgaaaagaaattagtgcgcaatttacgtcatagtagtaaaaagtacaagtaatatgcaattttaaccgcacgggtaacatagaaactgcactattaatttagtttgtgagactattattgttgttagctctcgtacgaaaaattaacagttaaccaaaaatcatatgtgttaactggctacaaaatagggcataaaaatatataatatttatgaaatacgatacatcgtacataacatgcagaataagcaatacaaataaataatgttcattgcagtacaaataacatgaagaataatccaaaatcacatgaaggttcagatagggttgccagtgaactgaaaaacataatgttcagttgtactcgtcatcatcgtcatggtcagtcgtagtcatagatgtgccacctcgtttttttgtagtttttttcctttgtcctacggcatgtcgcgggcctgagagtgacagacggttcggctcatggcgctcacggttagatctacgcgggtcattgtcgtttccttcgccaacctctggttgtatgggctgtgtcacttggggtgcatcatcagtttgtgaagtgcgaagctcattgggtaccgatgacgaccctccaccgaagcaggacatgtcgccgtacgatgtagtgtaaggcctaaaccctgacattagttcagggcgaaatgaccctacagaaaaaatgtagatatcaatgaaattatcaaagctggagcaaacaacaataacaaaaaaaaatccaaacctgttgacggtgcttgcatatatggaatttcattaggatgcgaggaatattgaccaaatagccaatcaccttattgcaacaagtccatataaccctgtactccaccaccaaacgacgtgccttgcacccatataaaatgtcacggagttatttcttaagttgaggtggggatcatgtatggcatgaaagtgccattaatatatgtgtatggagaatgatggctgtgcgtaccaccgtaatccatggattgtccttgccatgggttggtgccatatgtaggtgcatgcagtggaaccggctgagtaggccctgttaatatcaggaagtaaatagtcaataagattcatatagatgaaaaagtaataaattgaaataaaaaaaatatgaaattagatgtaaggggagattgaccgcctaacgacgtaaaccctccttgaccgataaaatctgcagacatttggggtatggtagggataccttggctagtccctgtatgtgcaattagttagcaaaaagtttaattacgagtggacatatgcatgccaatatagtactgaatgtacacgcacctgcaaatggtgcaaatcctccttgccagtgtgaggttggcacatcgggagccatttgacgaatcatttgtggcctagcaggaggcatatgaggcacgggacggaccattcgcgttccctctgtcatcaattggaaaacatcatttagttagtttacatacacaattgggaaaaaaattagcatattgatgagctatcccgtaccagcaaacgacgcactctcaccctgccattgagaggtgatgggcgtagagctatatgggggtacccattccggttgtgctgcgaacgtataaattagtctttaatataaatggcatttattttagcattatgcaataacgtattttaccttgagttgaaccaaagcctcctaggcgttcagaaatttcagtgatttttgggatagtcggaatagtgggtggctcacgaaaggaagttgaccttactcctacacgaccatcactggatcgtcgcgcggatgctgaagggcgggatgaggtggacggccgggaagaggtagagggacgctcacgcattggctcgaacgtccttcttgatgttgccggattatagatgtccgaggaatgacggcacgatgcgaggcgcatgattcgctttccttttcggcggagggagtcgaccgcagccattacttcctgattcgtacccgccattccatctctaagcttctcccataatgttttcgcctcctttactagctcccctgcaatgtcggtctgcatggagcgtaggaaaaattgttagaaagtggaaccccatgtatatggacacacagctgcaacgataaatttaaatgctagtagtaccgtcaagtgagcggggggtgctagctgcatatcatatatttgatcaattgttggtggacctcgctcgtcgggatcctccggtgcaagcagccggatgcgagtctgcgatgtgtaccaggccatgtattgtttgtaagtgttgtggtcgtatgccctggtctcatggacgacatcattcaaggcctgggaccacgcctctatccatggggtcatccttgagtgcatagatcgacaaaacctattgtcagcttgcctattttgcctgcaataaaaagacaacaattatgtgttaggtatatgtgacaatttgtagtgcacagaaattagacaggattgaaataacaacatacctgtgcacatctggtggaaggtaaagtccaacaggaactgggacttattggtacagtcccatctgacgcattaccctttgaacattatacccctcgacaaatatgtcgtacaccagcatttttcgtgtcatccagtacgcttcatcgcggtagcataagatgcttactccatgtggtgcacgcaaaatggcctcttcgttcgtgtacggagtccaccgaacttcgttttccctaaggctttcgaacgcctcggtgaagtactcgtacacattgtgcacctggattcttgcccactgtggctgcacgatcagagattgtagatttagttatgcagtaccattgaaatgacacaaatattcctttaatgcaagcatacgtaccggtccgtagcaccatcgagttccgaaggtaggacgatcatcaactgcgtcagtgtaatcatccttgtgggccacggccacgctcatgtatggacgtccgaacgagaagcgctcgtatgaccacaacatgaccaaaagtggacaccccgtgaaaatcgcctccctttgcccggtcttaatacaagcgtcgcagaaaccacggtatgtggctgcaaggatggctgatccccaggtaaactgtgtagaaggcgatatattaccttcagcaatttggcgagcaagggggattagcctggcgtccacagggttcccgtgcgagccggtgaacatgacccaaccaaacagccaaagtagataagcctcaaggtacaacgtcagttggtactcctggacatcgtcgggcatatatcgcacctaaaaaaaacaatgtgttgtcagatatgtgaatgtgaacagaatatgccttaattaaaaatattcaattacctcaaactgtgacaaccacttcaatgtggggccatgagtttctttttcagagaaaaatattttgtcctcatcatcgtctgtatcaccggtagcgtaccgtgacaaaatacaggcatatcgtgatacaatatcatctctccaatcttccggagggtccggaagtacaattgcctggccggctagtggcagccccgtgagcattgacacatcctgcaaagttatggtcatttcaccgcacggtagatggaatgtatgtgtctctggcctccacctatcaaccagtgccataagtagggacttgtcgatattttggcgtcgtttgctatgtgcccccattagtttttgtttaggttctcttgcgtcgtaatgcatccttgcctgcgtcatctgcacgaaggtaagaagacctgcagctgacaacctatgaggaaatttattagtcacattaggcaatgttatagtacgatatcatgatgttgcaaactttaaccatttatgcacctcgccttccatcgtcgatcaatcccctaccatccggctgtacgcggtatcaggacagctagactagagcaagaattcccatcatatatcttctttgcacgatgccgtgcatcgatctctttgctaagcaacgggtaaggccactcctcttccatatctgcatgtacatcatgaaggataaattagaaatttcatcaagtgcacatacggaagagtacataatgtatgaaattaaggaacaaaatttcctcatagtacaagtacaaactcgagcaatatcattaaaaccgccattacaaaaataggattacatacttggtaacaccttacaataaaatattacaacattatcataataaaataaatattacacgtaataaatgactaacatattaaaaccttattgaaataactgtcatgcaacgttacaaactaataggattacaaacgttacaattgtcatccaacgaacatttcatgaccgaacataaataactggacagtgtaggttataactactgcatgtttccttcctccctatcgtgagcaccttgagagccccttctattcctcctcgcacgttgttgcctaggttccacgggtgaagatgtaccctccttgttattcttgcaatctctagtgcggtgcccgtactgaagacattcctcacatcgcctcacaggccctcccgcttcggatgcatccatatcatttcttaagcgccgtgtttgtcttctacccttaccagccttcaacaaatccaagtctggcacatagatcctgttatcacccccagttttgactaggtgttggagggacctccacccgaggatctcagcactccatgcattcagaactctatcctttaggtagaacgtcgacacgtacgatgttgaatctagcttaattttagcgcatgcagccaggacatggctacatggcttatgaagaagcttcggcttattgcaagagcacgaacatgtgttatcagattcgtgccctagagtaacttcataagtgatgaccccagtagaagatccaaaaccccccttagtgcgacatgtgacttcccaccttcgtctaacgttcccagtggtaatgaccgtgtgaaatctggccttgttagccttctcttggaggtactctgccatctttttacagaaaggtgtttgtgtgttagacatttgttgcaacgccgcggcccgcctcgtcctcatccacatcgttgtcctgtgcataatgccttcaacaatagcagtcagaggcaaaggccttaatttgcgaagaaccgcattgtacgcctctgcaagattagtggtcattatgccatgcctagccccattagtgtcatgcaggagtgcccacttatcattcggcttgcactcaatccaatgggtaaaacattttatattctttgatgaccgacgcttctttccatttgatggaataagatcatccattggttccagggcctgggggacatgtacatccttcgggttgttgttcgtctgctttgaccgggtatgtgtccttgtcgcctcgtcaagttgtttccaaagctcatcgaactttgtggactgatttgtcttgcacaaccgcttgaacatgttcatcagccgccggctgttgaattgtttgaaaaaattggctcccatgtgccgcatgcaccaacggctgtgcatgtcaggccagtagtatgcaccatcaccatcctcctggagctctttgattgccttcaacagaccggcattccggtcatggatgatgcatatcgatgtgcgtttttgcaccactccccactttagatgttgcaagaaccaaaccagctttcgtagttctcgctttcaacaaaagcaagagctactggaattatctggttgttcgcatccgcaccaacggctgttaatatctggcctcggtacttcccagttaggaaagtaccgtcgacacacagcaccggcctcgagcactggaacgcatgaatgcatgctccgaatgcaaagaatgctcattgcatcacaagataatttggaggacgaattgactcccgatcctgcacagcaacataggtcccagggttcctgctctttagaatgttaagcatctacggcagagtgtcatatgcttcctcaaatgtcccatatcttttctccatggccttctgcttcgccctccaagccttgtcgtaactaattatgtattgttcacctttctccaccagttttattatgtgccgcacaggcaggtcatcaccttcaataatttccttgtagtacttgttcgcgacgtatgccgcggtcaggttgcggtgcgactccctagtgttccgaatcagacaggagtgttcgtgcagttttgacacaatccagtaagactcgtactttggcacgtgaccatgaagacggaaggtgcaaccttccgtctcacagacgaccgtgtactcagtcttgttagacttcacaaccctgaactgcctttgcgtcttgaatgaccatgacttcactgcatcttgcagccccgttttatcacagaacattgcacccagattgatttggccattcccgtagaaccatattgaatcatgacaagagttttctgcaatataaccagggtcttcttggttccacgaagcaggcataggtacttcctcaacttgttgttcatcttcgtcatcattctcttcagcagcgaggttttcctcatcttcgattgcatgtcagtccaccctctcaatttctttgactatagcaagtatgtcctcccctttatcggcttcaccagtaggatggtggttgaccacttcatctccttgtatggatagattttgaatgtcaggaccaacatccccaccacgatgggaagctacaacttcatcttcttcatgtgaactagaccccaactcctcacggttgctggattgccccgctgcgctctccgtggggactcttccttgacatgcttgcaccagcatgacatattcatatccccgtctcctacagccagcgagccaatcctgccaggccttactccgtgtcacattttttaactcccatcttatgttgttggccgatcggctccacataaccctcacgttaacactatatatacccgaatctaaagaaaatgtgcacgttagccagtacctaacttcgggcatggtaagggtgtcaggatttggatggtgtagtgtgcattgcctaaagttgctcagatcgacaccactttcattttccagaatttcaccttcaccgaaatacactataaatgccgacattcctgccattgcagacaacacggactagtccgtaaggaagtctaatagaataaacgtgtcctattcgcgaccaaaattagtttacacgcatactgtttttttgataaaaaattctttataaataactacttatttatatttccatattatttataaaaaaaatcatgtacttctaataaaaaatttataaaaaaataattacgtaaacataaattatttacttacgaatacatgacaatgcaattcattatttataattttaccacaactttgacataaaaaatatacacatgacaataaaaataatacatattaattaattaaaaaaacgtaattaaacataactatggcaattaatttatggcaattaatttaagtaacagagtatgtaatactcaaaacaacacaaccataccatatcgtacaaataaatatgatgacgaaataattaccttcggttatcagataacgcctactcccttttaaccagcttgctcgtataacaattgctgcctcaaagtttagttcactgcataatccatatgtttaactaacaaattaattatacatatcaattaattttaatacaacaaatgactacttgcaccgaagaaacattgacggaagctaagttaaaaatcatttttgttagctctttctgttctttatctaggacaatgacactcattgagccgcatcatgttctttgctacggacggtttgtacctacttggatatgacatccgaaacaatactactactgcaaatttggatgagtacatttattatattactactttaactataaattatctaacggacaactttacttaaatacaaaatatttgtaactatctgttagtacaaaactttttgcagcgacataaatttatttaactgcactttaattacaataccaaataaattacaaactgtctattaattacgaactgtcttccattatattaccataccttgttgtcttgccttcttcttttgaaccaatgtgctcttataaaaatcccaatttcgaagttcttcgtaattattgcatttatttgttcgttcgtaacaacctacaatgtaaagcacgtgtttaagcacaccatatatatgcacagctacttaacgaatatttataccttttccatttcttacaaaataaataaatgcatgaaatagtaagtaattgtaacttaaaattactacaaattaattacaactttaatttttgtaccacatttaataattatcaatactattaatatcaatatcaataactacgaatacaactattaatattttagtttttttcatttcttacatataatattgctcgtatatataaaattaaacatcacatgaactactaattaattataacttataattactactacgtacaaattaattctaacttatattatacatttaacctgaatagactctattaactttctacatttctattttcacatacgacctaacaaaatataatgtagttatacctaatacagacattagtttttctctgacataactacaaataaatattaactacgtgaactaacaatttagaaatcctcgtcgtacgaatttatgctaatagaaaactaatcaacttacgtgttttattttccttctctccactgcatgcactgcctcctctcctcttgctcttcctctcctcagttcactcccttctgtctttgctgtgtgaggaccatctcctctcctctcaatttaagcccgtgagggcattggattccaacgctagcggttacaaatggccggcatgatgtgactacaacagtaaatcgataagacaatgcacagagctcttccacctctccctaaagctaacccgtgcaaaaagcaaaaatcaaatagggatgggaaagaaaggcgttggtggagaaaagcggcgacgctctcgcgcatgcggagcgcgataccgaggcggtctcgcgcatgcgtaccgtgataccgcgcctgctgccgcgaccggcgcgcgcaaagcgcgacaccgctttcggtctcgcgccctaaaagcgcgacagcgctgccccacctcgctcctcgctctcgcgcacgcggaaggcgaagccgctttcggtctcgcgccctcaaagcgcgacagcgctgccccacctcgctcctcgctctcgcgctcgcgtatagcgataccgctttcggtctcgcgctcccaaagcgcgacgccgcgggcccactgcccttccccaggatttctctccctcgcgcatgccgcgtcagcactctcgcgcgcgcaaagcgcgataccgcgtgcccacgtcttccctgtcgcgtcataatcggtctcgcggttacatataacgaaaccggcctcggtctcgcgtaaccaaagtgcgagaacgatggctccgcccgaggtagtcgtggggatttctccacgtggcgctctcgcccctggaaaaggcgataccgctatggtctcgcggctcgcttgtgcgagagcgccagcttaacttcgctatcgctttttccgatcgcgatttcgcttcgctctcgcactttcaaagagcgaacatcggtatcgctattccaaaaagcgataccaatggtttatttccacaaatcgttcgctatagagtatatttttgcacaatcaatccataaacagtataatttcaaaaaattttccagaaatatgagttcctgtgttacagtatggctaaatataataggaatatatttattaaccataaggaactcctatggtggaagaagatcagttagtgtggtgaacatgttatatttgctttcactactagaaaaatatttttttcgcaacgttacgattttatttttccaggtggattacaaaatcaccgtttgtaaaaatagctcaagaaatgcaggacctcaagtccaccgcttgcaaaaatccggcacccacgcgctacccacttccttcactcacaggttgtgttcttaccacaggtttcccaactcatctccctcgtttttcgcgcgcatacttttcaaattgctaaacggtgcgttttatgcaaaaagtttctatacgaaagttgcttaaaaaactcatattgatccatttttgaaaaaaaaagctaatacttaattaatcacgcgctaatggactgtttcgttttccgtacgcactattcctaatgggaacaagctggagcgaacacaacctaagtcctcaccccctccacccatccccccacctctcccttcactccctcaccttcatccctcccccttccctccccctttacttcctcacccctcctcttagatccagccagcgacatggaaggtggaggcaatggccacaacaaccgacggcgcggaggcgcgtggcgaccaggaggagacctggcggcatggaagacaacacagtagccggcggcacggaggacagcacagcagccagcaacgctctcctcccctcccttcctccctcccagatccggccggaggaggagagacgacggcggacggaggaggagcaccctagatctagcggtcccgagcaccgccgctgtttgatctaaaggtcttgagtcctgccgccggtcgtcttcccgctccacctcttcttcgagccgcatgccatctctggccagtcagatcgaccagcggagagcccggggtcactagattcagccggtggctcggcctcgccgtcggccgatgcggcagtgttgccctcaacgatgacagcttggtcgtggagggaggcgatgacagtggcgccggagagagggccagagagaagggtagtgattaagggagaagaagagagagcgtgagagaaggcgggggagaagaagtgaggtggggactggagacttcgagagtcatcaatgggcggtggcttttaatatggtagattcttctttacactagcggtcgcttaagaggtccgccggcaaaaatagggttatttttgcaaagtgacttcctatgcaaccgtgagcaagaatggatttttcactgacggtcctaaacccttcaccaacccttcacccctcgttacagtttcgcacgcggagatctcatgtaaccgccatcagaaaaaatagggtacagccatgaaaaaatcatttttctagtagtgaagccagatacctgcaatctgaatctgatttggaccttgagccttgtaattgtgccgtgggctaagctcaatgggtggacgccctagggctaaccctattatgtccgcaatcatatttattcaatggccatcatatattagagtcaggttttgcttagattaatccatgtcatgcattttcgccgctagtcgatttgtgaaacaccaacttcgagtgcttaatcattcatctgtaattttagttgtaatctacgttgttcttgcttgtgtttttttgattcgtatgcagggattagccttctcggcgaggttaaccaggtttcgacacggttgataaccagataaaacggggtgatgcgattgtagggttcagatcgtgttgatcgaaaaccggaccgtgtgtataagttttcgtcaaatcgatagttatctacatctcacggaagatagagggcccgttgccatcagcggctgtggaatccaatgaaaagtgctatcaaacttagagtatgtgtttacaatttggatcttgtatcatctacttgcaatcactattgtgactgtcagtagtcggtagcagctctcaccatcagatgcaaatcgaatggtccaagttttttttgaaagaaccgaatggtccaagttaacatataacactattcattgtaccgtagcaaataaatgtagcgtgggatattgctcatgatgttattgttgtataggagtggatttgaaccgttgatcacaaaaaatggacatctcaaaatgcatgcagtatttaacttgttgtgactgcactttaatccttaccatttgagttctatgggcccttccatatggacggtcaaaaaataggatgctactggtataataggagtacatgcccaattattaccttgtttacttggggaaaaattttgggtttggttatcacatcggatatacggacacatatttgaagtattaaacatagtctaataacaaaactaataacaaaacaaattacagattccgtcagaaaactgtgagacagatttattaagcctaattaatccgttattagtaaatgtttactatagcaccacattatcaaatcatggcgtaattaggcttaaaagattcgtctcgtaatttacacgcaatctgtgtaattgtttttttttctgtctacacttaatactttatacatgtatccaagcattcaatgtgacgggcgtgaacatttttgttttgggactaaacagtgccatatatactactattttttttatcacgcatattggcatctggcaagcccacaggatgatcatttgacttggccgccagttgatcccaagccaaatgtgccttttcagtttcccatacggcaatgtacgagtgcgacgcgctgcctttgcatgccgcaggcagggcgcaccccccaccacgttatcctcatgtcctgttccttccgcttccactcctccgccctacccgcagccgctgcacggctccacctctcccgcggactccggccgccaccgtcacgccgtcgcctgcacaacacattctcacccaccctttccatctccccgccctcccgtcacgccgccatcgccgccgccgccgcttctcccctcggtacgtacgtgcccaatcttgacagagagcgggttagtttagtttagtaatatctggttgcggattgctcttttctgcttctacctcgatttttgccaatccggcaggtctcgatcggcgagggacgtataggatagggaatccatgagggagggggcaagactgcgatggttaattgcttagtttggtcctatccgattgaaactgactgctggttgttcgcttcctcttcgttccgggattgcaggcgcatctcaggaggcatcggcgatggcggtgtccgcgtcggagggcgttggccagtacgatctgctgattgttgggcctggcgtgcttggccggattgtggcggagagatggcagcaggttaattattgctttttgtacccttttttttaagcattggtaccctttaccctgcttttctgctgtttctgaatatcaagaatttcattgtacattgccgacttgatgattaacatggttgaaacacataaagataatcttcagtggtgtagtgaagcaccgactagtaggattatggttatcttttccttgcttaacgatggtttctgaatggaattcctatttttgtttctaatgtgagggatggtatatatgctgaattgctgataatattttctgctttccttttctactagtaaagatgtaaaaatatgtctgatagctttgcatattttacaggagcatccaggttgcaaaatttttggtcatactgcaaccacagatcatcacagtgaattgactcaacttgggatcattccctccttgaaaggaccagctgttcagaaagttccgtacgttattttctgcgctcctccttatcggacagatgattacccaggagatctgaggtaacaaaactgtagtactcaaacgatgattcctcgtacatagcattccgttgcttctgagaaaaaaaaccaaagttcttttagtaattatgcaaatacacagctatgaattatagggcatcacttctgggattttcagaaatttttctttcaaccatctagaatagactaagtgagatcaatgaatgctatgttaatatttactgatagcagtcatatatttgttgagaagtagctgagcggtttgaaagctgacacatacttgtaatttggtcttgtgctaatattggaaccggatgtctgcttctgtagttctgtttggggagtggacacatcagtttcttgat

SEQ ID NO: 4686 - DNA, 15822 bp, Oryza sativa
ggcggtaggcgactacttccgtcaattttcaaaatgaaaaattatttttgtaaaacttttaataaaaaaaattaaaaataaaaaaaattcgagtttacagagagttcagaagttaagtagcagacacaaagcccacattttgtcgggctgaaaacaggacaacactcagcatggtttctaagagaacctgcaaacatcctcccaaaacaacattcacccaggtgaaactaagctaactatcagactaaagaagagcctaaaggagctccaagccccagattcttttttcgttttcctgcatatccaagtgttgtcaacagtagccaattcttcttgccccaggcctccatccaaactttgagcagaagatatcatttgccacctgtcttaagagcttggcacccaagagcagccttcttcgatcggcctccgctttctgcaaaatagcccaggagtccatccaatgacagacaaaaaaaataacatcagtaggatcatttggcaattttttgtcaaaacaggctttgtttcttgttttccaaatggcccaaattatagctgccacaccaacaacaatcaggttcttcattttttttcccaaatgcagagatccaagagccaaagagatggttgctgtctgacacaggatttagatcaaaagcacagtagacagtgttccagattaatttggcaatgggacattcaaaaaagaggtgctggatagtctcacttttgtcacaaaactgacagtttaaactacccttcctccaccctctcttgaacatattgtctttagttaagattcttcccctgagcaagagccagagaaaaactttaattttcagggggattttgtaattccaaacctttttcagaggtgagctggcctgttgaacacacagagccctgtaaaaagatttcacagaaaaggtcccatgttttgtcagagtccaactaagtttatctttagccccttcctgaaagtccaactccccaaatttcgatttgatcttgttacagtcatgtagcttatccccatataaggatcttctgaatttgatcacctcccagcctttctcttttatcttggctaaggtaatgtgtttagaaaaagtgatattatacaaggcagggtactggatgttcaggggtctgccccctaaccaactgtcttcccaaaacaaaatagatttcccatctccaagtttcttagtacacaaagagtagaacttatcttttatttccatcagcccctgccaaaaatgtgagtcaccaggtttgttttttttaattgacattggtttctttcttaagtatttgttttttaaaatatcttgccaccaaccctcctcattttcgagtttccagatccatttcccaagtagggctttgttcataaggtctaaatctaggactttggagtccacatagaaatacaattagaaataataaaaaatcagaattaaaaaaaagaaatattaaaatacaattctagagtccatataggaatatatataatttacaaataactaaaattggatattaaaaaaattaataactaacacgtatataaaatacaatatgaatattacacattagtagtttcgtaatttaaaattatgttgttattgtaatatattttaataatataatgtgaaaacatatatgctattatatgagagaaaatataatgatgctagccgcgcaatctgcgcaggccaacatgctagttatattattaaaggaatagaaaaaggagcatccacgttcgctctcatggcttagaaattctcacattaatcgaagaaaaagaaaaaacagagtctatataaaaatacaatttaaaaatagctgaaattcggaattaaaaaataaggaatattagaagaagagactagaatccatatagaaatacaatttagaaatagttgaaattcggaattaaaaacataagaaatattagaagaggagactagagtccatatagaaatacaattaggaaataactgaaattcggaattaaaaataaggaatattagaagtagagtacagagtccatatagaaatacaattaggaaataactgaaattcggaattaaaaataaggaatattagaagtagagtacagagtccatatagaaatacaattaggaaataatagaaattgggaattaaaaataaggaatattagaagtagagtatagagtccatataggaatttaaaactaaacgttcgctctcattgtcaaggttacggataaggtataccctctacccttggatatacgatgtataccagtatggtataccagcgtgtatacggatgttccctgtacacgttaacgaattccatacctgcgtgtatacggatgttccctgtacacattaaggaattcatcgtgtaacagaaacggagtccacggatggaaggagtcctgctcggacagaaccgggtcgttactatatcgtgtggggtccgatgtctccgagtcctacttagagaccaactgacccgcggtataaaagggacctccccgggagaacttaagccatcgaatctcaccaccaacacatcgaccacagcctacgaagccgaagcctcaggagcaaagtcgccggttgatctagtcgaatcaactcgactatgatctcatcggtatcatcgagttccattattccctttgtaatctgtgacttccatcatataatcccacaccaactggattagggctattacctgtcaaggggcctgaactagtataatccttgtcttctatttgcttgatgtcgtattatgtagatcatcgtaccagcgtaccccaataccttctatatctggtctacgggtatcccccatcgacactcatggcctagaaattctcacattaatccgagaaaaagaaaaaccagagtccatatagaaaaacaatttagaaatagatgaaattcggaattaaaaactaaggaaaattagaagaggagactagagtacatatagaaatacaatttagaaatagttgaaattcggaattaaaaactaaggaatattagaagaggagactagagtccatatagaaatacaatttacaaatagttgaaaaattcggaattaaaaaataaggaatattagaagaggagactagagttcatatataaatacaattaggaaataactgaaattcggaattaaaaataaggaatattagaagtagagtatagagtccatatagaaatacaattaggaaatagctgaaattcgagattaagaataaggaatattagaagtagagtatagagtccatatagaaatacaattaggaaataatagaaattgggaattaaaaataaggaatattagaagtagagtatagagtccatctaggaatttaaaactaactaaaatttggaataaacataataaaattaaaagtagagtttagagtccgtataaaaatacaacttataaataactaaaatttgaaattaagaaaaacatgggaagaagagtttaaaatcaatataggaatacaatttagaagtaactaaaattcgaaattaaaaattaaagaatattgaaagatgagtttagagtccacatagaaatacaataagaaataataaaaattcagaaacaaaaataaatagtattggaagaagatcatagagtctatatagaaatacaatttatagaaaattcagaataaaaaaatattaaaagatgagtctagagtccatataggaatatatataatttacaaataactaaaatttgatattaaaaataattaataactaacacgtatataaaatacaatatgaatattacacatgagtagttttgtaaagttattgcaaaatttaaaattatgctgtcattttaatatatttaaataatataatgagaaaacatatatgctattatatgagagaaaatataatgatgctagccgcgtaatctgcgcgggccaccatgctagtttaaataatatttataacactggtaaatgaataactagcgttataagctggtagtaattcttttataatcatttaggaatggtgcacgtattatatgggggtattcgtgcaagtaaatttgttactttagaagagggtattcattcgagtaaatttgttactctaggaataaatggaaaactcaacacaataaattcgttatttttgaaacgtggggatacactagaaaaactgaaaatgaaaaactaaatggtaaatattttactaaaacgtgaaaacaaaaaacctagagagaaggaaaaaaaatctggatggttaatattttattgggtcctatgatgaagcatggataagagatgttaaagagaaaaaaaacacgaaaggcggggtggtaaaaaaatgaaaaaacgcgcgaactgagaaaaggtgggatgcggagtaaaggtggggtggtaaaaaagaggaaaatcggaaggagagtgcgttgtgcggcgctcgaactaatattccgcgcgcaacacgtgaattaacgctaccgcttaatgtatttttttcagagttcacgcgctgtttgaaatttgttgtacaacgagtactagttgcttgggttcaaatttagatttaaattgcaacacttatgaattgctcaaaaggcaaatatatgtacatcaggattgagatcctctgacttaagccacatgactttgagtcactggtatgtgggtcctctttgctatggacccacatgtcagtgacggtaaagtcacctgacttagggcagaggatctcaatcctatacgacattggtagaaaacacataatacatttatctttacatcatcatatatagatgcattgtgttctatgtatattttgcacaaggaaaaaatgttcttaataataacttaatatttgaatgcacagtaatgtacgtgcattctgtcgacgggtgatacccgtagaccgatatagagggtattggggtacgttggtacaaggatctacgtaatacgacatcaagcagacaaaagacgaggattatactggttcaagccccttggtaggtaatagccctaatccagttgatgtgggattatacggtggaaaacacaagttacaaagggaacaatggaacttgagggatccggcgagatcatggtcaagttggttcgactagatcctcgcgatttggctccttgcaggctccgacttcgtaggttgtgagggttgtgttggctccgagattcgatgccccaggtcctccccggggggtcccttttatatcgctggtcaggcggtttccaagtagaactcggagataatagaccctatacaatacattgacgacccagtcttgtccgagtaggactctttccattcgtagactccgtgaaggatttccttagtgtacgcaggaagtatccgtatgcgcgtgggtataccctaccaatatgtaacgtatatcgaagggtaaagggtatgcctaacccggaaccctgacacattcaaaatgtaatgcattatttctcaccataaaaaaatgctactaccaaaattcatttgaactgcaccatagtatacacctgcattaaaacttaatacattattttcttatagaagaaaaaaatactcccagaatacatttgaattgcacagcatttatagacagatgcattcgaattgtgttattaaaaaatggattttctcaatttttatagacatacggaggcaagggcggagccagccaagcggctgcgcatgctcaccgacaaaaactccattaaatttatatgttattgaatgaattgatgatgaaatttatataacaattactagaagtgaagcttgctcaggctcaaaaatctttctagctctgccactgtgaggagagataaaatgggaataagtagtttcatcactttggttcattggaatttggaatttgtgcgcatatattcgacttccaacttatgtcgatgaattcaatgtcttgctgctttaaattaatatatgaataacagggtaaaatttcataatttcaggtattaaatagataaagaaattaggtgtacttatgagactccctacattccatattcattattatataactttttcaccaagaccaacaaaaagtattaactttcctatatttcatttaatgtgagtatgtgtgtcacgccccgaactagtcccgaccggaactagcccgtgacgctccaaattaacctgttaatcgataccagtcccaggaaacagtgctggtatcacaggaagacagaatatcacagcaacagaggtctctttattatagagtaggagtacagtcatgttgggctgcggacagatcccgagctcacaactgcattacaaaagggaagcggaagccaagacttggaccaaacatcacagacacgacttgggaactaggccgaaaccctaaaactcatcgtagccggcttgctcctggaagaactcctcgtcagcaggatccgcttcatcttcttcagcaactgggggaggggattatttatatagagcaagggtgagtacaggagtactcagcaagccatgggaaataagtgtttaatgcaggcttcaaagaaaggctgttgtttttgcgattgattttatttaaactcttttctgaaacaactaagggagtgcttctcaaatgacatggatgagacagtgcgtctcgtccggtcggagtatgtgcaatgattcagtcttttgaattgatcaagattggcacccggccaacagctttcaaacggccacccgggcctggctgatcccatcagccgcagattttccaaacatcaaacccattccacaacagcaaatttcacaaggcagtagtcaaacaaaactacgctaggaatcacctcacatccgcccatgaccgtgggcacggctgttcgaacagttttaataacctctgttgagggggtacactttacccacacgacattactaacccggatcatccagcccgtgcagaacggccacgactagagaccttaaggctttcatgacaaggcatttcgaaagccgacatgggttcaccatatgccaacgagaggggtcctagaccaacaccaggttaggtcccagaccatactgtgccaggaagcccaggggtcctccccgacaccaccccggcgaatccacatgtctcttagcatcatggctcccccgataagctagttactcagccaggggtgtcccattccacccatgtggtcgtacttgtcttatgttcggatgaaattccaaggaaacggtccttaagtgcaagagcgggaaaccgtacaccaggtacgttccccggtccgcggttttgaaaattcatttagttcgcaagcaccgacccaggtgtagggttttccaagtcttttgtaaaacccaagttttacccaagatgtttctcagattttaagtttgaaggcgaccgtcgatacctatgcagagtgcacgattaccaaggcgcaactaggtgagtacaagggaacatggtataacaattacaatagaagggtcaaatgcaacaaattaggtaggtccgccaatctgccttgcaaacgggacaagcagattaagtgtgatcctatcaatgcataatatttttcaagcaacataattaagttcaaatataggcttaagatgttcaaaggtggcttgcctcgctcgatatcttgaacttgatcctcgaaatcctcacactgcgggtcttcgggctccgaaactacacgcgaaacgggacaactaataaagccctattattgacctctaagcgtgccattagatagatcttgagatttgaggaattttggaacttgaacggagtcaaacggacttacggttgggaagatattgaatttctaagattattggatttctggtctaaaggaaaaggatttatttaaatcctttttgaaaaagaaaagaaaagaaaagaaggagggagggaaattagacttccctcgggcggctagggcgcggcccgagagaatggggcggctcggccgagcttaatgggccggccggcccaagaaggcggccaaaaggcgcgcgcgcgggcggggaggggagagagagagctggtgggccaggtccataccgcgtggtccctggtgggacccgcttgtcggcgactcggctcaccgtgagcgaggtgcacgcagggtgtgctagggtttggggagggaggcgtggcgcatgcgcgcggttcgcggaggacacggtgcggcgggcccacgcgcagcctcacggctcgcggtggaccgcgcgcgcgagggggcggagggaagcggcggaccggggtctgcttgacccggtcgcggccgaggtggcaccgacgtggcgcctacgtggctgccacgtgggccggcgggaggtagacgacgacgccggccggaacggacggtggacgacagcggcgagcggcggagcgaaccatggcgatacaggcgaaggcgagcacaccgggatgttgcacaggacgaggggagacgagccaatggctcggattcgccggagggagtccgtcggcggcggattacggcggcggcaaccggcggagagaaaagggggaaacggcgacgaggtcacgaggggccgattcccggcggtgagagcatctacgcggctacgggaatccacctcttgcgccggattaggaggaaacgcatcgaggaaggtcggcgacgagagacgcttccgagctcgggcggcgacggcggcgagcacacggcgagcgacggcagcagtcggggcggcgccagctagctgtggggaggctactcgtgctactacccgagtctaaggggaggagatggaacgaggagggagaacggagggaggcactaccgagacgaggcggggcgttgtgacgagaggccgacggcatgggagtgtcggagtgatctctccggcctcgggccggggaagaggaaggagagggtgcgacaatgtcgggttgggaaccgacctagggcggtcaagggagagggctagcgctcggcggtcgcggcccaaacggcgacagggggggaggatgacgccggcgagagggaaaagggaaaaagggggagagaaagggggcttgcccccttgccacattggggaaaagaggagagagggcgatgcgccagaggcgggggggagctctgcctctgtcccttggaagcacgcgcgaggagaggcggggccaagtcgatgacgacggcgatgacggccgggcggtttggagcggagcgacgacacgggcggtaggcgcgggcaggcgctgacggcggcagtgaccaggcggtcggccaccacggcgcgcgtgcgcgcgggaagcaacaggcggcgcggtgatttcagcggcgtcggcgggaagcggcagcgagggcagagggcgctcggctcagcgcggctcatgcgcacgcgtgagcagcgcacgggcagagtgggggagagggagagagagagagagagagagagagagatggagggggagatgggccgataggagttcggcccatcgaacccgagggaggcaaaatagacttttgcggagggatttgatttgggaaggatttggattcgggattgaactcggcaatagatcggggatttgagatctgagatggcacggacactagacaacaagcaaagtaacagattttgcaattagggtttttaagagatagttttcccgctaggcgccacgacggaacgggcgctacaatgtggtagggaaaaatcaagaaacatgcacactttagctccttctgggccccatacataagaaacgatagctttattacctcaaattcgtacaacatgcatgcaaactcaattttcatgcttaaatgcaataatattacaagtaaacgaagggtctatgattacgtgatgatcaatttgaaaattttaatttgtgttaaacgatgatccatataaaacgaatggagtattttatactagttggtccattatgcggcaaagccgcgtctattttctagtgttgacctatcttcaggggagtcctagagaagcgtcagaattgtcggtgctctctcctcgcttgtactccgcggatgcttcttttaataaagtaagtgttcgggattttcttttttatttaatttactacttaagtgagatatatattcctatcgttgcgtgtttgtcgcttagtatttatgttgagtgctttagtactaggactttgtaggaaaaaggaagttcctatacgaggctagagtaatcaataacttaggtgtgttgtctaggttagcgattacctttgtttgttgtgtgctctctgaaaagtgaggtaggtagtaggtgatgatagcgttgttcatcctttgtatccctccatatttggacacatcatagagctacatgccggactcagcttggtagactggggggagtcggtgcccgaagtaatcgatagagttttacattcaacttaagcctacttaattaaaaaccacaggaatcctccctagcctaagcctgccttctataccctcatgttttgctcagtcccttatgtacgcccgaattttagtttgaatctcttccatacacttttcattagttgaccattaaattcatataaaaaagatccaggggtatataagggaatgagtaaaattcaggggcatagaaaagattgggcaaaatttcatgggtatacaagaaattttctgtcttgaatgtagatattgtgttattctgggtatagcattataattcacgggcatgtattttaaggtatatcaggcatacgaggatatattcatctactatgttcaatgtttccatagatactttttcatttccatttctattaatggaaatggagggctctcgccctttgcaaaaaaaaaaaagatcaatgtttttatcttatgtaatttatttagttgatagatgtagtacctcccatttgattagctatctgtcatgtccgttacctacatgaaggggttgtttagttggatgccacaattttaaaggaacttgtggctacgcactttgatcaaattagataactgtttagttcattatcacgcttttgtagctcgtgtacccgcaagtcatacgcacaaaattttgccataacattgctatccttatggtcaatgaatttggtgccataaaaattattacgtgtgataaaatgtttggtaaaatggagcatcctaccaaacagctccattatattttggcaaattttgttacagcacataggaaaatgtggttttgctcgacactccctcttttgttacgaggcacaagaatgattttattattttcatccgttttggagagaatctttctgcaagagcaaaaatgtccctgctaattctcatgtagccacatttcgcaaaaaaaaaaaaacaaatctaaaacttggtaggcatatttgcgctaatcttcttgatagatggcctcgacatcaggccctcccaccaagccttcacatgagggtacgcatcaaacagcgacgcgcacggggtcgccatgaagtagaacgtgaaggggaagtggttcaggtccgcgaagctgaggaaatccccggcgaggtacctgctccccgacagccgcgcctcgtacgtctcgagcaccttcttcagcttctccaggctctcgtgaaccacctgctggttggtcgggaccccgcgcatgatggggaagatgatgcactcgaacacgatgggcgacagtgcagggtagtactggtgcgcctcgacctccgtccatacgtccaccaacgcggcctccctgatgtcgctctcccggaggagatcgactttgctcgacttgtacttgcgaagaatgtactttgcgattgcgcgcgactctgaaaaaagaggactagtaagtttgtatttgctgcaggagaagctgataagattgccgcaagtatttaacaattaacatggtcgttaattatttgggttttggtagagagctgcaggttggccatggtggccactcaccgaacaagacgaggtccccgtcctgcagagcagggatcttcccaaatggctgcagaaaaggagaggtggcatccactgtgtatcacggtggaagctgatacatacatatgaaaaattactgaaaaaaacagctggagaaattcagttacgtttcgctcgacgtgctctgggctgttctgctcgccggcgaggaagtcgacggtcactagctcgtagtcggcgccgacctcctccaggcagaccagcacccgcgacacgttcgtcgagatggcccggccaaacaccttcaccggcgacatgccttctttcttttttttcctttgtcctcactgcagcttgaagatgacactgcaagtgcagtgaagacgatgacccactgtagcgcggatgcaaggccttggcagagtgcccttcacttatataaagcgtagcgtcagaagaagcccaactgcccaagtagtcatcttcaagtcttcgttgaaattgtaaaaatcactcgacaattttcgtgcaaagagggaaaaaatgtcagtggcgtgcatggaggagggaaaaaaagagggaaaattttggaacaaatttatatgcaatttatataagatcaatgtgtgttttgattcttattctgtgatgaacaattggcatttgtgattattggttttgatatttgaagattatcgtcgaagtggttttgtagataatcaattttcaggtgatgatcggattcactgttattttatgtgaccggtccgaccgggcggaggttgccggtcagaccggtgctatgtgtgcggtcagaccggccaggcccgcggtctgaccggccgacgctgtgtcggtttcggtttcgggttgtttctttggatatccgtgattatttcatggttatggcttctagatggatactatacgtatgtaatactgatgtttgctaacaatgagtcaagttggggatagcttggtctcggaatatggtttctctgtttgtttcatatgtaggtgactcgatgtctcgggagagtattgcggtgatggaccgggagtcagcttggtggtaagacgatgtccgtggtggtcagatatcatgcgggatactaaggctagagttgatgcacgtggttgatggagattccatatggcatacgatggaggtattgtgtgcgtatgggatgcagagtcgaatttggaaggacaccaaatttgatatgattggttatgtaaagtttgtgtcttgtactagagggtttcctaaggtattttggactcttagtatgagtttggttcgtgctttaggctgcctacctcatgtataaatagagggggagcatgaggcctcccggtatcgctttttgtatcggtttttgagagcaatagagttgctagtttagttagggtttcgagtttagtcgagatttttgtaaggagtgctgttggtgcactttgtaaacacagagagaagcaataaagttttcatctactttgagagttcttcgatttgtgtttcactgggtttcggcggtctaactggcaacactccggcggtcagaccggcggcaaggcagcggtcagaccggcgggtgacctgcggtcagaccggcggcggcaactggagctggcgattgatctcggtggttcgaccactgttacaaccttagtcagaccgacgatatccaggtggtcagatcgatgcatctacttcggtcagaccgcgatccgtcgatttcgagggtaacttttatttccgctaaaagttttcggtttttggttataccaaccattcaccccctctggttggctttgttcttgtgattcgatcctacaagtggtatcagagccacgtttgctcttttcgatctttactgatcttgagtttttgtcatggctacttctaataagtttacaactaagcctcatgttttcgatggaacggatttttctcattggtgtagtaggatgcaatcttacattatggctgagaattatgatatttggagaaaagtttctcatccttatgtgattcctgaagttattaatactgctactgcaaaaactgagtttgaactaaattgcaaagctcgcaatattcttttgagtgggatttctcgttcggattatgatcgtgttgctcatcttcaaactgcttatgagatttagactgctttgagtaatttttatcaaggaacaaataatattaaagaacttcgtcgtgatcttttcaaaaaggagtatattaaatttgagatgaaacctggagaagctttggatgactatctttcttggtttaataaaattttgagtgatcttagatctgttgattcttcttatgatgccaattatccacaatctgagatttctcgccactttttgaatggtcttgacatgtctatttgggagatgaaagttacatctattcaagagtcagttgatatgtctactttgactttggattcgctttacacaaaactgaaaactcatgagatgaatattcttgctcgtaaagttgattctaagtctagtgctttggtttcttcctcgacttctttggatgttggtgcttcttcatcgaagtcttctgatcttgctttatttaatgccgtgtccgatgatcaactcgaacagttcgaggaggaggacttggttttgttatctaccaaaatttctcgagctatgaaaaatgttaggaacaggaaaagaggtgaaccaaatcgttgttttgagtgtggtgcacttgatcatattcgctcgcattgtcctaagcttgggagaggcaagaaggaagatgattgtaaagtcaaagatgatgacgtgaagaagaagaagagcatgaaggagaaggagaagaagaagcattgcatgcagtggttaatccaagaactcataaaagttttttatgaattggaagatgaagatgagggcaaaggtaagcaagttgttgatctagcttttattgcttgtaatgcaagttctgatgttgatgaatctgatgatgataatgaagaaaatcttagttatgatcaattcttgctgcttacaaatttgctaagaaacttcaaacatgttctattgtgcttgatgagaaggatcgcactattgagattctaaatgctgaaatttctagattaaaatctttgattcctaatgatgataattgtcaatcttgtgatgttttattttctgaaattaatgctttgcgagatgtcaattcggttaattgcaaaaaattaaaatttgagattgaaaaatataaaaagttggagtcttcttttgctcttggatttgctttacatgctcgtgttgttgatgagttgattttgacaaagatcgttttgaaaaaataaaaagttgctttctgtgcaagttctttggtcaatgcttcatgtgcaaataaggcaaaacaaaacaatggtattttgatttctcaagattgttcaaagtgtgttttgaatgagatgaagttgaaaagatgctttagggcgtgttaaacacatataagatcaatgtgtgttttgattcttattatgtgatgaacaattggcatccgtgattattggttttgatatttggagattatcgtcgaagtggttttgtagataatcaattttcaggtgatgatcggattcactgttattttatgtgaccggtccaaccgggcggaggttgccggtcagaccggtgctatgtgtgcggtcagaccggccaggcccgcggtctgaccggccgacgccgtgtcggtttcggtttcgggttgtttctttggatatcccggattggttcatgggtatggcttctagatggatactatacgtatgtaatactggtgattgcgtaacaatga

SEQ ID NO: 4687 - DNA, 3087 bp, Oryza sativa
tgtgaggaacatggcatcatacatgagaggacgcctccctattctcccgagtataatgggatgctgaaaaggaagaatcgcacgctgactgacttggtgaatgccatgttggacaccgcgggactgcctaaggcatggtggggggaggcattgatgacctcaaatcatgtgttaaacagagttcctaacagaaataaggacaaaacaccatatgagatatggattggtagaaaaccatcactttcttatttgcgcacatgggggtgcttggcgaaagtcaatgtaccaataacgaagaagcgcaaacttggacctaagactgtggactgtgtttttctgggatatgctcatcatagcattgcctatagatttttaatagttaaatccgaggtaccagacatgcatgttggtacaattatggagtctcgtgattctatcttctttgagagctttttcccaatgaaggatacacatagtggttcgaaccaaccctttgaaataattcccagttcaatcacaccaccaaaacaaactgaacatacacatgaacttgtctctgaggaggatgtcagtgaagctcctcgaaggagtaagagacaaaggacggctaagtcttttggtgatgatttcactgtgttcctcgtggatgacactcctaagtcaatttcagaagcatatgcatctcctgatgcagactactggaaggaggctgtccgtagtgaaatggattccattatcgctaacggaacttgggaggtgatagagctaccctatgggtgtaaacctatggggtgcaagtgggtgttcaagaagaagcttaggcctgacggtactattgaaaagtacaaggctcggcttgttgctaagggctatactcagaaagaaggcgaagatttctttgacacttactcacctgttgctagattgaccacaattcgtgtgctactttccctagcagcctcacatggtcttctcgttcatcaaatggacgttaagacagcttttcttaatggagagctggatgaggagatctatatggatcaacctgatgggtttgtagttgaaggtcaagaaggcaaagtgtgcaaattgttgaagtctttgtatggtctgaaacaagctcctaagcaatggcatgagaaatttgacaaaacattgacatctgcaggctttgcagtcaatgaggcagataatgtgtgtactatcgccatggtgggggtgagggagttattttgtgcttgtatgttgacgacatactgatatttgggacaaaccttgaggtgataaatgaggttaaatcattcttgtctcaaaattttgatatgaaggatttgggagtagctgatgttatcttaaacattaagctaattagaggtgagaatgggattacactcttgcagtcccattatgtggagaagatcttgaatcgctttggctacattgatagtaagccttctccaacaccttatgatcctagcttgttgcttcgcaagaacaagagaattgctaggaatcaactggaatactcccaaatcattggctcgttgatgtacctggctagtgcaactaggcctgatatctcctttgctgtgagcaagttgagccgatttacctctaatccgggagatgatcactggcgtgcgcttgagcgagtaatgcgctatctgaaaggtactgtggaattggggcttcactatactgggtatcctgcggtactggagggttatagtgattctaactggatctctgatgtggatgagatcaaagccactagtggatatgttttcacactgggtggtggtgctgtttcatggaggtcttgcaaacagaccattttgacgaggtcaaccatggaagcagagctaacggcactggatactgctactgttgaggcagaatggctgcgtgatctattaatggatctgcctgttgttgaaaaaccggtgccggctatccttatgaactgtgacaatcaaacggtaattgtcaaagtgaatagttctaaggataatatgaaatcgtctagacatgtgaaaagacgattgaagtctgtcaggaaattaagaaactccggagttataacgttggattacatccaaacagcgagaaacctggcagatcccttcacgaagggactatcacgaaatgtgatagacaatgtatcgaaggagatgggtttgagacccatgtgagttatactatggtggtaacccagtctatgtgatcggagatcccgtgaattagatcctaggaagaacaaaccattaataaactagaggagagtaccaatatatataccctctccaagtgaagatgcatatactctcgtgagctgcaaggcaggttggctatgccttaatgagttctgttggctttaattagcaaagatgttgtcctgcagagcattcttgaaagaactcacctttgtgagcttgactgttggtcgcagtctatgaagattttgggtgaatcttctaggaagcttactaaagacctaggagtatgacttatacgctccacccgaggggtagtctacagacggtctagtaccagataagactttgagtgaaacttgcttgcacaagacttgcaattcaaggcgtagtccattgttcaagttgtgagtaagtgtagcttggagttctaggtggatgttcaaccttaattggtctccatcgaaccgctggtatataaacagtacattggaaaaggcaaatctcagtgggattttgagatttggtgggggattgttggaattaatgaatgggccttagcccactcgaagattaattctttggaaaatcacaaaagcccacctcatgggatggcatgcatgtggagtttagtaccaccttgcttattctaggagagggggacctccttaaaagggaggatgccctcctagtcgcttgaagcatgtgtggtggagagaagaggggaaacacacgcgcgcgctcgctcgcctcgcctcgcctggcagggcagggcagggcagggcagggcaagcggcgcgcgtgcactacgtacccctcgaatggtccgaaaaattggctcctcacccttgcgcagatgcagccttcttttgca

SEQ ID NO: 4688 - DNA, 1940 bp, Oryza sativa
ttttatggtatgctctatcataccatctcactttctgcacacatttgttttcaaacgtgacatgtctaattagttgtcacatttcagctttgcatggtgcataagcttggttatggaaactgggatgaactgaaagctgccttccgcatgtcgcctttgttccgatttgattggtttgtcaagtccagaaccacccaggagttggctaggagatgtgatacccttatccgtctagttgagaaagagaatcaggaatatgatgagcaagaaaggcaggcaaggaaggacaaaaggatggctaaggtacctctgttcatttcaccttccaagatctttatttcattgtttgaggctttatgcactactttgtgtactgttttgtgtagtactttcttcgtttcacaatgtaagtcattttagcatttcccacattcatattgatgttaatgaatctagaatgtgggaaatactagaatgacttgcattgtgaaacggagggagtatttcttaagagttaggacatgctttggtggttgccatgcttttccacaatgttatgcctgaagtgtggcatatacaatttgtggccattaacaattattgaccacaattgtggtaacatttagcaaaacaatgtgacactggtgctaagaaagcatggcacgccacaagattggcaaggacaaaacgctagtctaatacatatagttgaaaaatggccacttcatgtgtggcaacttgtggcaccaagtcatcaccaacctaatttcctgcaaatggatatatggcttttatagggctggtgcaaagggacatttgatattatgccatccttatgatatgagtggcatacattttgtatcaatctatcttgctaatctcctaatgtatcttctgttgcagaacatgacaccgacaaagcgatctgcgttaagggtttcagaaggtgaaactactccatcgaattctttcaagaggcgacgccagtcccttatggatgactatgtgggctcggtaagctaagctatcatctagtatggtgtcgtgaaatgacaagtcatgcacgttttgcaggaattttacatggtactctgtacttaggaatgcagtgctaatcagctgtactaatattttacagggaaggcgtaagcgaggttgatcgggcgttgcctgctgctccctttcaagcttgtcggaagtctgggagagctttgaaatgtgcgcgctatgtgatgtttaaagcctctaggcgcacttaactcatcgctgaggcctaactcagtatgatagtgtagtggtatataatactatatgttttctctgcggggatttcatgaccgctctggctagcctatgcattaggaatcagatgtactatggattatccaactttggtagaggtgaactcatcgaagctacccttttaaatccctatgcttatgttacattggccaaaagtccgctcctaatccgagtattctatcttccgagtatatcgtataaatcgctatcagtatttttcttttctggcccttgaaaatatattaccctctgttttataatataggatattttttaatctagatttatagtggtagaatgtgttttatttggtactatgtttttatgttatggaaaggatgaagtaatggtactatgtttctatattatggaaaggatgaagtaataggtaggcttacatgcatgtgcataagcacacggttatcgcgaaaatcttgcggttaccgtaagatataccgtggttaaaaaactaagaaggccatgtagttaccgcgagatataactgtggttaaaaaaactgagtaccgtgggtatggaaactaagaaggtcatgtagttaccgtgagatataaccgtggttaaaaaaactgagtaggccgtacggttatgtaaacctatgctgtgactggtggatcata

SEQ ID NO: 4689 - DNA, 6226 bp, Oryza sativa
cccgtaccgagtggtgaaggccgtctttggaatatcctcttcccgaattctcaactggtggtagcctgatcgcaggtctatcttagaaaacactttagctcctttcagttgatcaaacaaatcatcgattcgcggcaaaggatatttgttcttgattgtgacctcgttgagtgcgcgataatcaacgcacatcctcttcgtcttatcctttttctccacaaaaatgaccggagcaccccaaggtgaagtacttggtcgaatgtaccctttctgcagctgctcatcaacctgcttcttgacctctgctagttcgttggccgccattctgtacggtctcttgtaaattggagcggttcccggtgccaagtcaatccggaattcaatctctctcttgggtggcatggtagtaaggtcttcggggaacacttctggatactcgcagactatgggtatatcttccaatttcctcaaattcttcttcacggtgtccactgggatttccgcctcaatctgattcaaagagaccccttgctttggtgagtctggtgatttgtacactgctgtttctcccttctcgttggtcaaggtgactgtgcgattcgcacaatcgatgactcccttaaacttggtcagccaatccatcccaagaatgacatctaggtctttggattcgagaagaatgaggttggctagaaatggtgatctttggatttctattagcactgaagggctaaaactgactgaggttgagctatttcccgaggtatgaaccctcattggtgtgctaagctcttctttccttaacccatgcatcccgacaaacttctttgaaatgaacgaatgtgttgcaccagaatcaaaaagtattgttgcagggattgagttaacaggaaacgtacccagtacgacctctggtgctgcttgtgcctcctccgcagatgcgtggttgacacgagcctggataaaccttggcccggcacgcctaggcttcgggcatttgtcagcgaagtggccaagctcgccacagttgaagcaggaccctggttttgctccagtctccctcttggcttgcgcggacgggcctgactgtgccggtgccgttggtgggcgtggagctgcaccgcggttgggctgacctccatggtggttctgactgccactggcgccctggggaaagttgctagggttgaacgggcggtactggcggacgatcatggtggtaggtccaccctgctgcccgggagcgaagcgcggcctctggtgacttccctgaggtgccctgaactgagcggccttcctcttcctgtccatcttgttgcgttgatcatcctgacggattgccttgtccaccagcctttcgaaatcggcgtaatctccagatatcaactggttggttagctcatcatccagacctgctaggaatttttcctgcttctcggcgtcagtgcggacatcctccggtgcatatcgcgcgaggtgattgaactcatggagatactccgtcacagttctgttgccctaatggagtgcccggaattccctcttcttttgtgccacgaccccatctgccacctgcgccttcctgaagctacgacagaactcttcccaagtgacttcagtgcctggcgggcgggtggccatgtgattgtcccaccaagctgacgcaggaccttgaagctggtgtgtggcgaaagcaaccttctcctgatcattgcactgcaggagattcagcttcttctctatggcatggagccagtcattcgcctccatagggttggtggtgctggagaaggtggtggcctgacacgtagaaactctagcaacttggactgagggggagggggaccaaactactgatgctgctgttcggcgtgctgcagcatccgctggtgcatctgctggtgttgctgctgcatctgctgcatcatggctgccatcatctaagtctgatgtgccatcacttgggctagcgtcggattctcgggaagtggtggcggaccattgccggaattgctgttgggatgcacaccctcagtgcgctcttcgccgttgctgccctcacctgttgcgcggctaccattcctggtgtagaccatctggaggaaaagcagacgggggaaaagaagaaaaatagaggctcaaaaactaagctttattatataggaatttaaactgtaattgttctgatctgaattaaaacacttaaaaagcaagcaaaaatccttattaagacagccatatcataggcacatgatatcgaccgtcgactgacccacaagcaagcaacctaaatacacaaactaacaaacaaatgctagacagacgataaactaatggaaaatgagcctaatgctcggaacggctcctacggtcggtggagtcgaaggcgtcgtcctgctcgtcaccaggtccctctgagcgactcctggagcctggcagataagtctcgccgctgcccagctctgagccactggatctactgctgctgagatcgcagctgccactgggagtagcagacaaccaacctccgttgccactggctggacccctagcggctgatgctggagcgaaggagagagcagacgcgggagctgacacgtgaacgggagctagagctggtactggagctgcaggaactaccggagctgcgagcggaactggaggtgctgcgggagctgctgatggaggtgggttcttgggcgcaagctggatgcgcacgggtgcagtcgtggtcttgtggggcgtagtgcggatccggactcctcctggcgcgggaagaccctttaactgagcattatccctcttcaggcgcgctatctcgtccttcagagcgacgatcctcatgagcttcccatcattcaaggccttggacgccttgtgcaagtctgagtgcatcctatccaatcccctcatcacagcacacatgtgaccaaaggtagtgtcgttctcgccggctgtcggacggaaagtactgacatcatcaccgctggctcgacgagggtgaaatcggtacgccgtgtcgtggaagatgtagttgtggcgctcccgtagtctggccatcatcaggtatgctgcctcctgacaggcgtgatctgctgtgcctccggatgcctcaaccaccatattagctaggcaggtacccacgtagccgtgaacctccaggcgaacacggtgaggaagctcgccactgagcggtggaacagtcgtgtactctggcgcgttggggtagcccaccaccagcgtcatacgtgccaactctgccacaaagtcaatcatgccttctccgcggtggttgggtgggtggccggccatctagagaagacaaaggagtaggatcaatgcatgctcaaatccaaatttaaataaagcaataaaagactcaaataagagaatcgaataagagcaaaattttatgcatagatcgttttgcatgagagcgaataaataagacagactcacataacgataaaatattggggaaattagatacatactaataataacagtaagagcataaataccttgcaacccatgttcctgagctaggacctaatgcatttcacccattaaatcccaactgactgacgaataaatctcaatagttttacaaaaaccctggactgacttgttttgacaaatctcacttaaacgagcgaccaagatttttccccttgaaccacaagaacagatcccaatttttccggaacaaatccaattgcaaagaacatatgcaatgaaaaggattcagagggctcttaggtttttccatttggcttgtcctacggtcaaggtcggctctgataccaacttgtcacgcccagaaattcccgaatagaattccaagcagaatgtgcattaaaatccccgtccaggaccggccggggtacacaaacgacaatgttgacattcagatccacgtcttacaaacatcataaaagtcttacataaatgcagcggaaggaaagaaagacaacaggagctaagccttgactagaactgcagcgggaacaccactccacaggcatcctcgacggcacggacgaagcctactcctcagagaaacctccatctgacacatactcgtactctggggttgggaaaaatagagcaaaactgagtactacccactgtactcagcaagtcataccggaataggggtatgatgtagagaattataaaagaagagctagagtggttcatttgcataaagcgagcatttataaacagaagttgacagatttaaacagttgtaataattaattaatattaactatccactgtccaacgctatcccacgttgcaacaggcccaaccatccacctaaactatccaaattcaaaagattacactagggtgagactaatcacggtgaatctggttgaccgcccataaccgcgggcacggctattcgaatagttttactctgatcagaggtgtacaactgtatccacaagacacagccccacgacacgtttccgtgcgccgacatgccaccacaacataccggaaagaggccgtgacaagacccttcgcataaccccctctaaccaagcacaccacacctcaggtttcacccccactcctcgcaaggcagcgggcagtcccctctcgtgcctaggtgaatccgcaagccgcataggccgtcgcaggtcccatccaaactccatcacgcccacccttgcctggatgcgtcggctagaggaaagctacgttacaagccaagccgttgcttacgctggcttgtggtaagtacgataagttcttccagggcatcccgcgaaccggtccttaactgccatgggtgcgaccagcaaaaccatgcacccacagcccaccatgtgatttattttaattaaccaacaccaaagcggtggcactaatccaacaataccattagaaccaacagtctaaacattaataagattttccccattgtgcactagttgaactaagcatggctaagcaatccctagtccaatctctagtcatgttataaccctaagctgacgaagggacatggtacaacaatagcatggctatgacaataggtaaacatcccatagtaacattataaaacaatgcaatatttgaaagaaaacaatagagcatttgcaatataggatcaacatgttcaagtgacaagcatgacttgccttgctctgctgctggaggaacctcggcgactatttcgaagtacaccggagcgtcggaggaaccggaatctagcgacatacaaagcaaacattgcaaacaggctataagactactgaaacagggaacaaaaccatttttaatggattctacacatttttcttgatttactgagacttgaatgggcttaaacggagctcggatgaattagttatgaattttagagattcactgtgtttattactataaaagaaaaatcttaaatcatttattgcgcaatatattccaggctgacgtcatcaaggcggggcgcggcgctggcaagcgggacccgcatggcagtgactcggagagggaggaagggcgccgacaagcgggccccaccggtcagcggctcggggagggcggtccacggcggatcgggtccacggaccgggaaggagcggcgcgccacgcggcggccgaaccgatggctggtgcgcgcgggcacggcgcaaaccggcccggcgaccatggcgcgcgacggcgcggcacacatgcggcagcggcgcaagacggcggccggcggcgactggccggcggcggagagtggcggcgtcgcggcgaagcggcagctacgtggctaagcggcggctaaacggtgcgggagagagagagaaagaggaggagaggcctcaccgacaacgatcgacgacggcgagcgacggaggacgatggcgacagcgggacgagctccggagcctcctaacgaacaaaaggagagggttagagggagagaggagggtgcgagagagcgagggcgccggccgaaggcggcggccatggcgtcactcaccagcgcacgacggggatggggctccggcggcgaatctctacggaggaggggtggacgaggtggacctcggccgcgcgaacccaacggcggcgacggcgcggtgcggcggcgagtgtagcggcggctagaggcgaccggagtagcgggagaggcagcggcggatgggcgcacggcgcgggagcgatggggagctcgggagagggaggtgaaatggggaaaaagcgagagggagcgacgggg
